United States Patent Application Publication US 2007/0214517 A1 - sequence listing, part 48

SEQ ID NO: 60601 - DNA, 1019 bp, Triticum aestivum
  misc_feature (1)..(1019): Ceres Seq. ID no. 15173917
agttttcgcaacagaagaaccaccgcgcgcgccagagagagagagagagagatggcggcttctgcgctgccgtggaagcctcttttctgggagcgcttcgaggattcgcgtgccctcgccgccgccgcccgcggcgacctcgccgctgccaccgccaccatcggcatcgcactcgcatcgcctctgcgcggtggtgacgtcgaccgcgctctctcgctgattggagagtcggcggacaagcttgccatggcgagcaagcatcttgccatcctgctttccggccttgggaccgtcgagctcctcgcgcgccgacggatccgcggcgacgactcactagagcagcaggcccgaccgagggcgcgcgaggccagggcacgggccggcgccgcctacgacgacgtggctctctctcgcggccacctgggagccgcggcacgtctggttgcctgcggcgacctccccgacatccacttcggcgccgagtttctcgccgccaccagagccgcggcggcggcctcggagcacctccgcggggtggacgacgccctgcgcatccgcgacgacctcgcgtctccccttcgccccctgcaccgcagcgtccaccccgacacgcgcccagaggcggcggcctcggagcacctccatggggtggacgacgccctgcgcatccgcggcgacctcgcgcctcgttagtgttgcgttctgttactctacatggttaattcattcatttactcaatgttgatgtacacgttgtatagcttgcacgtgctgtcatgatgtactacaggaccgagggcaagtgattcacacacatactagcccacaaacgtatatggtgcccggtgtatgggtcagcgttggaggcaggcaaatatcagatgataccgaggtttaggtaataccgtgatgcaggctcatgacagccattggatctcagatctgacggctcatgggagcttttaggggggtgtttggttcaggggactttttagtcccagagactagaaaaagtcccc

SEQ ID NO: 60602 - protein, 230 aa, Triticum aestivum
  peptide (1)..(230): Ceres Seq. ID no. 15173918
SFRNRRTTARAREREREMAASALPWKPLFWERFEDSRALAAAARGDLAAATATIGIALASPLRGGDVDRALSLIGESADKLAMASKHLAILLSGLGTVELLARRRIRGDDSLEQQARPRAREARARAGAAYDDVALSRGHLGAAARLVACGDLPDIHFGAEFLAATRAAAAASEHLRGVDDALRIRDDLASPLRPLHRSVHPDTRPEAAASEHLHGVDDALRIRGDLAPR

SEQ ID NO: 60603 - protein, 213 aa, Triticum aestivum
  peptide (1)..(213): Ceres Seq. ID no. 15173919
MAASALPWKPLFWERFEDSRALAAAARGDLAAATATIGIALASPLRGGDVDRALSLIGESADKLAMASKHLAILLSGLGTVELLARRRIRGDDSLEQQARPRAREARARAGAAYDDVALSRGHLGAAARLVACGDLPDIHFGAEFLAATRAAAAASEHLRGVDDALRIRDDLASPLRPLHRSVHPDTRPEAAASEHLHGVDDALRIRGDLAPR

SEQ ID NO: 60604 - protein, 148 aa, Triticum aestivum
  peptide (1)..(148): Ceres Seq. ID no. 15173920
MASKHLAILLSGLGTVELLARRRIRGDDSLEQQARPRAREARARAGAAYDDVALSRGHLGAAARLVACGDLPDIHFGAEFLAATRAAAAASEHLRGVDDALRIRDDLASPLRPLHRSVHPDTRPEAAASEHLHGVDDALRIRGDLAPR

SEQ ID NO: 60605 - DNA, 626 bp, Triticum aestivum
  misc_feature (1)..(626): Ceres Seq. ID no. 15173565
actgatcatccacgcatcgatcccgtagcttcttcccaagttgcgagatcatggtgcgcgcgctctcaccttcttctcccgtcgccccctcctccttctacgctctgctgctgctcgtagtggccgcgttcatcgggccgctgcgggtggcgacggcgcagagcgtgccggcgccggtgccggtccgcgtcggggtgatcctggactgggcgaacaaggggtcgtcggcggtgtcgctgcggcggcggaccggcattcagatggcggtggaggactactacgcggcgcacccggggtcggccaccagggtggagctccatttcggggactccaaaggggacgtcgtcggcgccgcttccgccggacttccgcaccaagagcgagatcgtcaggtgcaatagttccggcgaactctaccctttctggtggccgtcttccactccgcaagctctctccgccaccacgtcatcctcaacattgtggcatcgtcgcctaggccatctcagtagtcaagctttgtcacacctagcacgtgctttttcttttccttgtaacaaaaacaataacgatgaccatttatgtcatgcttgtcaattaggaaaacatgttcgcctaccttttgatac

SEQ ID NO: 60606 - protein, 116 aa, Triticum aestivum
  peptide (1)..(116): Ceres Seq. ID no. 15173566
MVRALSPSSPVAPSSFYALLLLVVAAFIGPLRVATAQSVPAPVPVRVGVILDWANKGSSAVSLRRRTGIQMAVEDYYAAHPGSATRVELHFGDSKGDVVGAASAGLPHQERDRQVQ

SEQ ID NO: 60607 - DNA, 1015 bp, Triticum aestivum
  misc_feature (1)..(1015): Ceres Seq. ID no. 15172627
accaataactcctctctgaattttccgtggctgcacgttcggcacaggccacactccgcgcgcgcgcgcatacaggccacactacaaatcacactccacacacactgcccgaagtgcggcgccggcgatggatgctggtggaggtggggctgctgccggtggcggtgaagcagcagctgcaggtggagatggtgccagggcggcgacgggagccatccgtgcggtggcgaaggtgcacctcgccctcggctgggcggcggcgactttcgccctctgcgccgtcaccctccagccccagctgaagccgcggggaggtcagtgcgcggccaccgaggtggacgcagcgaccatgcgcgccaaggggctgctgttgctgctccccgccggcgcccaggcagcggcggccacggtggccgccttcgcgccggacgcctggagatggaggcggctgcacgtcggctggaccttcgcggccttcgcgcacgtcctcagcgtcttcacctacttccacctcgaggacgccttcactgctgcggccgccgtcgccttcagcggctgccccggccacatgtacgtggagacggccatgttcatcgcccacaacgtcctgctcttcgtgcccctctgcgtcttcttcattgtaggcatcgccgcactcgtcgccgccgtggtagccctttgattcctacaaacatatcgatgcatccatgcctagcgaagcttgtccagtactatgctatgtcgtccagcactccagtctaagctactagctaatgattgatcaatgtggcactaattagggttaattggtgtacatgctgctctgttggaatgctagatcgatgcatgatgtgcatatggttggagatgagcatgggatcgagtttgtactctttagagctagttattatatgaatgcatggagcttagtttgattctgtgctaaaactgcagcttgctgtgatgtgtttgtggcttgttttcttcttctttattttcgagattagtttgatgt

SEQ ID NO: 60608 - protein, 184 aa, Triticum aestivum
  peptide (1)..(184): Ceres Seq. ID no. 15172628
MDAGGGGAAAGGGEAAAAGGDGARAATGAIRAVAKVHLALGWAAATFALCAVTLQPQLKPRGGQCAATEVDAATMRAKGLLLLLPAGAQAAAATVAAFAPDAWRWRRLHVGWTFAAFAHVLSVFTYFHLEDAFTAAAAVAFSGCPGHMYVETAMFIAHNVLLFVPLCVFFIVGIAALVAAVVAL

SEQ ID NO: 60609 - protein, 110 aa, Triticum aestivum
  peptide (1)..(110): Ceres Seq. ID no. 15172629
MRAKGLLLLLPAGAQAAAATVAAFAPDAWRWRRLHVGWTFAAFAHVLSVFTYFHLEDAFTAAAAVAFSGCPGHMYVETAMFIAHNVLLFVPLCVFFIVGIAALVAAVVAL

SEQ ID NO: 60610 - protein, 107 aa, Triticum aestivum
  peptide (1)..(107): Ceres Seq. ID no. 15172630
MEAAARRLDLRGLRARPQRLHLLPPRGRLHCCGRRRLQRLPRPHVRGDGHVHRPQRPALRAPLRLLHCRHRRTRRRRGSPLIPTNISMHPCLAKLVQYYAMSSSTPV

SEQ ID NO: 60611 - DNA, 1154 bp, Triticum aestivum
  misc_feature (1)..(1154): Ceres Seq. ID no. 12613472
agctaaaatgaagattcaattacccaattcagttacacaaatacataagcttgctacaacgcgatcgtcgccaccgtttctcacaacacacacaaaggggtgcacaggatcaccagtgcaccccaacccagatttcaaatttacagcctagcacccccgacacagcccggacatctcgactaacagcacagaacaggaaaaactgctactggaaaactatcgccaagccctaggatctccctccaaggatctacttcttggccttcttggcggccggggccttcttcgccggcgcagccttcttggcgggcgcggccttcttcaccggcgtggatctcttggtgggcggcttcctggcggcggccttcttgggcgccgcggcggcaggggccttcttccctggcgcgtccttggccgaggtcttggcagccttggcggggcggcccttgggcttggcggcagccttgggcttcgcggcggccttggccttgggcttcgcggcggccttgggcttcgcggcggccttgggcttggcgggcgccttggccttgggcttcgcggcggccttcttggcgggcgccttggccttggtcttggtggcggtcttcttggctggcgccttcttcttcgccgcgggcttcttcttcgccgccggcttgggcttggccgcggcggccgacagcttgtacgaggccttgaccttggtcagcttgccggaggcgaccagcttcttgagctgcaccgacagaatcttgcggaagttggccgggaggtgcgccttgtgcttgtcctcgacgaacttggcgatggcgtactggctcgaccccgtccgctccttcagggcggtgatggcctccgacaccatctcggcgtaggtcgggtgggcgggggtggcgcggggcttcctcggggcggagggcttcttggccttggccgccttggccttggtctccttggccggcttcgcgtcgccggcggcggcctcggccgtggtctccacgacggggtcggcggccacctccacctcaggggccgggacatcggcggccacgtcggtcgacattgcagcgaggaagcgaggggagaggagagcgctggtgcttgcttgccggagccgagagagatgcgtgagctgaggcgcggtggtgggtgag

SEQ ID NO: 60612 - protein, 49 aa, Triticum aestivum
  peptide (1)..(49): Ceres Seq. ID no. 12613473
AKMKIQLPNSVTQIHKLATTRSSPPFLTTHTKGCTGSPVHPNPDFKFTA

SEQ ID NO: 60613 - protein, 47 aa, Triticum aestivum
  peptide (1)..(47): Ceres Seq. ID no. 12613474
MKIQLPNSVTQIHKLATTRSSPPFLTTHTKGCTGSPVHPNPDFKFTA

SEQ ID NO: 60614 - DNA, 1292 bp, Triticum aestivum
  misc_feature (1)..(1292): Ceres Seq. ID no. 13654213
attgggtaccgggccccccctcgaggtcgacggtatcgataagcttttttttttttttttttcttttttttttttttttttttttttttttttttttttttttttttttttacaacaggttaacagctaccatatgtagaataacattattctcatttcaattctcaggaagcgaaacagcaaggactggtccatgatctacatgagtctgatacaaactcagaagtgcaaagcagagtggaaagaccactcagttacaagggggtttggcatcaagcaagacttggtctctcctctttcatctggctgctcggtgctttgctattaccctcagttttctttctgcccctctggtgcctcatggaacaccacctcgttctcaggcaccgtccttagctcatcccccacagactcggcaccgcccgacgctccggcgtcatcagggtatctgacaaccaccacggggcagacgcagtggtgcacgcagtagtcgctgacactccctagcctgccattacctgccctgcgggaggcgccgaagccgcggctgcccatgatcatggcggagaggccgaggcgctcggcctcgaggcagaggcgctccttcatgtcgtggtccttgacgatgtggatcttgaagggaatctgcgcggcgacgagcggctgcgccaggtcctgcgacttggtggaggtgaaggcgtcgaagtcctcctcccgcttcttgcgcgcgtcctcctccgggtccccggacgccggcgccgcgcctcctccccccttctcgtcgccgtcgtcgacggtgacggggatggagccccagtcggcgccgtagagcacggaggtggggcgcacgtggaggagcacgacggcgtcgcccgggcgcaggtagttctgcacggcccacttgacggcgaaggcggactcgtcggacaggtcgacggcgatggcgatgcggcggtgcggcgaggaggaggcggcgagggaggagaagaagtagcgcggcgagctgggctggatcgccgccaccgccgccgcctgcgacgccgccaggcgcacggccggcggcggcgagggcgaggaggagggggacttgccgccggcgccggcgccggtcggggaggccgggtggtgcgtcgccatgatggttgttggtcctccggctgctcgatccgaatgcggaacactactgtgcagctctcgatctgatgaggggaatctcaggagagaatggggggagaggagacgagggttttgccaaagattgagatttggggctgtgcaacttgcggtggact

SEQ ID NO: 60615 - protein, 98 aa, Triticum aestivum
  peptide (1)..(98): Ceres Seq. ID no. 13654214
MIYMSLIQTQKCKAEWKDHSVTRGFGIKQDLVSPLSSGCSVLCYYPQFSFCPSGASWNTTSFSGTVLSSSPTDSAPPDAPASSGYLTTTTGQTQWCTQ

SEQ ID NO: 60616 - protein, 95 aa, Triticum aestivum
  peptide (1)..(95): Ceres Seq. ID no. 13654215
MSLIQTQKCKAEWKDHSVTRGFGIKQDLVSPLSSGCSVLCYYPQFSFCPSGASWNTTSFSGTVLSSSPTDSAPPDAPASSGYLTTTTGQTQWCTQ

SEQ ID NO: 60617 - protein, 91 aa, Triticum aestivum
  peptide (1)..(91): Ceres Seq. ID no. 13654216
MIMAERPRRSASRQRRSFMSWSLTMWILKGICAATSGCARSCDLVEVKASKSSSRFLRASSSGSPDAGAAPPPPFSSPSSTVTGMEPQSAP

SEQ ID NO: 60618 - DNA, 922 bp, Triticum aestivum
  misc_feature (1)..(922): Ceres Seq. ID no. 13596572
aacatctatgaaacgttttctataatactccagcaaaatcgttgggtttaattcttacaaatcacggtgtattcctgtgctcaaaatctgcctcatcattacgatagacggcattatttttacagaaccacgcagagaaagccaaacaggcttgattaatcagtactcgttgaaatgtatggcgccgagcttccacacgaggtacgtggtcccgaacatgacggtggtgatgatcccgaaggacgcggcgacgatgagcacgtccgtgcccacgggcagcgccgccagccagtcgaacgtccacccgtccttgggcatgccgcgcttggtgtcgtccagcaggttgctcggcgcctccggcagccccgaccgcttccgcccgcccttcttcccgccgtccgtctcccgcagcgcgtccagcacccggctcccgaactccggcttggacgatgaagagcccttcttgtccgccggcgacgccccgccccctggctccgcgtacttgcccagcacgcgcgccgcgcgcagccgctcccgcgccgtcagcggcacccgcttcggcggttcgcccggctgcggctgctggccgttgccggacgccaccgggttcacgccagcgctgatggttgtactttcctgcgcctccgccggcgccgcccggtcgttgtccgtggtcgcgcagggtcttgcgtgcttgagctcattctgaggcctttgcggggcggcagcggttcctatcttgtggaaagcatgcctggagcagaaggcgagctgggtgtaggacggggaagatctggagatgcctcctagtttggcagtggcagtcttggagggagaggaaccgaggctggtggcagccatcttcttctcacctgctcggccactgcattttgtgctctaggccagaagagatagaatttgt

SEQ ID NO: 60619 - protein, 176 aa, Triticum aestivum
  peptide (1)..(176): Ceres Seq. ID no. 13596573
MAPSFHTRYVVPNMTVVMIPKDAATMSTSVPTGSAASQSNVHPSLGMPRLVSSSRLLGASGSPDRFRPPFFPPSVSRSASSTRLPNSGLDDEEPFLSAGDAPPPGSAYLPSTRAARSRSRAVSGTRFGGSPGCGCWPLPDATGFTPALMVVLSCASAGAARSLSVVAQGLACLSSF

SEQ ID NO: 60620 - protein, 163 aa, Triticum aestivum
  peptide (1)..(163): Ceres Seq. ID no. 13596574
MTVVMIPKDAATMSTSVPTGSAASQSNVHPSLGMPRLVSSSRLLGASGSPDRFRPPFFPPSVSRSASSTRLPNSGLDDEEPFLSAGDAPPPGSAYLPSTRAARSRSRAVSGTRFGGSPGCGCWPLPDATGFTPALMVVLSCASAGAARSLSVVAQGLACLSSF

SEQ ID NO: 60621 - protein, 159 aa, Triticum aestivum
  peptide (1)..(159): Ceres Seq. ID no. 13596575
MIPKDAATMSTSVPTGSAASQSNVHPSLGMPRLVSSSRLLGASGSPDRFRPPFFPPSVSRSASSTRLPNSGLDDEEPFLSAGDAPPPGSAYLPSTRAARSRSRAVSGTRFGGSPGCGCWPLPDATGFTPALMVVLSCASAGAARSLSVVAQGLACLSSF

SEQ ID NO: 60622 - DNA, 723 bp, Triticum aestivum
  misc_feature (1)..(723): Ceres Seq. ID no. 13596504
gacagaaaatgaatcttccatttgcaacgctgattcaatgttgatacaaagatcagataacattaaagaggggccatgtctgcagagcgactccaatgactacagaaagaattgttcaaacagacgggaaaaaagagagaatattacatgcgaccctggaaatatcaacaggaaaattcagaactcaagcccattctctctagcagcatcggctagagctttgatgcggccatggtagaggaaaccccctcggtcaaagaccactttggtgattcctttctccaagcaggacttggctatcacttcaccaatcttttgtgccacttcagttgttggcccagcagagtactcaagctcctttgaaagagctttgtgcattgttgaggcagaagccagagtgcatgactttgtatcgtcgatcacctgagcatacaaatgcttgtttgagcggaaaacgctcagtcttggcctctctgtggtgccactcaccttcttgcggagacggtcgtggcgggcgatgcggtcggcattgggcgtggacaccttggccttggcgaggacgaccagggcggcccgccgcgccggcgagtgcgagggcgcggaggcggacgggaggtggacgccgcggctgcccgacacgaaggccgggaaggagtgggtggcgccggcgagcgccggcgaggctagcatggctcactttgcgctgctctgctggtcgctggg

SEQ ID NO: 60623 - protein, 107 aa, Triticum aestivum
  peptide (1)..(107): Ceres Seq. ID no. 13596505
MTLYRRSPEHTNACLSGKRSVLASLWCHSPSCGDGRGGRCGRHWAWTPWPWRGRPGRPAAPASARARRRTGGGRRGCPTRRPGRSGWRRRAPARLAWLTLRCSAGRW

SEQ ID NO: 60624 - protein, 78 aa, Triticum aestivum
  peptide (1)..(78): Ceres Seq. ID no. 13596506
TENESSICNADSMLIQRSDNIKEGPCLQSDSNDYRKNCSNRREKRENITCDPGNINRKIQNSSPFSLAASARALMRPW

SEQ ID NO: 60625 - protein, 68 aa, Triticum aestivum
  peptide (1)..(68): Ceres Seq. ID no. 13596507
MRSALGVDTLALARTTRAARRAGECEGAEADGRWTPRLPDTKAGKEWVAPASAGEASMAHFALLCWSL

SEQ ID NO: 60626 - DNA, 1775 bp, Triticum aestivum
  misc_feature (1)..(1775): Ceres Seq. ID no. 13589042
gtgtttaaacacttcaaaggcattgttcttatttattctttctgtgtcggagaaaataaagtaaacaggctgatatccccacaacgctatactaaagctggaagtggatcttcatgggaaacaacactggaaatgactaatgcacatacattctcatcagtttaacaagtctcacaagttccacatatattaagctgtttacagtatgcactagaacgcacaacatcgttcctaaaagcacttgtgagcggtgagctcacatgacgatctcaggcttcaggatgcttgacttgatctctttgtgcgggagaacaacaccgccattgctgtagacctcgtcacctacatgtacatcttctcccaggatcgtcatattctctatgcgtgcccattgtccgaccgtcgaatgccagccgataatgctgtttgagatgcacgcatgcttcttaatgcgcacaccacgcatcaccgtgcatcgggagagcctcacaccatcctccacgacgcatccaggtccaatagcgacatcaggaccaatcaggcaaccctccccaatcttggcgctgtcgtgcaccaggacattccccacaatatgtgctccggcggccagcttggcagctgacttcttcctgagtgaatctagataaagacgcaagccagtaatgtagtcccttggctggccaatatccatccaaaaacctggaagaaccatggcgtagagcttctgatcagcagcaattcgcggaaagacctctttctcgattgaagttggctttaactcgatgcggtccaggacagacggatttaacaggtaaattccagcattgatcttgttgcctacaaatatttttggcttctctacaaatctttccacaactccagttgtgtcctccataaccacaactccatatttcgaaggttcatccaccttagtgaccataattgttgcctcaccgccatggctcttgtgaaactgtatgagctcggcaaatgggtattcacttatgacatcactgttgaggacaaagaacggctcaccagatccatccacgagcttgtcccttgccagggcaagagggccagcagttcccaagggttcagtctcttgggagcatgtgattgtgatgccaagcttatcctcaaaatccttcaagaaattaatcatgacctctgggcggtagttgatggctaaaataacctctgtaacaccgacatctttcaaggcttcaatctgcacaaattggcaggttttaatcaataaaatttcctttcctcgactttgcacaaattgttctgcatttgtgacaaaaagagaagaaggggaaatcctgatggtgacacacaaagttttttcccaggcacgcgcacacagcaattttgcaaccacctaagctagcaagggaattgattaacgtttgcagggcgaaagatttcttagctcccatcagaactctgaactgaacacattgaaatgctactaatggcaattggctataaaagttaaagcatcatctacatgactactaagggtttgaagtttagctattgttgttgcggtaaggcgaatgatgcgcaacagcagtaggattaactcgcacacaactcactgactcacagcaccatactacacaatctctatcaagcgcagccgtctgtctacctggtgcagaatcatttttcgattaggatgttccaggtaatggtctcgtgcgaattcctgcagcccgggggatccactagttctagagcggccgccaccgcggggagctccagct

SEQ ID NO: 60627 - protein, 88 aa, Triticum aestivum
  peptide (1)..(88): Ceres Seq. ID no. 13589043
MRAHCPTVECQPIMLFEMHACFLMRTPRITVHRESLTPSSTTHPGPIATSGPIRQPSPILALSCTRTFPTICAPAASLAADFFLSESR

SEQ ID NO: 60628 - protein, 77 aa, Triticum aestivum
  peptide (1)..(77): Ceres Seq. ID no. 13589044
MALVKLYELGKWVFTYDITVEDKERLTRSIHELVPCQGKRASSSQGFSLLGACDCDAKLILKILQEINHDLWAVVDG

SEQ ID NO: 60629 - protein, 75 aa, Triticum aestivum
  peptide (1)..(75): Ceres Seq. ID no. 13589045
MLFEMHACFLMRTPRITVHRESLTPSSTTHPGPIATSGPIRQPSPILALSCTRTFPTICAPAASLAADFFLSESR

SEQ ID NO: 60630 - DNA, 1421 bp, Triticum aestivum
  misc_feature (1)..(1421): Ceres Seq. ID no. 13598722
gagagttgtactgtagttatattataggcgtcgaatttaccagagccgggcgaacacataccataggttcaacataagatggatcacagtatcaacataataaacatggacaggtgaataaggcagatgggcacaacgagctaataagaaaccaaccaactttgctgcatacaagcttgaatagatgggacagatatgatgttgaacggctaggctcagcagcatcatataaaatccccaagttcttcggaataacggaggatcccgtcctcgctgctggcgaagcggaagcggctgaagtcaatcttgttccactcttccctcagctcctcccaaaatttgccactgttgtcatagtagtcttcgtcaacctcggcgtaccccttctcgatcagatccttgcggaccttggcctgcaactctccaaacctgtcatcggcctccttgtcgttccccggcggcagctccttgtccagctcctcgcttctcttgatcatatcagcgggggatattgtggacggaaggatgtggatgttggggggctcccacttgtcggccaagatcagccttatgtcgtttttcagcagacgaaccttgcctggggcggccacgtccctgtactcgggcttggactgctcgaggaccctctccaccgcggcatccagctcttgaggttccagattggcggcctcgggaaagtttaacaacgtctccctgaccactggccggtgcttcgcaaattcagactcccagtcataatcatgatcatcctcgtattcagattcataatcatcatcgtcatattcagactcatagtcatcctcatcctcatcataataaccatcatagtcagcatcatcttgataataaagatcggcatcctcatcagcataaacatcctgttccccagcctcagcctgaggctcagaaacaggctcctgaatctccgcctcagcctgaagctcagaaacaggctcctcgatctctgcgtcagcctgaggcccagaaaacgttgccttagcgatgccctgctccaggaaggggtcgaccaccataggctcggcggcggccacagacacaacatcagcgcgtctggggagttttgccgtggccagaatctcattgatctccttttcctgctcctgctcttcatcatgatcctgatctgcctccttggccttccttttcagaagagcatactcgcggtttaacgccgtaggctcggtggcgcatcgctccggcgtgccgaacccgtcgatggctgacttctgctgcgcgggattggaggaaatctcttcggccgtgcaccgccccagcacgcgcttggtggcgaaaccctcgttgccggccatcggcggatgtgatcctgatgccgaatccactcgcttcgccaagtttagtgagattgggatttgttgtag

SEQ ID NO: 60631 - protein, 149 aa, Triticum aestivum
  peptide (1)..(149): Ceres Seq. ID no. 13598723
MIILVFRFIIIIVIFRLIVILILIIITIIVSIILIIKIGILISINILFPSLSLRLRNRLLNLRLSLKLRNRLLDLCVSLRPRKRCLSDALLQEGVDHHRLGGGHRHNISASGEFCRGQNLIDLLFLLLLFIMILICLLGLPFQKSILAV

SEQ ID NO: 60632 - DNA, 1058 bp, Triticum aestivum
  misc_feature (1)..(1058): Ceres Seq. ID no. 13583438
gctagaagacttttattttatttttatgtcattttatttggcgtaccatgagggaattaaaatttgccattgcctgatgtaggtgcaaagcaacccacatatttagttactgctgatgatctggactctttactagccatagaggtccagcctctagatgaccgaaaaagctttcagggtttacgtcgtccaagaggatggccatgatagcctcctctggttgacactgtcgagtccatcactttcagggtttacgtcgtccacttggttccagctattgagcatcgagccctctctccactgaggtggcgtcaagaactttgaatcatcactggagccacctggggtcattgacagagaaggaccaacacgtagtgtttgaagagtagaaaaggattccctcatcgcagacatggcctcgaagaaccgggtgcaggatgcaagcgcagcaggtatcggtcgtagcatttcaccccatacagcaggcgactctctgaagttttgactccactggaaatctccaactgatgctgtcaatgccccatagtcacttgccgctttcagaagcagctccgagaattgtttctggtattcagcttcaacaggaatgcaatcaagcgaataaggttgctgcagacgggcaataatgcggtccttgttttgaataacatctttcaaaatagcagtaattctggccaacgattcacacttcttttccatttcactaacatgagtcaaatgagcaatgtttttatcatcctttctgccttgtagctcgacttgcaaattggcaatgttccgctgcacgaccgtcagctcccttaataccctcaccaggttatcacttttgtcggtgttctgatcttcctgcgcgggaggggccgggaagccgaggtccccggcgatggcgagcgcctccgccatgccaccgagccgcttcgccggcttctgcgccgccgccatggcctcgaccggttgttgggtgagctggtgcgcgttgcgatttcgcctcgccggccggttgagcgtttgctgtaagtcgagtacggagtactggt

SEQ ID NO: 60633 - protein, 51 aa, Triticum aestivum
  peptide (1)..(51): Ceres Seq. ID no. 13583439
MASASAMPPSRFAGFCAAAMASTGCWVSWCALRFRLAGRLSVCCKSSTEYW

SEQ ID NO: 60634 - protein, 48 aa, Triticum aestivum
  peptide (1)..(48): Ceres Seq. ID no. 13583440
MTEKAFRVYVVQEDGHDSLLWLTLSSPSLSGFTSSTWFQLLSIEPSLH

SEQ ID NO: 60635 - protein, 45 aa, Triticum aestivum
  peptide (1)..(45): Ceres Seq. ID no. 13583441
MPPSRFAGFCAAAMASTGCWVSWCALRFRLAGRLSVCCKSSTEYW

SEQ ID NO: 60636 - DNA, 1395 bp, Triticum aestivum
  misc_feature (1)..(1395): Ceres Seq. ID no. 13596745
agcaaaagatgcatctttttataaatatactttttggataacaaacactcatcctcacaatacatctcgtacgcgactttatttttctctcacttcgaaagatcttattgctgggagtacaacatgggcatcctatcatcaattgtgtgagaaggatgttccaccgcattcatgccaacctatgctcactggagagcatcacttggcacattcgatgaaacctttgatgtcgaaacttccattaggatcagactttgtgatcacacccttttctgtaatgattgcagtaattagatttgctggagtaacgtcgaaggcggggttccagactgatatacctgacgcggcaacttgctttcctagaccaccttcagagttcaacaattcctttggagatctttcttctatgacgatttgcttcccagacgggagggagagatcaatcgaagttactggtgcggccacgtaaaactgcatgccgtgatgctttgcagaaatcgagaggttgtatgtgccaatcttgttggctgtgtcaccatttgcagctatacgatcagcacccacaattacagcttgaacttgtccattattcataagtgcagctgcagcagagtctgctatcagcgtcgcaggtattttgtcatgaactaactcgaaagctgtaagcctggaaccctggttaaatggacgagtttcagtgcagaaggccttctccaaaactcctccagagtgaagagcacgaatgacccctagggcagttccgtaaccagcggttgcaaggctgccagtattacaatgggttagaacagagatgtttctcgaacttccaagctgccgttgaaggaattcagctccatgcgagccaattgccttattatcggccacatcatcaactagcatagcttctgcagcttcaataaagacctgaaagatagatttggcatcttttgctgtttcagctgttcttgacactaagttctgaagctttgtagcagcatcagacaggttcactgctgtgggccggctggatacaaggtattccaacttcttggaaacgaatgaggctgcttccacaggtgtaccagtgaaatcgtgatcattaacttccacagccaatgacagtgctgccgctatggctatggcaggagcaccacggacaaccatgtctctgatcgcattccatccatccgcggagtccttgacatcgatgtaggcctcctcgaggggcagcttcctctgatcgaggaggcgaagcgcgccgcggccgtagaggatggactgaagcgcgctggattcgcccattctggccggggaaattcggagggctcggacggctcagatggaaaaagtgaagaacagaggatggaggccgcactgcgcaatcttgccctttat

SEQ ID NO: 60637 - protein, 155 aa, Triticum aestivum
  peptide (1)..(155): Ceres Seq. ID no. 13596746
AKDASFYKYTFWITNTHPHNTSRTRLYFSLTSKDLIAGSTTWASYHQLCEKDVPPHSCQPMLTGEHHLAHSMKPLMSKLPLGSDFVITPFSVMIAVIRFAGVTSKAGFQTDIPDAATCFPRPPSEFNNSFGDLSSMTICFPDGRERSIEVTGAAT

SEQ ID NO: 60638 - protein, 95 aa, Triticum aestivum
  peptide (1)..(95): Ceres Seq. ID no. 13596747
MLTGEHHLAHSMKPLMSKLPLGSDFVITPFSVMIAVIRFAGVTSKAGFQTDIPDAATCFPRPPSEFNNSFGDLSSMTICFPDGRERSIEVTGAAT

SEQ ID NO: 60639 - protein, 84 aa, Triticum aestivum
  peptide (1)..(84): Ceres Seq. ID no. 13596748
MKPLMSKLPLGSDFVITPFSVMIAVIRFAGVTSKAGFQTDIPDAATCFPRPPSEFNNSFGDLSSMTICFPDGRERSIEVTGAAT

SEQ ID NO: 60640 - DNA, 1482 bp, Triticum aestivum
  misc_feature (1)..(1482): Ceres Seq. ID no. 13596911
gaacaaagtataccgttatcacttatcagttgacaaattgcttctgaataaccagaaaatgtggctgtgagatattattgcatgcaccacagcccacagccttatgactaaccctagactgcacgcagaccatggccaacagttcgagggccatttgccgccgcagtcgaaaaacacaaccggccaccctaggcactagctctaagtacctgaaaaccggcaccgattggcaagtgctcactaggatggtggaagttgggcaggcctccttccacatccggggaaccccctcgtgggatccgaagtaagctggtaggttttattgaaccgccttccgacaggaatatgtagtccaatgttccagtaaaacctggagtgcaatttgtgaactccggctcccctccgttctcagcatacaggctgcgcaatttgatcagggcttcgtccgtagattcggagccagctgatacaaggtaattgtataccttatcaccaggggtggagttaaaatcaccagcaatgatcacagaaggtttacaggtgaacttatttgcgataattttctcaaactcagagacttttgaaagaagatactttgcttgagccaacttcacatcaatccattctggatcccaataaatatgtgtgttcgccacaatcaggatatgctcacaaggatcgccaagcttgaaagcagcaagtaaaccaacgcagtcacgcttcaatctcacacgtggatcatttggatctccacgtttcttattatcttcctttccactagattcttctgatggtgaagaattattcgagggggcactaattacattatcattaagatgacatgtttccaccaagtcattgtaatgtattacttccttctgtaacagttccacactttttggtttataaaatataccacatccatcccgtttgtctccagatcgctggacataaatacttgaatatccagtactttccatgtttttcctatagaatgtctcatattcatccaactcctgtatgcacatgaggtcggcattaaaactcttgagttctgttagaacggcttttgaacgagctttccacttaagagacgcggatggagaatggggaaaaaatgcgctcttcacataaacctgggcgagtatgttgtaggaaaccagccgaaactggtacccgtctgccccggcatcaggctcggactgcgctgtggggagaggggcgaatctgggctccgcctgcgcgctcatccgccgcttgcaaatcgggcggaaggggaggcggcggccggagggagggggagaggaactggggaggaggcggcggccgaggaagagagggagggaagccgcccagattgcctggggttttaggagcatcggcggcggctgtgtttgcttgcgcgcaaccgaaaaggaaaagatggtgtgtgcggaaggcgacctctgcttcgcctgttcgcggcgtgactgtgtccgggtc

SEQ ID NO: 60641 - protein, 127 aa, Triticum aestivum
  peptide (1)..(127): Ceres Seq. ID no. 13596912
MENGEKMRSSHKPGRVCCRKPAETGTRLPRHQARTALWGEGRIWAPPARSSAACKSGGRGGGGRREGERNWGGGGGRGREGGKPPRLPGVLGASAAAVFACAQPKRKRWCVRKATSASPVRGVTVSG

SEQ ID NO: 60642 - protein, 121 aa, Triticum aestivum
  peptide (1)..(121): Ceres Seq. ID no. 13596913
MRSSHKPGRVCCRKPAETGTRLPRHQARTALWGEGRIWAPPARSSAACKSGGRGGGGRREGERNWGGGGGRGREGGKPPRLPGVLGASAAAVFACAQPKRKRWCVRKATSASPVRGVTVSG

SEQ ID NO: 60643 - protein, 88 aa, Triticum aestivum
  peptide (1)..(88): Ceres Seq. ID no. 13596914
MGKKCALHINLGEYVVGNQPKLVPVCPGIRLGLRCGERGESGLRLRAHPPLANRAEGEAAAGGRGRGTGEEAAAEEEREGSRPDCLGF

SEQ ID NO: 60644 - DNA, 740 bp, Triticum aestivum
  misc_feature (1)..(740): Ceres Seq. ID no. 13596865
cccccctcccgttccaactttattgtgtttaaacacaatgagcagatataactgaaattcctgaactaggataaatgtggaggggcgcactacttggtccctcaggtggtttcatttgcggcgtcggctttacaaaccgggcaggcgttcttcacctccagccacttcttgatgcagcccgcatggaagtcatgcccacatttcagcttcccaagggagtccttgtgcttgtattcctccaggcaaattatgcacctttccttgtcttgatcattctgtgtacgggcagaattacgacaggctagctccatcacgcagcctgagattttttcgtcagccaggccagtgtttacattgccaattcgttcttccaacgccaggagctcctcatagctcatgtcatcaatgtccagtctcatgtcccagtgaggatctaatgcttctctagattcgtggatgaccaactggtccagcatcataaaacgctcagctgccgatcttcctaggttattctcctcgatcatcaaaggatgaaagcaatgataggaatccctcatccttctactccttgcactaccaccatgccccacagagacgtgccttggctgtctaaaagatgcagcagcttcggcatgtaatggctggacacttgatgatgctgcagcggtagcaggaggatagctgggcatggcaggttgatagcgagggttagcaggctcacaccgaactgctccagagtt

SEQ ID NO: 60645 - protein, 76 aa, Triticum aestivum
  peptide (1)..(76): Ceres Seq. ID no. 13596866
MWRGALLGPSGGFICGVGFTNRAGVLHLQPLLDAARMEVMPTFQLPKGVLVLVFLQANYAPFLVLIILCTGRITTG

SEQ ID NO: 60646 - protein, 40 aa, Triticum aestivum
  peptide (1)..(40): Ceres Seq. ID no. 13596867
MEVMPTFQLPKGVLVLVFLQANYAPFLVLIILCTGRITTG

SEQ ID NO: 60647 - DNA, 946 bp, Triticum aestivum
  misc_feature (1)..(946): Ceres Seq. ID no. 13585110
agatcaataacaatcacttgtagttccaatactgactccgtacaaacttctctgccataaatgtgacagaaggttgcactcatttgtcatttctgattgccagcacacaactaagatcatttggtttattctaaatacaacacagaatcaatatttcattacatttaagacaaatttgagaacatcatatcaaaacaaaatctgccattttgggatggctgttgagaggaggggtacagccaaagtttcaccgagaagggttgtggcattgttggcaactgtagcacagaaaaaaagagacgaaacggagcagcagaaacgagttagacgccttgccgtttccagaggagctcctcaagccattgcagctttcttttctgcctctatctgctttagctctgccaacctttccacccatgcccggtctcttgccactgcagccatctttctttctgtccgttctgcctccttcctcttcacagcaacagaatactgtgctttgcgcttcctcttctcagccatgatgaagtccttgcgctgcttgatccgcttcttctccttcctcccctgcacgctgcccttattcggctggctcgaagggataggctcccccggcgtgcacctcacccagtagtgcggacctttgggtcgcaggctggccctcttgcgccgggacacgaaccccgggcgccgcttggggaacctggtctccgtgagccctctgaagaggctggcccccatttccggcacccgcgcgacggcggtggcggtggcggccgcggcggagaacggccggaacccgatcggatccaggagccggagagggcgggaagggagcggaggaggacctggtgcgcgccgggaaagaggcgccgccggcgagtagagcggcgggagggctcgccggagggctcggaggaacgccatcgtggagaaggttctagaa

SEQ ID NO: 60648 - protein, 139 aa, Triticum aestivum
  peptide (1)..(139): Ceres Seq. ID no. 13585111
MAVERRGTAKVSPRRVVALLATVAQKKRDETEQQKRVRRLAVSRGAPQAIAAFFSASICFSSANLSTHARSLATAAIFLSVRSASFLFTATEYCALRFLFSAMMKSLRCLIRFFSFLPCTLPLFGWLEGIGSPGVHLTQ

SEQ ID NO: 60649 - DNA, 679 bp, Triticum aestivum
  misc_feature (1)..(679): Ceres Seq. ID no. 12585371
attcccctctcctctcctctcctctccttgcagtgagtcgtctctgctctcgcctagtcgcctccccgtctcccatcctccccacccctctcaccgccgaaccctagcgagcagatcgccgccgatggatcagggctgggcgagctggttcggcgccggcgtcacctccgccttcttcgcctccctcgagcgctgctcctgcatcaacctctctaccgacgacgacgacgacgacgccgacgacgccctcatgctctccgccgccgccccctccgacaagccccagctcgacgccgcccccgccgtcgcccccgccgtcgccgccgacaaggaggaggggcaggagcaggggcctcccctcccgcccgtatgacccgctccccacatccatccatcgcttgcgtacgccttactcctcgtcccgtctgagtcccgtccgcgtcctgtgctctagatctgatgaactgctgctcgtggccgactaataaatcctgccgattttgttgctggccatgttaaattaattgaattagtagtactatgcgtgtgtgtgtatgccatggattcctcttgttgtgttcatgtgaatatcatcatcccgtcgtgtggtaatttctttcgtagcggatcgatgtgccggatggacgatggatcaatctctatatatcatctgttgttg

SEQ ID NO: 60650 - protein, 123 aa, Triticum aestivum
  peptide (1)..(123): Ceres Seq. ID no. 12585372
FPSPLLSSPCSESSLLSPSRLPVSHPPHPSHRRTLASRSPPMDQGWASWFGAGVTSAFFASLERCSCINLSTDDDDDDADDALMLSAAAPSDKPQLDAAPAVAPAVAADKEEGQEQGPPLPPV

SEQ ID NO: 60651 - protein, 82 aa, Triticum aestivum
  peptide (1)..(82): Ceres Seq. ID no. 12585373
MDQGWASWFGAGVTSAFFASLERCSCINLSTDDDDDDADDALMLSAAAPSDKPQLDAAPAVAPAVAADKEEGQEQGPPLPPV

SEQ ID NO: 60652 - DNA, 855 bp, Triticum aestivum
  misc_feature (1)..(855): Ceres Seq. ID no. 12593187
ccctcgaggtcgacggtatcgataagcttttttttttttttttttatattaaacatggtctttaaacagagataaagtgcaatcagcttataagtgcagagatactcagtttatctctgaagacaacacaatcatccattgtttcagagcacacccacgcgaaattgacgagctacatgcataggtccagcacactggagcacttgcggaccttaattaaccagggccgaccttcgggatatcatagtgctcactaagatttgcgaggtactggttgaagtcctggatgcggtccctgtgcgacttgtcagccaccttggccaacttgtgtacgtcgatcttctgcttctgttcaatgtaacgcctctcagctggagtgaggtgatcataatcggcttgcgcactcccttcctctcccagcttgtcagcttcactgaactcattgtcagggtcacctggcaattcagagcttccaccttcgcggagctcgccgtgctcgccttgagacgactcctcgcggcggtgcttcttcttattcttcttcttgactccgccctccttgacatccagcggtttccccttcagcttgagcctccccccaacgacgttctggtactccgacatctcgactgcctgacaggaggaatcgcttcgcgggagcctccgatccgcgccgatccggtggaggatggcaggcacgaggaggaggacgaggggttcgaggcgcttcggtggttggctcggcggctccggtgacggtcgagggctcggcggcggccgatttgggttggggaaggggattctaatggtgcgagaccaccagggtctttttcgattaggatgttctaggtaatg

SEQ ID NO: 60653 - protein, 54 aa, Triticum aestivum
  peptide (1)..(54): Ceres Seq. ID no. 12593188
MAGTRRRTRGSRRFGGWLGGSGDGRGLGGGRFGLGKGILMVRDHQGLFRLGCSR

SEQ ID NO: 60654 - DNA, 1198 bp, Triticum aestivum
  misc_feature (1)..(1198): Ceres Seq. ID no. 13585332
atccatctagtcagtggcggagacaggcctggggcagctagggctatagccccaggcctaaaaacaacttcttttgtaatttcttcatgcaaagcatagaaaatcatagaactttatcactcaacatagcatagccccaggcgtagtctgcatctagctccgcccgtgcatctagtactacaaagctactatctctgttcatgcatgaacaggatctaattgattagcacacctatgaacgcaagaacagagaggagacaagtaatgctctggaaatgattcaattcatcgtgttctacgttgatatatctcagagtatatatgtatcaacgtatgtatgtatgtatgtattctttcaccattcttgtaataagatccctgcatgttttgctcgagttttactgcatctgcatgccatggctaggacaggagccgtacatctgcagcggcaggcgcggttgagcggcggcgatgagcggcttggccttgggcatggtcatcccgtagacctcgtcggtgtcgatgtcctcggggcggaggccgtcgggcggggaccagtcgaagcagtggaagagcctggcgagcgccatgagcaccaggatcacgcccagcggcgccccggggcacttgcgcttgccggcgctgaagggcaggatcttgaagtccggcaggtggctgatctccacgcgcccgccgtccgccgggaggtgcctctcggggcggaactcgtcgacgtcgtcccagatgcgcgggttccggcccagcgcgtgggtgttgatgaagatcctcgtctgcgccgggatgtcgtagcccatgatggtcgtcgccttgagtgactcgtgcgggatcaggaatggccccgccgggtgcatccggaaggactcccggacgacgcagcggaggtacgtcaggtgggggaggtccgcctccaccaccatgcggctggtgccgacgacggcgtcgagctcctcctggatcttgcggaggacgcgcgggttcttgatcacctcggccatcacccactcgttggtcactgatgaagtgtcagtagcagcggcgatcatgtcctgcgtatacacacattcagaatgatcatgtatgcatgttcatatgcactttctcttttaacagcagcagcagcagtgttcatttgtaataccaaacatctacagtacaaacctaaatgaagatgatctac

SEQ ID NO: 60655 - protein, 186 aa, Triticum aestivum
  peptide (1)..(186): Ceres Seq. ID no. 13585333
MIQFIVFYVDISQSIYVSTYVCMYVFFHHSCNKIPACFARVLLHLHAMARTGAVHLQRQARLSGGDERLGLGHGHPVDLVGVDVLGAEAVGRGPVEAVEEPGERHEHQDHAQRRPGALALAGAEGQDLEVRQVADLHAPAVRREVPLGAELVDVVPDARVPAQRVGVDEDPRLRRDVVAHDGRRLE

SEQ ID NO: 60656 - protein, 164 aa, Triticum aestivum
  peptide (1)..(164): Ceres Seq. ID no. 13585334
MYVFFHHSCNKIPACFARVLLHLHAMARTGAVHLQRQARLSGGDERLGLGHGHPVDLVGVDVLGAEAVGRGPVEAVEEPGERHEHQDHAQRRPGALALAGAEGQDLEVRQVADLHAPAVRREVPLGAELVDVVPDARVPAQRVGVDEDPRLRRDVVAHDGRRLE

SEQ ID NO: 60657 - protein, 139 aa, Triticum aestivum
  peptide (1)..(139): Ceres Seq. ID no. 13585335
MARTGAVHLQRQARLSGGDERLGLGHGHPVDLVGVDVLGAEAVGRGPVEAVEEPGERHEHQDHAQRRPGALALAGAEGQDLEVRQVADLHAPAVRREVPLGAELVDVVPDARVPAQRVGVDEDPRLRRDVVAHDGRRLE

SEQ ID NO: 60658 - DNA, 1329 bp, Triticum aestivum
  misc_feature (1)..(1329): Ceres Seq. ID no. 13590991
ggaccagattatcagaaatgttatttcaggcacagattatcatcaaagccaagccatacaatgagttaaacacagtgcaaggtacacattatgtttctgggaccagattattagacatgttatttcactcaatcagacaaacggtgtgtgttaactacgtgtcgtggcgaaaactggcacttggtggggacactataaacttcattagttttcaggagatctcaggacagagatcacgaattaggtatacgcattggggtttgtctgacttctgataagtgggacaccatcgtctcgccaaacaattcgatcctcacacaaggcagcaactgcctcaacgtaaacttggtgctcctcgtgaagaacccttgcagccaattgctctggagtatcattggctaacacaggcacaactctttgggctaaggtcttccctgtgtcaaactgctcatccacaaagtgcacagttggtcctgagtatctggctccagatgcaatgactgctttatgcacttttaaaccataataacccttgcctccaaatgccgggagcagtgaaggatgtatattcagcatggatctgggaaatgccttaactagctcaccaggtatgagcttcaagtaaccagcaagtagaatgaagtctaccttcagatccctcagaacattcagaagttcatctgtggagaccccctccggtgccgatttcgacttcgtaaacacgaccacgggaatgccattgcacattgcgtactcggcgccaccgcagcctggcttatcggtgacgagcgcaaccacatccccgttcaccttcccacccagggcggcctcgtggatcgaccggaagttggagcccccaccggacacgaacaccgcgagcctcttcctcctcaccccggagtccccggcgccgctatctatcaccgccgacgccgacgccgatgccgccgtgtatacgcgagcgttcggacggagcagcaaccgcccgcaagcgacggcgcagcgctgctgcctcttggccgctaagcccaggcgagcgcctctcctatgctggttcgggacggggtaaagcgagcagcgcagcccgcagccggaggaagcgacggcggccgcctccatcgggggagattccgctgcctcggcagagaaggtgggtatccggaggacggaacgagattagcgagaaggctaaggtgtgcttaggtatgaaggtggaggtgaagaaccctagcaccggcggccgccgtcgaggggctcctgctgcgcgccgcgcggcggctggtcgggtggactctcaaaaggccgacggatgaagggaaatgcttttgc

SEQ ID NO: 60659 - protein, 143 aa, Triticum aestivum
  peptide (1)..(143): Ceres Seq. ID no. 13590992
MKSTFRSLRTFRSSSVETPSGADFDFVNTTTGMPLHIAYSAPPQPGLSVTSATTSPFTFPPRAASWIDRKLEPPPDTNTASLFLLTPESPAPLSITADADADAAVYTRAFGRSSNRPQATAQRCCLLAAKPRRAPLLCWFGTG

SEQ ID NO: 60660 - protein, 123 aa, Triticum aestivum
  peptide (1)..(123): Ceres Seq. ID no. 13590993
MPPCIRERSDGAATARKRRRSAAASWPLSPGERLSYAGSGRGKASSAARSRRKRRRPPPSGEIPLPRQRRWVSGGRNEISEKAKVCLGMKVEVKNPSTGGRRRGAPAARRAAAGRVDSQKADG

SEQ ID NO: 60661 - protein, 111 aa, Triticum aestivum
  peptide (1)..(111): Ceres Seq. ID no. 13590994
MPLHIAYSAPPQPGLSVTSATTSPFTFPPRAASWIDRKLEPPPDTNTASLFLLTPESPAPLSITADADADAAVYTRAFGRSSNRPQATAQRCCLLAAKPRRAPLLCWFGTG

SEQ ID NO: 60662 - DNA, 1087 bp, Triticum aestivum
  misc_feature (1)..(1087): Ceres Seq. ID no. 13584373
caatccaatccaatccccaaaccagcagcagcccagcgaccaccagcatccaaatccaacctccatcgggaggaggccatggcgggtagggaggaggaggaggagaggtggacgatgaggccgtgcaccgccgtcaggtctacgatggccggcgaccatggtccggcgacgcgggttgtctccaagtccaagagggggaaggcggtggcgcggtccagccgcaagaagggtgagcggaggcccgagtgtgcggcggcgggagcaggagatcgggcgttgccggatccacacgggaaggctgcgatgccgaccaagaaggttgtcggcgcggcggcggcagcacaggctggaggcaaagggaagcgtccgctcaagaaaagcgagatcaggaccataatcgcgctgaagccggagcctttccccgaagacgactacctggacggcatggccaagtactacccgccggagtggctcgagcagaagaagagggagcacgcacaagacgccgcgtatttcgggaagattgacgccgactacgaggacttccggaagaaggtgatcgacggggtcaaggagaagggctacttcgaggtcgacgagggctacatggagaagaagcccgatcaacacccaaagccacaactgcagaaggtcgatttaagtgaactcatgcgctttgctgctacccctgaagaagagttgcggcggcgaggtggtaatggttatcatgagtactctactgatgaagaggatgatgctgttctggctcatgtgcgtgatgaagacgatgatgatgactttctgagtgattcttctgtgagcgatgaggagaatgctcaaaccgagggagcggatgttcacaaggttgctgctattgtggccagctgaaggcatttggtccatctctatctgtcttcatctaactagtagtatatgtttacttactggcagatgtctctttgctggatccgtctgtgttaaatgtacccctgttgtgtcttgtttcgaacaccgactatataatttacaatgtggttgtcgcttcgaaaaaaaaaaaaaaaacattctctggataccattcacctag

SEQ ID NO: 60663 - protein, 295 aa, Triticum aestivum
  peptide (1)..(295): Ceres Seq. ID no. 13584374
QSNPIPKPAAAQRPPASKSNLHREEAMAGREEEEERWTMRPCTAVRSTMAGDHGPATRVVSKSKRGKAVARSSRKKGERRPECAAAGAGDRALPDPHGKAAMPTKKVVGAAAAAQAGGKGKRPLKKSEIRTIIALKPEPFPEDDYLDGMAKYYPPEWLEQKKREHAQDAAYFGKIDADYEDFRKKVIDGVKEKGYFEVDEGYMEKKPDQHPKPQLQKVDLSELMRFAATPEEELRRRGGNGYHEYSTDEEDDAVLAHVRDEDDDDDFLSDSSVSDEENAQTEGADVHKVAAIVAS

SEQ ID NO: 60664 - protein, 269 aa, Triticum aestivum
  peptide (1)..(269): Ceres Seq. ID no. 13584375
MAGREEEEERWTMRPCTAVRSTMAGDHGPATRVVSKSKRGKAVARSSRKKGERRPECAAAGAGDRALPDPHGKAAMPTKKVVGAAAAAQAGGKGKRPLKKSEIRTIIALKPEPFPEDDYLDGMAKYYPPEWLEQKKREHAQDAAYFGKIDADYEDFRKKVIDGVKEKGYFEVDEGYMEKKPDQHPKPQLQKVDLSELMRFAATPEEELRRRGGNGYHEYSTDEEDDAVLAHVRDEDDDDDFLSDSSVSDEENAQTEGADVHKVAAIVAS

SEQ ID NO: 60665 - protein, 257 aa, Triticum aestivum
  peptide (1)..(257): Ceres Seq. ID no. 13584376
MRPCTAVRSTMAGDHGPATRVVSKSKRGKAVARSSRKKGERRPECAAAGAGDRALPDPHGKAAMPTKKVVGAAAAAQAGGKGKRPLKKSEIRTIIALKPEPFPEDDYLDGMAKYYPPEWLEQKKREHAQDAAYFGKIDADYEDFRKKVIDGVKEKGYFEVDEGYMEKKPDQHPKPQLQKVDLSELMRFAATPEEELRRRGGNGYHEYSTDEEDDAVLAHVRDEDDDDDFLSDSSVSDEENAQTEGADVHKVAAIVAS

SEQ ID NO: 60666 - DNA, 807 bp, Triticum aestivum
  misc_feature (1)..(807): Ceres Seq. ID no. 13598732
aaacataatccacaaagaatagttggtacatcatacaacttcagctcagagagcagtcaaagagcacatgacactaggctgtgttgtaatacaaattcatcatgttcatcttaagcacgcatgacctaccgaagaagagacgggtgatgaggcggctcattattgttgctagggtctgttaagacacctatatcgtctatatgtacagccatcagcagggttttacttctccgagctgagtcttcctgtgtccacctggggatcccaggtaaacttgcaaggacaaattagctttcctcatcatcagttttagcatttttccttgacttcttcactggatgccaaactttcccttggacgaaataggcctctgacggccatccccgctgcgtggtgaagcacatggcctcctccttggtcatcgcggccttaaccatggtggccctcgtcatctccgccgcgtccacggcggccctcgcgttgtagacgacggtgccgacgagatcggacaccccgagcggccgccgcatcggcggcacccagtacgaccccccgggcacgaaggggagccactccggagcggcccgccgaaccaggacgccgtggatggcgtcgttcaggcgccccatccccatcggctcctccccggagtccccggaggaggtggaggaggcggattcctcggagaggtcgatctcgatcagctccaccttgtctgagagggcgcggtggggctgcagggaggagcccggggcggccgggcggcctagggttagggttcgcgcgaggaggcgagccatggtagat

SEQ ID NO: 60667 - protein, 67 aa, Triticum aestivum
  peptide (1)..(67): Ceres Seq. ID no. 13598733
MASFRRPIPIGSSPESPEEVEEADSSERSISISSTLSERARWGCREEPGAAGRPRVRVRARRRAMVD

SEQ ID NO: 60668 - protein, 37 aa, Triticum aestivum
  peptide (1)..(37): Ceres Seq. ID no. 13598734
KHNPQRIVGTSYNFSSESSQRAHDTRLCCNTNSSCSS

SEQ ID NO: 60669 - DNA, 1639 bp, Triticum aestivum
  misc_feature (1)..(1639): Ceres Seq. ID no. 13584157
attctcgcgctcttttttgcatttaggctggtcatagtggggagtaacttagactagtaacatacatatgttactagtctatgttactaccttcatagtgggtagtgtcataggtgtggtaacatagttgtcttcatttattactttgtagactcattatgcattgaaaaccgctatgtgatggtaacatattctgttactctatttgcctctctcctcattaactacttgccacatcatcattttttcttatgtggcatctatgttactacctatgttactttcactatgaccagccttagtgccctcaccatcaccctccgcctccatctccgtcgtctgctgctgtcggccaccgttgttgtctaagcgggcaagaagagcacgatgaagaggcggcggctgcttcttgccagagtaacaacgcaacacggcccaaccgacccagccggcgatgaaggcgccggacgtgactccgaggacggccatgaagctgaacaccaggccggccatggtgaaggttggtggcagcggcgcgcgccgtcgcaggaccctctccgacctaccgacatcctcctccagctcccgcacctgccacggctccagcccctacgccagcagctgccgtgtgcgcagctcccgcacctgccacggctccagccccgacgccagcagccgccgtgcgcgtagctcccgctgccgtcgatgccacagcaggcggtgctcctccgggcccaggtcgtcatagtagtcgtcatctccgtcgttgtcgtggtagacggcttcctctgcttccgccatgctcactgttgtgaatatcaaccgatccatctctcttgcgacgggcccgggcgtaggagcgagtggagcagcagctggttgctggccgtggtagggctctgctgctgacgctgttctggtggcgcaagccctcgcccgtccttccgaccatgccgccggctccccgtgcccctttcagcgccggccttcatcttcgctgtaagccgccgaggtgaagcaggaatgcaggatcgtagatgccgaatccgtgaggaaggcggaacccaggccgaggcggcgcgaggtcgacgcaatggctgcgggctcgagcagctggtgtgtgcggtgctgaccaacgaggtggacgcgtccaggcggtagatggtgcgggggacagccagcgctggccgaagtgggaggccctgtggtgccggcgggcgccttttgatttttttacgcggcgagcctccgccctccgctgcatctgccggcgccggtgaccccaccgtcgtccagtgcttctgccggcgccagcatggcgtgtcttgaggcgtgcctgtgtgccaggagcaacgcggggagcagaggagcatggtctttccctaagctggacgctggcccgcagctccgcgacactctgctcgagcgcactcgggcgcttgctcgggcgggtcgtacgcgtcggcgagcgtagggaacggatcgcatgcggctgtgtcgtcctcggcagcggtgttagagtacmctgtgtatataccgtytagcgcatgtatatggtcvcctgctgtacgtgtgatcgtggcacgcgatctgtgcatagtggttcatgamccccctwcatctccaaaaaannnnncac

SEQ ID NO: 60670 - protein, 100 aa, Triticum aestivum
  peptide (1)..(100): Ceres Seq. ID no. 15222778
MKRRRLLLARVTTQHGPTDPAGDEGAGRDSEDGHEAEHQAGHGEGWWQRRAPSQDPLRPTDILLQLPHLPRLQPLRQQLPCAQLPHLPRLQPRRQQPPCA

SEQ ID NO: 60671 - protein, 97 aa, Triticum aestivum
  peptide (1)..(97): Ceres Seq. ID no. 15222779
MKAPDVTPRTAMKLNTRPAMVKVGGSGARRRRTLSDLPTSSSSSRTCHGSSPYASSCRVRSSRTCHGSSPDASSRRARSSRCRRCHSRRCSSGPRSS

SEQ ID NO: 60672 - protein, 86 aa, Triticum aestivum
  peptide (1)..(86): Ceres Seq. ID no. 15222780
MKLNTRPAMVKVGGSGARRRRTLSDLPTSSSSSRTCHGSSPYASSCRVRSSRTCHGSSPDASSRRARSSRCRRCHSRRCSSGPRSS

SEQ ID NO: 60673 - protein, 67 aa, Triticum aestivum
  peptide (1)..(67): Ceres Seq. ID no. 15222781
MPQQAVLLRAQVVIVVVISVVVVVDGFLCFRHAHCCEYQPIHLSCDGPGRRSEWSSSWLLAVVGLCC

SEQ ID NO: 60674 - DNA, 1166 bp, Triticum aestivum
  misc_feature (1)..(1166): Ceres Seq. ID no. 13597416
ttttttttttttttatttttttttttttttttttttttttttttttttttttttaactttacaagatcttttttcacttgataaactgctatctagctagcttaacaaacatccaacgaaatgttgacaacaagtcctttccaactagccaaccagggccacacatatataatcttcactaatgatggaactatgtacaatgagtcgagattgacagggtgaatgggtgcacaaatgtatgtagtgtgcattacaccatggaatatcacaatatactacaaatatgctgcacaggtgcttccaacaaggccatgcatgcccttccttcctcatcacctgtcacacagaagcttctcactgcggtggcgctgcattttgacccagtgtgttgtaggtgtagtcccctgaggagttcagtccatacttctgcctcattgatgagctccataggttcggatggacacctctggggtcagccgtggtagggagataggatggagcaccttgggcaataagcagcggcctccttatgaccacaaaatcttcatcgctgtcgtagtcgctactcgtgggtgaaaccatggctcgtagaaccatcgccaacaaaagcgagagtgcctgggtggcaacggtagcgagagcagcccatttgcagaggtcgaggttgtcatggacgaaggagacgaggttctggagctctccggtgcggtcatacggcagatcctggatccagtgctcgttgaggaggatgcgtccggccacggcggcctcgagcagcatcatcaccattgccaagccggtgtagaagcagaggcagcagccgctgctgatctcggcggcgacgtagcccgcgaggaggatggcgcagtagaggaggccggcggccatgacggcgcacgcgaaccagaggtctgggaggaggtggtggatgtggagctcatggtggcgcgcccaccgggagaggatggaggcggcgtagaggacggcggagagggcggcgaaggcctgcaggaaggcgaggagcttgagcaggaaccccaggcagcaccgcccgcacccgccgccgcccttctcggagcggccgccgcgcgccatcgccgccggtgggttgggggatttggatttgggtttgggttgagttttcgattaggatgttctaggtaatg

SEQ ID NO: 60675 - protein, 164 aa, Triticum aestivum
  peptide (1)..(164): Ceres Seq. ID no. 13597417
MDEGDEVLELSGAVIRQILDPVLVEEDASGHGGLEQHHHHCQAGVEAEAAAAADLGGDVAREEDGAVEEAGGHDGAREPEVWEEVVDVELMVARPPGEDGGGVEDGGEGGEGLQEGEELEQEPQAAPPAPAAALLGAAAARHRRRWVGGFGFGFGLSFRLGCSR

SEQ ID NO: 60676 - DNA, 1393 bp, Triticum aestivum
  misc_feature (1)..(1393): Ceres Seq. ID no. 13584839
ccaaaacgtttcaagtctcaaacaagtgatgatttttacatgctcaaattcaacaagtgatgaaccaaaagggtgattctgtaattgattgaaatctagcattcatctctgtcaacaacactcgctcgaattcttctggttcatgtacccaagttgacgatccaatcctcacgagtctcatataacttgaaatgattaataaccatgcctgcccggagaccgggacctgctcctcatcctccccgggtctcctcttcttgaaaaatcaccaccgttcctgtctctgggcctcgccctttcagaatccctccggctgttataggaaccgcctctatagtccgaccctctacctccctgctcatagggcctctctctgtcacggctccgctcatagtagcggtcacggtcgtgctccctggatctctccctatagtcgtcgcggtggcctctgttatggtatcctctctcccggttctgacgctcctctgcttccttctcccttgcaagcttctccgcttctttcgcagccttgtattctgcgaggaattccctgaccagaccataaccaatgtgctgcttgccagtgacatgggactgcgtcctctcaaggacgtcgttggtgacgagaaaggagccgcactgctcgcagagctccatcttcttctcttgcgggaccatggagagcttggtctcaatctggtgggtgagagccgacttctcgaggttgagaatgtccaccttcctcatgagggcggtggcctcgtcgatcttgccggtgtcgccgagctgctcaatctgctcgagcagcttcttgatcttctcttcgaggatggagagctgctcgaccttttcggcgtgggcagcagggggcggcagctcgacgacgtcctgagccagcctgtcgcggccgcgcctgatcttcttatccaggtcctggaccagcctctcgcagcggtgggcgagatcggcctcgaatttggggagggcggcggcgtagcggggggaggattcgaagctttgctttagggccgggtcgtggatctttgggcatactccgaggttgctcttggtgttgatgaagaggtcgtgggggcagaagcgggccatgtagggggcgcacacgtcggggtcgtcccacgccacctcccggtgctccttcttctcctcctccgtcaggtcccgcgacgaacccatcagcgcgtcaagcagagcacgctgcgcgtccatcgaatcttttcgattcgattccaccacgctgcgccggccgcttcaatccaatccaatccaatcgggtcaatcctctccgctccggccgcaaaccctaaccctagggagagatcagcaggcggcggcgatggaggcggaccagttgagcgagaggagaaaataaaat

SEQ ID NO: 60677 - protein, 190 aa, Triticum aestivum
  peptide (1)..(190): Ceres Seq. ID no. 13584840
MVSSLPVLTLLCFLLPCKLLRFFRSLVFCEEFPDQTITNVLLASDMGLRPLKDVVGDEKGAALLAELHLLLLRDHGELGLNLVGESRLLEVENVHLPHEGGGLVDLAGVAELLNLLEQLLDLLFEDGELLDLFGVGSRGRQLDDVLSQPVAAAPDLLIQVLDQPLAAVGEIGLEFGEGGGVAGGGFEALL

SEQ ID NO: 60678 - protein, 145 aa, Triticum aestivum
  peptide (1)..(145): Ceres Seq. ID no. 13584841
MGLRPLKDVVGDEKGAALLAELHLLLLRDHGELGLNLVGESRLLEVENVHLPHEGGGLVDLAGVAELLNLLEQLLDLLFEDGELLDLFGVGSRGRQLDDVLSQPVAAAPDLLIQVLDQPLAAVGEIGLEFGEGGGVAGGGFEALL

SEQ ID NO: 60679 - protein, 120 aa, Triticum aestivum
  peptide (1)..(120): Ceres Seq. ID no. 13584842
MINNHACPETGTCSSSSPGLLFLKNHHRSCLWASPFQNPSGCYRNRLYSPTLYLPAHRASLCHGSAHSSGHGRAPWISPYSRRGGLCYGILSPGSDAPLLPSPLQASPLLSQPCILRGIP

SEQ ID NO: 60680 - DNA, 1084 bp, Triticum aestivum
  misc_feature (1)..(1084): Ceres Seq. ID no. 13598479
gacaaaaacacatatagttcaagtcacaacggttcacatagcgcgggcaagaccactggagatcacatcgtttgtttgtttacagcaggtgaaatagagcgagcgagcaaacaacaggccaaatgaattgggattcgctgattctccattccaggtacaaaatggaactagtctactattgtactgttagcctctcatacgtaatatagctttttgccaagataatccactacagaaccaccgagtctcttcaagccaatatcatcaactcaatttcgataacacttctggcccatgcaatgcaatgtgtgctttttctcgcatggacaaagcatgctcaggcaggcagctcaagcttcacgttgttcttccaacttaagaaatagtagtagaagaaatctgcgtatagaccagtttggaccaaaccagcaatccaagggatccatctgctttggtgaccctctgtgaaataacggtagatccagtttagaatgtagaatgcacggtaggccccgagaaagagaacatattgtccagtcaagttatccacatttctgcttctctggagtagaactaactgaggtagaatcgccactgcctccaggtaaatcgaaaatgcccagcatatctcgcggagggtgaagcgctcgttgaagatgagcgcgagcgcgaaggccgcggcgacgaggaagacgtggcggaaggtgtcctggtcccggtcgtaggtgcggcgcacctgcgggtggcggcgcatgtaccagacgatagcggcggaggtggtgatgaagacgatcttcatgacggagttgtagagcgagatgtagtcggtgaagaggtcgaggtagcgcgccacgaacaccgccaggtacagctcctgcgtcttcctcgacacccctgagcatgacttgttggcgtagatcttgaggaggaggacgatgaccgagaagaggtgggtcatgtccccgaggaacctgaaggcgttcatggctgctgcggctgcggcggcgccggcgacggcggctaggttttgggggtttattcggtgggaggtcgctccagatgcggcgggggagtggcgaggcgt

SEQ ID NO: 60681 - protein, 57 aa, Triticum aestivum
  peptide (1)..(57): Ceres Seq. ID no. 13598480
MQCNVCFFSHGQSMLRQAAQASRCSSNLRNSSRRNLRIDQFGPNQQSKGSICFGDPL

SEQ ID NO: 60682 - protein, 49 aa, Triticum aestivum
  peptide (1)..(49): Ceres Seq. ID no. 13598481
MTEKRWVMSPRNLKAFMAAAAAAAPATAARFWGFIRWEVAPDAAGEWRG

SEQ ID NO: 60683 - protein, 47 aa, Triticum aestivum
  peptide (1)..(47): Ceres Seq. ID no. 13598482
MHGRPREREHIVQSSYPHFCFSGVELTEVESPLPPGKSKMPSISRGG

SEQ ID NO: 60684 - DNA, 1475 bp, Triticum aestivum
  misc_feature (1)..(1475): Ceres Seq. ID no. 13584853
aaccatcaccgcacccagcccatactttctatatggcgcgagagctgccttcttttgtttcctctcccgatttagtcttcctctcggatgatgagggagaaaaagaggtgatcaagattgaggattcagactgcggtggcgacacgcatgtctacctcagctctgacgaggaggacgacgcggtctacgccgatgatggctcctcctacgccaactgcaaagccgcatctgcggctgccacgtctttggccacggtgagctgcaccgactatggcgacgacaaccccaatggcggcgactctaatggggacggcaaccccaacaacagctacttcgatgacaacgacaacgactctgaagatggcggtgacgacgccagcgatttttcgtcggccgccacaagtaagtcgccaaaagccccatacaattattggcatcccaccgacctctgcaccctcgtggaaatagatgggcagctcctcaaggattttgaaggcgcgacagtaccatcgtctgtgctctatgaggcgtttatggaggatccacggccgatccgccgtggcgggctgacctcaagaaaaatctcatacaaaaggtatcagttgaaaaaaaaaattcgtgccttctgcaagttggatccgaggcgtgccttccgtacgtgtcgcacggctcaagaacgcaagttttacacctgctgcaaggaggcgtggcctcatattgtagaagagggccgtgtctgacttgctaataagaagtaaaccacagtcatgttcaatccggtcttttttggtttcaccaataaacaatagtagctttctttcccattttttccatgatcagtattactctggatttgatctgtttttcctttgcttgtattagtttatttttcttttgctttgtatgagattgttcagtacaagaatcatcagtacttttatttagcagtccacaattttattttattttattaaaaaaaaaaaaaaaaaaaaaaaaaaaaaaaaaaaaaaaaaaaaaaaaaaaaaaaaaaccaaaaaaaaaaaaaaaaaggtttttcattcccgccaacctcagggggggccccggaaccaatttcccccaaaagggagtcaaataacccgcccccctgggccgccttttaaaaacgccgggatgggaaaaccccgggggttcccaaattaaatccctttgaaaaaaatccccttttccccagttggggaaaaacaaaaaaggcccgccccaatcccctttccaaaaatttgcccacccgaaagggaaaaggaaatttgaaaccgtaaattttttgtaaaaatccccgtaaaatttttgtaaaaccacctcattttttaaacaaaaaggccaaattcggaaaaaccctttataattcaaaaaaaaaaaccaaaaaagggttaagggttttcccatttggaaaaaaaagcccactataaaaaaacgggaaccccaacgcaaaaggg

SEQ ID NO: 60685 - protein, 245 aa, Triticum aestivum
  peptide (1)..(245): Ceres Seq. ID no. 13584854
PSPHPAHTFYMARELPSFVSSPDLVFLSDDEGEKEVIKIEDSDCGGDTHVYLSSDEEDDAVYADDGSSYANCKAASAAATSLATVSCTDYGDDNPNGGDSNGDGNPNNSYFDDNDNDSEDGGDDASDFSSAATSKSPKAPYNYWHPTDLCTLVEIDGQLLKDFEGATVPSSVLYEAFMEDPRPIRRGGLTSRKISYKRYQLKKKIRAFCKLDPRRAFRTCRTAQERKFYTCCKEAWPHIVEEGRV

SEQ ID NO: 60686 - protein, 235 aa, Triticum aestivum
  peptide (1)..(235): Ceres Seq. ID no. 13584855
MARELPSFVSSPDLVFLSDDEGEKEVIKIEDSDCGGDTHVYLSSDEEDDAVYADDGSSYANCKAASAAATSLATVSCTDYGDDNPNGGDSNGDGNPNNSYFDDNDNDSEDGGDDASDFSSAATSKSPKAPYNYWHPTDLCTLVEIDGQLLKDFEGATVPSSVLYEAFMEDPRPIRRGGLTSRKISYKRYQLKKKIRAFCKLDPRRAFRTCRTAQERKFYTCCKEAWPHIVEEGRV

SEQ ID NO: 60687 - DNA, 1196 bp, Triticum aestivum
  misc_feature (1)..(1196): Ceres Seq. ID no. 15225407
atacttcgattcatttgtctctctgatggttgtctctctcgttcctttacaatcaacttgtaacacgttatcagcactgctcgcgagagcgattccgatgagaagaagcggaagaacaggcaaaaggtgagaagaaaaatgcctggtttcctgtcttttttcttcttcgcctggctcgcgacgccagccgtcgccgccgcttcatcgcacgcaactgtcgccacggtgtgggcggacgtcgccgcttccaccgtcgtgtgcgcgaccttcgccgtttccggcgtggaggtcgaaaccagcgccaccaggatcttcgtcgccaccaccgaaacggcgtggggccgtcgaaccagcctgtgcagccacctgcgcatctgcagcccgatgtgcccgcctggcttctcgccggtccggcagcaccaaggctcgaggatgacccggcgctggccgcgccgccgccgccgttttagtgctcggtacacggctgggtcgtatgccccctgcatcagtacaacttggacgtcaggaccgagccggtcgtggaggaagccgcgccaccgctgctgccatctccgaccccgcggtcgtcgaggtcgccgcccgcgacgcgctggcctctggctcctccaaccacggggttattgatgccgaagcaccgcgtctaccgtccctgacgccggccaccctctccagcccgccgtcggcttcgccttcaagcggccgcggccgaggccgccgtgccggcgcgtggagcccggccgcgcttgggctcgcgaaaggcgtctccaacagcgtcgcgccgggcactccacttcccggaggatcctccgacgaggacaggcgcggtgggagctcctcccgtcgcatgtgatgcggctatggtgatgtctgtctcggtgctatcgggagtttgaggatgaatcgctgggatttttttgtccttcggttggctctccttatccactcttttgactagcaccggactgccctacgtggcctggagcccatgtgttgtcgctgggcacccatgtgctgccgacagtaggcatcaacaggatttctttatttgctacttgcttgatcgatgcattagtactagttcagtatgtgagcaaataacactaattcaagcagtagttttattcctgtttagattgttaaattcagtacaactattttagtattgttttctgtcg

SEQ ID NO: 60688 - protein, 168 aa, Triticum aestivum
  peptide (1)..(168): Ceres Seq. ID no. 15225408
MPGFLSFFFFAWLATPAVAAASSHATVATVWADVAASTVVCATFAVSGVEVETSATRIFVATTETAWGRRTSLCSHLRICSPMCPPGFSPVRQHQGSRMTRRWPRRRRRFSARYTAGSYAPCISTTWTSGPSRSWRKPRHRCCHLRPRGRRGRRPRRAGLWLLQPRGY

SEQ ID NO: 60689 - protein, 125 aa, Triticum aestivum
  peptide (1)..(125): Ceres Seq. ID no. 15225409
MPPASVQLGRQDRAGRGGSRATAAAISDPAVVEVAARDALASGSSNHGVIDAEAPRLPSLTPATLSSPPSASPSSGRGRGRRAGAWSPAALGLAKGVSNSVAPGTPLPGGSSDEDRRGGSSSRRM

SEQ ID NO: 60690 - protein, 86 aa, Triticum aestivum
  peptide (1)..(86): Ceres Seq. ID no. 15225410
MCPPGFSPVRQHQGSRMTRRWPRRRRRFSARYTAGSYAPCISTTWTSGPSRSWRKPRHRCCHLRPRGRRGRRPRRAGLWLLQPRGY

SEQ ID NO: 60691 - DNA, 854 bp, Triticum aestivum
  misc_feature (1)..(854): Ceres Seq. ID no. 12617531
catccctaatcgaaaactaaattttttctccctgccgccgccacccatagaacccacctttcttcctcacgagcggcgagcgatgtcggaccgcagatctcgctctcgccatgtcctcagcactgccgcagatagccgcggcagatctgtcgctccctattccatcagcgctgctgccaggggctgccgcagatctgtcgatcgctctgctgccgagggccgccgcagatctgtcgatcgctctgctgccctcagatctcttgcgtctaccctgccgcctgggtacgatccgtcgcttcttcctacgtgtacgtggccaccgacgcagagctcgcgcgactccttggtgcgcggactcctgagaagctggtagggcccagcctctactgccagcactacggcgccgtcccggagcccgaggccaagcgcgctgccgcagccattgaggccgaggccttcgctgccatctccgagtacgcctccggcgtgaccttggcctcccgcaaggagcgtttcgccgtctacaaaatgtacttgaaggaggcttgcgattggctcctcgggttcttcaaatcccgagcggccgcaaggggggccatggtggaaccgggggattcgtcggcgcctactttggctcttgccgcttccacttccgaggagtagggctttcatcatatgggaatttaattgctgttattttgttggttcgttggacacttgttcatgatttcctacgtctatggttagtactactatatgctgtctatcagagattcgcacgcgtgaaaacttatgtttgtttctgaaactccttcgctatctataaataatatcgagaaagttattaaaggtgc

SEQ ID NO: 60692 - protein, 123 aa, Triticum aestivum
  peptide (1)..(123): Ceres Seq. ID no. 12617532
IPNRKLNFFSLPPPPIEPTFLPHERRAMSDRRSRSRHVLSTAADSRGRSVAPYSISAAARGCRRSVDRSAAEGRRRSVDRSAALRSLASTLPPGYDPSLLPTCTWPPTQSSRDSLVRGLLRSW

SEQ ID NO: 60693 - protein, 96 aa, Triticum aestivum
  peptide (1)..(96): Ceres Seq. ID no. 12617533
MSDRRSRSRHVLSTAADSRGRSVAPYSISAAARGCRRSVDRSAAEGRRRSVDRSAALRSLASTLPPGYDPSLLPTCTWPPTQSSRDSLVRGLLRSW

SEQ ID NO: 60694 - protein, 83 aa, Triticum aestivum
  peptide (1)..(83): Ceres Seq. ID no. 12617534
MSSALPQIAAADLSLPIPSALLPGAAADLSIALLPRAAADLSIALLPSDLLRLPCRLGTIRRFFLRVRGHRRRARATPWCADS

SEQ ID NO: 60695 - DNA, 498 bp, Triticum aestivum
  misc_feature (1)..(498): Ceres Seq. ID no. 12616266
caagaaggttcatgccgccatccgtgctgatcccaccatggccaagtcaaccaaggcgcctcccaagactcacaagaggtacaaccccaagaagctgacctatgagcagaggaaggccagcctcgtcgaaaggctcaacgccctcaacaactctgccggtgccgccgatgatgacgaggaggacgacgagtgaagagcgttcttgtccaccccagtgtagtattgcaacgtgcgtttttgttgaagtctggcaccctgcccaacgggcctgttcctttgagttttggttatgtcgcttgagttatagattgtgttatctggattatgtgccgtgctggcatttggatcttaatcttaatcctttagtctggcaccctttctttattttttgtggctgttccatgctggttggccttaggttgacatgaccttcgttgaggtcttttcagcttattactaaccatactaagtttatgattttaatgttgctgcgaagcc

SEQ ID NO: 60696 - protein, 108 aa, Triticum aestivum
  peptide (1)..(108): Ceres Seq. ID no. 12616267
MSRGRPASSKGSTPSTTLPVPPMMTRRTTSEERSCPPQCSIATCVFVEVWHPAQRACSFEFWLCRLSYRLCYLDYVPCWHLDLNLNPLVWHPFFIFCGCSMLVGLRLT

SEQ ID NO: 60697 - protein, 86 aa, Triticum aestivum
  peptide (1)..(86): Ceres Seq. ID no. 12616268
MMTRRTTSEERSCPPQCSIATCVFVEVWHPAQRACSFEFWLCRLSYRLCYLDYVPCWHLDLNLNPLVWHPFFIFCGCSMLVGLRLT

SEQ ID NO: 60698 - protein, 85 aa, Triticum aestivum
  peptide (1)..(85): Ceres Seq. ID no. 12616269
MTRRTTSEERSCPPQCSIATCVFVEVWHPAQRACSFEFWLCRLSYRLCYLDYVPCWHLDLNLNPLVWHPFFIFCGCSMLVGLRLT

SEQ ID NO: 60699 - DNA, 491 bp, Triticum aestivum
  misc_feature (1)..(491): Ceres Seq. ID no. 13584184
ctttctccttttatgtctgtcgcaagacatgcaaggaatgcgggccgacgctatcgacatgccccttgtgccgcgcgccaatcactgtccgtgtaaggctcttttcataaagatgatgcagacttctggaagtgaagaatcagccattcatgcaatatgttatcggcagtaatcaaggagcaagaagttgggcgggcaaggagatatgtacatgttcataaagctttactgtataacatgtccagcgccaactgtttcggctgtctgagtctgatgaataatttccatcacctcttgtgcagtttattcctgtcatcttgtaaaaaaagtagcagcagtagtcgtagttgaaaatcgtgttttcctgtaaaacctaaatgaatcaatacttcctccgtttttatttagttcgcgtattagctttagtcaaagtcaagctttgtaaactttgaccaattttataaacaaaaatattaacatatacgaaaact

SEQ ID NO: 60700 - protein, 64 aa, Triticum aestivum
  peptide (1)..(64): Ceres Seq. ID no. 13584185
MLSAVIKEQEVGRARRYVHVHKALLYNMSSANCFGCLSLMNNFHHLLCSLFLSSCKKSSSSSRS

SEQ ID NO: 60701 - protein, 56 aa, Triticum aestivum
  peptide (1)..(56): Ceres Seq. ID no. 13584186
FLLLCLSQDMQGMRADAIDMPLVPRANHCPCKALFIKMMQTSGSEESAIHAICYRQ

SEQ ID NO: 60702 - protein, 47 aa, Triticum aestivum
  peptide (1)..(47): Ceres Seq. ID no. 13584187
MQGMRADAIDMPLVPRANHCPCKALFIKMMQTSGSEESAIHAICYRQ

SEQ ID NO: 60703 - DNA, 1302 bp, Triticum aestivum
  misc_feature (1)..(1302): Ceres Seq. ID no. 12586751
agtagttgctgcagcttgtcatcagcttcggattctgcaggttgaagcacacttgcatggcgaattactacaatccattcataattaactaagcgcaggcgtcgatgcatgtcctgttgtcttctcggtcatcttcttgatccaccaactccagctcgtcgtcgtcggcggcggggttggcgaaccggagcctgagccggccccctcgcgggacgcctgcagcagctccttcccggggatcaccacctgcgtcagcacgaaccgcccatccgcgcggaacgtccggaagcacacgcacggcttcccgccgcgcccgatcgatcgtatcggcggcgggaacgacggcggggactccctcagccctggttccgccgcagcagctgcgtccctcagcgttgcttcctgcctctccctccctcggagggcggcggccgcgtcggcgccgtcatccctgaccatgtcgtccgagtccaccgtgctctcggacccgagcccctctgtgcacagcagcagcgaagccgagctcttcttcaggcagaagctcgcgctcctcctgacgccgccgggggcggccgcggcgccagcgggcttcggcctgaggagcgcgtccagcgacgagtcgtccttgctcttctcggcctgactagcgatgtcgagccacgacgccgccgtagcgcgtgcatcagggagtggcacccgtggcaggacgtgtcgggcggcggcgccgtcgggcttctcgtggaagtggagctcaccgaagatctccgtgaaggacgacgggtccacggccggcagcagcttcttgtggtgggtgtggttgttgcaagccgacagcacctccagcagcgtggggttctccggcaacggcttctcgaacagccgccgcagcgcgccgtcccccatccaacaagcagcgcccctcagtcagtcagacgtaataaaaaggctgcagtattttttgtgaccgtcgaattttgctcaagtaatctccgaggaagagaggtatatatagcgagagaaaaggagaggccaggaaaggcggatgcttttatgtggctgtcgaatcgggattcggaaatttgtttcttgttttttaggcttttcatttcacaagtggagccggtatatactcctactgcaacttgggaggaactggaaacgtgcatcttgcacagttgtctctgttcttcagcactggcctgcacaacatgtcagggagatggaaatatgcaggtagagctgatgcagcattgcatttgcatttgcagctcgcacaaatttgatggtgatctttgccctggc

SEQ ID NO: 60704 - protein, 104 aa, Triticum aestivum
  peptide (1)..(104): Ceres Seq. ID no. 12586752
MSSHDAAVARASGSGTRGRTCRAAAPSGFSWKWSSPKISVKDDGSTAGSSFLWWVWLLQADSTSSSVGFSGNGFSNSRRSAPSPIQQAAPLSQSDVIKRLQYFL

SEQ ID NO: 60705 - protein, 84 aa, Triticum aestivum
  peptide (1)..(84): Ceres Seq. ID no. 12586753
MWLSNRDSEICFLFFRLFISQVEPVYTPTATWEELETCILHSCLCSSALACTTCQGDGNMQVELMQHCICICSSHKFDGDLCPG

SEQ ID NO: 60706 - protein, 64 aa, Triticum aestivum
  peptide (1)..(64): Ceres Seq. ID no. 12586754
MLLCGCRIGIRKFVSCFLGFSFHKWSRYILLLQLGRNWKRASCTVVSVLQHWPAQHVREMEICR

SEQ ID NO: 60707 - DNA, 1316 bp, Triticum aestivum
  misc_feature (1)..(1316): Ceres Seq. ID no. 13597590
caatgatcgatcatcattcaccatttattgttagtgtcggctcccaggcacatataaattactagagacaacaacattacccacaaattccaaatgacggtcttccatttggttgccttggataatcccatttcaatcaacatgcaaggctgcagatgaacatatatgactctattaactaatagcacatatattcatcccaatggatttcatctgcctaagctaatgttgactcagacattacgcttgctgaataccactgggccaggtcaagtttttaacaggctctagaattgcttcgacttcgtgcaaaagttcttcatctatgcctgaagtcgacaattccactgcagcagcaacattctcctccacctgttctggagagttcattccaacaagaactgtagaaatttcattgttcatcaagctatacttcatggctagctttgtaatatgtttccccttctttctacagtgatctgctgctgtcctgcatgccagcttgagttcttctggtgcagggtgccactcaggtggcccgttatccgtgagaagccccatagcaaggggcgaagcactgatcaccccaacacctttgctcttcaagtacggtagcaaatccaccagcgcggtatcattgattccgtagtggcagtaggacagaaccaaatctactgagccgggaggcacccggtcaagcacgtaggtgaagatgctcaacggcaatccagtaattccaatgaaccgcgccttcccactctccttgatcttttgcagcgcaggaatcgtctcgttcacgatctggtctaggctggtgaactcgatgtcgtggcagtgaaggatgtccacgtagtcgagcccgaggcgcgcgaggctctcgtcgatgctgcgcgtgacacgggtggcgctgaagtcgaagccctccttgtagcggccgcacttggtggcgaccacgaagctgtcgcgcgggacgcccgagaagcggaggcagtccccgagcaccgactccgacaccgtgccgccgtagtacggggatgtgtcgaagaagttgatgccgaggtcgagggcgcggcggacggtggcgcgggcgacgtcgcgggggacgtcgccgaagacgttgccgagcggggaggcgccgaagccgacggggctaacgcggaggcccgtgccgccgagggtgcggagctccattgctcgggttggtgttggttgcgccgagtggaggaggtgggtggtggttgccttgcctggctgatggtccagctcgtcgtgtctttgtcttgtctcggcggggaatttgcgggagagatggtgag

SEQ ID NO: 60708 - protein, 67 aa, Triticum aestivum
  peptide (1)..(67): Ceres Seq. ID no. 13597591
MPRSRARRTVARATSRGTSPKTLPSGEAPKPTGLTRRPVPPRVRSSIARVGVGCAEWRRWVVVALPG

SEQ ID NO: 60709 - protein, 53 aa, Triticum aestivum
  peptide (1)..(53): Ceres Seq. ID no. 13597592
MFPLLSTVICCCPACQLEFFWCRVPLRWPVIREKPHSKGRSTDHPNTFALQVR

SEQ ID NO: 60710 - protein, 50 aa, Triticum aestivum
  peptide (1)..(50): Ceres Seq. ID no. 13597593
MPEVDNSTAAATFSSTCSGEFIPTRTVEISLFIKLYFMASFVICFPFFLQ

SEQ ID NO: 60711 - DNA, 1914 bp, Triticum aestivum
  misc_feature (1)..(1914): Ceres Seq. ID no. 13584573
cccctcgaggtcgacggtatcgataagcttttttttttttttttttcatccaaacgactcaaagtattaaataccaaagttttttccagaaaccacagtattccagaaaaccacaaaaatactttggcttccaaacgcacccttaatttttttaaaaagcccgtagcaactcacgggcattctagtatctctagtctatctgtgataatcgtgagagggaagaccagtaacgttatataacactataacaacactaactcaaacaacaccagactgaaactgaggcggtcgtggatcctatcatactcttagaaaccaaaggcaccagctggccctcctctataactggtctcttccaagcacgagtacaagacagtgagggcgaacatgatcccggtgccagagccgaccacgccagcaaggtctgccagaagcgtaagtgcaccaatgcagagtcctacaagaaacgctgccttgcctacatagcacctccatagctgcagaggaacagagtccggctgggcgactgttacatttcgtcgctccccaagcaacctgccaacgcactgaaaagggaaaatgacgtaaggccacaccccagaagctgccacagcgcataaaccagtgtgaggaatgggtgtcttcctacttcagccaaggttggtggtgtagtaacgtagtaggctaagccactgactggaactgcttgcccaaaatatctggatttcttccatttgcccagcaaaatgaccaccttgttcttttcaccaaacttcacgtacaccaactctgagatgatgtataggaatatggccattacatcctggaagagtaggggtgcaaaggacaggtaggaaagcttgatggcatagttcatttgcatactaggcacctcactggatctcagtggcaacatggcatggaagccttgcaggctgaggacgagtagaaagaaggcgcacgtggaaagcacactagccatctccgggaggtctcgacatccgtacaccttatgcatcgaagacaatttgtagtttccattaccaacgaatcgatgaataagggaggaagtgagagcttccccatgttgatcaccatgctgcccaccgtatagctttatgatacaggggctaaaagctttccagaaaatacttgtacaaatgtcggtggcactgaacaaggggatactcgaaagaaacccatatccctttttaaggagatcatcaagataaatgacgatgacacttccaaagaaatgctgaagcacgatcagaattgactgccctaaggtcagtttgcccaagataggtgaaattagcaccctgcagactgagaaatcagcggcaaaaattatcccaaccaacttctgcacccgactcaggagcatccggtcctcaggattgtttgctctaagaaccttacaccacagcaggaaatgaagcaccgcctcagacagaacaaggggcatgatcccagcagacatgacggagttgcagtcgggcatgtcaacccagtactgagagtcagcaaccgatggagaacggactccatatccatacacaggcagttggctgccgacaaggtagatgaggagggaaatggccgtgtaagccaccttctggcagcgagggaccatgctgctaggcctctggacctccggtaagatccccaccacttgcagggccagattgggcagctccagccagcgatctgccattgaatttgtgatgacgtgcagctagattacaattgttagtaccttccgtcgaagctggacggggagggccaagccaagccaacccaaggcggtagggttcttgccgcagttgcgctggccgcacgagaccgagccgctgctaagccttagccgctgtggtgctgcctgtgtggcgacgggcggcgagaggagagaat

SEQ ID NO: 60712 - protein, 79 aa, Triticum aestivum
  peptide (1)..(79): Ceres Seq. ID no. 13584574
PLEVDGIDKLFFFFFSSKRLKVLNTKVFSRNHSIPENHKNTLASKRTLNFFKKPVATHGHSSISSLSVIIVRGKTSNVI

SEQ ID NO: 60713 - protein, 75 aa, Triticum aestivum
  peptide (1)..(75): Ceres Seq. ID no. 13584575
MKHRLRQNKGHDPSRHDGVAVGHVNPVLRVSNRWRTDSISIHRQLAADKVDEEGNGRVSHLLAARDHAARPLDLR

SEQ ID NO: 60714 - protein, 39 aa, Triticum aestivum
  peptide (1)..(39): Ceres Seq. ID no. 13584576
MAWKPCRLRTSRKKAHVESTLAISGRSRHPYTLCIEDNL

SEQ ID NO: 60715 - DNA, 1278 bp, Triticum aestivum
  misc_feature (1)..(1278): Ceres Seq. ID no. 13584646
agatcaaattgcagtttctccttgattcatccatgatgatgagtaattaagcgcactggcaaacaatcaaagctaactagtaattaaacagtataggagcacctaaaacaaaacaaggagaccacaaacaacactgatttgtgaagctggaaagaaagaaagaaaggaacaagaatcaaaagagggggatcgagagtggagacaccttgctcgctggctagagctagagctagagctagaaggccggcggtggcggccggaaggagccaaacacatcgtgcgccatctgaccgccgccattaggcatctgcaggtttggcggcaagttgtagaatggcatcgacgacgggtctggcagtccgggcacgcccacggccgcacccatcccgccgtttcctcccggagccggcccgtccggcagctgcatgccgtcggatccggtggctgccgcggccgcctcgccaggctcttcatctgcgagcgggaggcgctcgtaggtggcgttggagaaggtagcagcgacgaccatgacgggcccagacgcgacgagctccccgatgacggtgccccccacgacctggccctgcccgccggcgaggtagacggcgaggccggtcgcccccggcgggcagggcgacgggaggaaggcgccggagagggagaggatctcgaagcggccgtggagcgtgacgacggagccgggcggcgcggcgggctggcgcagggtgacgttgccgacgacgccgctgccggagagcacggagaccccgcgctggcggcggcgcgcgaaggtggacaccgcctccatgatgtcggcgccgctggcgatctccagcacgtgggagcgcagcgtgttggggctctcccgcgtgatgatgatgggcggcttgggcttgttcttggaccccgcgggcctccctcgcggccgccggcccgacgacgagcccccgccgccgctgcctccgcctcctccggacgggcctgagcctgagatggcggcgttggggttaggggagttgtcgcccgcgccggcggtgggggagtcctgcgctgcgccggaggagtcgtcgtggttgttgctcccgctgctgtttggggtcgtcggggcctgctcggcgccgcccatggcagcgccgccggcagctgggccgccgaactgcgccaggtggttgcggagatccaggccgcccatgctccctgcccaccacgccatcgatcctctctctctctcaccgttagaggggggagagcactgctctgagtggagttgatgttttt

SEQ ID NO: 60716 - protein, 154 aa, Triticum aestivum
  peptide (1)..(154): Ceres Seq. ID no. 13584647
MMSAPLAISSTWERSVLGLSRVMMMGGLGLFLDPAGLPRGRRPDDEPPPPLPPPPPDGPEPEMAALGLGELSPAPAVGESCAAPEESSWLLLPLLFGVVGACSAPPMAAPPAAGPPNCARWLRRSRPPMLPAHHAIDPLSLSPLEGGEHCSEWS

SEQ ID NO: 60717 - protein, 153 aa, Triticum aestivum
  peptide (1)..(153): Ceres Seq. ID no. 13584648
MSAPLAISSTWERSVLGLSRVMMMGGLGLFLDPAGLPRGRRPDDEPPPPLPPPPPDGPEPEMAALGLGELSPAPAVGESCAAPEESSWLLLPLLFGVVGACSAPPMAAPPAAGPPNCARWLRRSRPPMLPAHHAIDPLSLSPLEGGEHCSEWS

SEQ ID NO: 60718 - protein, 132 aa, Triticum aestivum
  peptide (1)..(132): Ceres Seq. ID no. 13584649
MMMGGLGLFLDPAGLPRGRRPDDEPPPPLPPPPPDGPEPEMAALGLGELSPAPAVGESCAAPEESSWLLLPLLFGVVGACSAPPMAAPPAAGPPNCARWLRRSRPPMLPAHHAIDPLSLSPLEGGEHCSEWS

SEQ ID NO: 60719 - DNA, 1043 bp, Triticum aestivum
  misc_feature (1)..(1043): Ceres Seq. ID no. 13585491
agacccaacgccggccgcgcactttactccgctctgactgactccccgctcgcccaggtggatacatagataggctgatagatatagctttggaaggatcggatcggatcgacccaagcggctgcccaagtacgccagcgtcccatcctcgtcggccgagcaagcaagtgcagctagcggcagcggggagcagacatggtgtcgttgcagtcggcgctgctgccggaggccggcaagcgggccccgtgcctcttcttcgccgacgccagcgtcgtcgcgttcaccgccaccagcaagaaacggaaccgggaccgccaaggtggaggaagaagaagaacaccaccggaatcgagcttaattttgacgccgcgccgctccccctcgagtggcagcgctgcctcgacatcaagtcggggcagatccactactacaacaccaggacgcacaagargacgtccaaggacccgaggcggcacggcggcgcggcgcccgcggtggaggaggacgtcgcgaattgcgggccgcaagggctggacctggacctgaacctggcgttcgagccgcggcgtagttcgcccgtcaaggagctgcagaagaaggccgaggccaagccagcggcggcgggaggcgatcgtcacggggaccaggcgccgggcagcgcatccggcggcatggagatggtggcggccgtgtgcatgcggtgccacatgctggtgatgatgtgccgcgcgtgcccggcctgccccaactgcaagttcctgcacccgacgagccggcccacgcctccgccgccggagccggcgccgctcaagctcggtctccagctgctctgctgcagggactaagctcgctcctatagagatcagatcatgcatgcatggaccaagctagcattcgaatatccgatcgatcgtctcatggtgcmccttgatataagtgcaacgaggactgttacagtgcaccacaagtaatgttgtactctacgttgaccatgtagctgcggacgagwgtttgtacatgtgcaagtaataaacaatgatggt

SEQ ID NO: 60720 - protein, 116 aa, Triticum aestivum
  peptide (1)..(116): Ceres Seq. ID no. 15220765
  misc_feature (86)..(86): Xaa is any aa, unknown or other
MVSLQSALLPEAGKRAPCLFFADASVVAFTATSKKRNRDRQGGGRRRTPPESSLILTPRRSPSSGSAASTSSRGRSTTTTPGRTRXRPRTRGGTAARRPRWRRTSRIAGRKGWTWT

SEQ ID NO: 60721 - DNA, 1337 bp, Triticum aestivum
  misc_feature (1)..(1337): Ceres Seq. ID no. 13597751
caacaatgagaataacatcaatcagccaaatgtacatagagactttgtgacagaaagagcgatatatgtccttcgtgctgcagaatgctaggacattggttctcaccactgctatgatctactaaaattcaaggtccatgaaagaaaagttgtacataaaaccgaacgcacttacagaggaatacacatgacataattgttatgcaagggaacagttgtcaaatcacgcctccacggcaggcatagatcattgagttgtaactttaaccttgttaacaagctctgctgctgcacgggcggcggcagaggcacgggtggctgcagcaatggcagctcgggccttttctagcacgtccgacgagcctggaccagcataggatgatctctccgcagcagggggctgatgctcttgactgtccacattacccttggtggcagcatatgctcttgaactcacagcaggtgactttggggactcgggagttttgtttttgcttgtgtcgttgacaggtagaatcgatggcttatctttggaaatggaagaggctggagagctctcagttgtaggtgtttggacttggcggactgatgatcctgaatcgtccagcagatcttcatacttcttgttaaattctgcttcggtattagatgaatcccaatcaaggttgtactcgtgagcaatagctttcaaaaccttcaactttgattccgctgatggagccttaactgaaagcttctcaattattgtgcgattaacaccgcaatcagggcgcaattccatagcagcagcaacaaactccttcccatacttggtggtaaacaaattacggagatgcattagctcaggcaagtctgagcatcttcctgatgcaaagattatactagctattgcttctctcaattctatggggcattccttttgggcctcaacaatagggactcgtgccagaacaaattcacagaaaagctcaacaatctcataggcagccaatatattttgctcccgaataatatgctccacccgaatcctcgcaatagactcctggcctgtctgaagatattgaaccatctctttgcgcatatttatcagttgcatctccctcctattgcgcagcagcttgatcctcgaaatgatcaaattcaagcatgttttgcatttggtgccgaagggggaggagcgattgaagagcgagttgagggacgacatcgtcagtgccggccgctgatccacctgacccggcgaagacgaagacgaaggggaaagaagctgttccgtgtatatttgcaggtgtgcccctttacttgattgtttttatagtttacaccatacgccagat

SEQ ID NO: 60722 - protein, 97 aa, Triticum aestivum
  peptide (1)..(97): Ceres Seq. ID no. 13597752
MLHPNPRNRLLACLKILNHLFAHIYQLHLPPIAQQLDPRNDQIQACFAFGAEGGGAIEERVEGRHRQCRPLIHLTRRRRRRRGKKLFRVYLQVCPFT

SEQ ID NO: 60723 - DNA, 487 bp, Triticum aestivum
  misc_feature (1)..(487): Ceres Seq. ID no. 13589065
aagaaagatctggaatgacccgcggctgcggtccgtcccccccaccccccaccccccggagcgaaaagaaaaataacaatccgagcgtagcgaaaccctaggcagcgcagcagaggaaccgatccccggcgatggcggcggcgatggaggagctgacccgcagcgggttggcggggatggatttctccatcttccgcggggagtccgagggcgagcggggtgccggggggaaccatgagtgtatcaacatcaggcctccatccccatccccatgcgccaacgaggagcagccgccgccggagaagatggagcaggaggaggaggagggggagggggagaaggaggagtgggtctacagggaggaggatcggatcaccaggtaccgcgggctgtgggagagccgcttcgccggcaaatacggctccttcgacgaccagacaactcttggtcccatgcgctttacattcggacccatcccgagctacgc

SEQ ID NO: 60724 - protein, 118 aa, Triticum aestivum
  peptide (1)..(118): Ceres Seq. ID no. 13589066
MAAAMEELTRSGLAGMDFSIFRGESEGERGAGGNHECINIRPPSPSPCANEEQPPPEKMEQEEEEGEGEKEEWVYREEDRITRYRGLWESRFAGKYGSFDDQTTLGPMRFTFGPIPSY

SEQ ID NO: 60725 - protein, 114 aa, Triticum aestivum
  peptide (1)..(114): Ceres Seq. ID no. 13589067
MEELTRSGLAGMDFSIFRGESEGERGAGGNHECINIRPPSPSPCANEEQPPPEKMEQEEEEGEGEKEEWVYREEDRITRYRGLWESRFAGKYGSFDDQTTLGPMRFTFGPIPSY

SEQ ID NO: 60726 - protein, 103 aa, Triticum aestivum
  peptide (1)..(103): Ceres Seq. ID no. 13589068
MDFSIFRGESEGERGAGGNHECINIRPPSPSPCANEEQPPPEKMEQEEEEGEGEKEEWVYREEDRITRYRGLWESRFAGKYGSFDDQTTLGPMRFTFGPIPSY

SEQ ID NO: 60727 - DNA, 1447 bp, Triticum aestivum
  misc_feature (1)..(1447): Ceres Seq. ID no. 13495628
ggccaaacataattaccatttaacacttgatacatcaggtaactgggatgatccatccatcccaaacacggcaacacacactctctggcgcatctccagacggcacacacacagcacgcacacatctctatcgtttcgtacacagagctcaaggaccgcgcgtgtcaggcattaccaccagcgcggtgctccactccactagtttgctaagccccaaagcaccgtccttcgtagttcgtacacataaccacgtacgtacgcacgcgcacgagaacgccaacacaccactcatataacgtacgcctgccggcggcgagcgagctcacgagctcagagctggtggcagctgctctccagcggcgccccacggtggcacatgttgtgctcgtagggcttgcagccgtgccgcatgacgccgtgcagcttggggagcggcccgcagaggttgttgtagctgaggtccagcgtctgcagcgtggacagcgcctccagcgacctgggcacggtgccgctgatgcggttgtggctcaggtccaggtacgtgagctccttggggaacttgagcttgctcaggtcgaactcgaggttgttgtaggacaggtccaccttgccgatgggccgcccctcggagaagaggaaggacgcgtcgccgctcagctggttgtgcgacagatccacggtgttgatctcgtcctgcgcgtcgtcgcgcgggatcgggcccgtcagctggttgtaggacagcaccagcgaccggaactgcccctgcacgaggctggccgggatgtggccggtgagctggttccggcggaggtccagcgaccggaggttgggcatgtcggcgaaggagttggggatggagcccgtgagcttgttgttggagaggtccacggagtcgaggctgtggaggcgcgccagggactccgggatggagccggagacgttggtgtgggagacggtgaggaactcgagcttggagagggaggtgaggcaggccgggatggagccctggaggcccgggaggcggaagagcgagagcgacatgagcgccgtcagccccgccagcgcggacgggatctggccgcgcacgtcgtcggcgccgtcgatgaagacgttgttcacgcggccggcctcgttgcacgtgaggtggtcccacgcgcagcagtccgccgacgccggcgaccacgtcttcagcgtcgccgggctgcccagcgcctgcttcacccggagcagcgcctgccggtccgcctgcgggcaccgctggggcagcggcgagcaatgcgccgtcgccaccagcaggagcgccagcagcgggaggaaggaggcggtcgacgccatcgtggccctgtggctgtgggtggctgctaccttctactagctcagctttgctagctagctatggaggaggaggccaaggtggcggaagtgttgagtgcgggagtgatgagct

SEQ ID NO: 60728 - protein, 197 aa, Triticum aestivum
  peptide (1)..(197): Ceres Seq. ID no. 13495629
MWPVSWFRRRSSDRRLGMSAKELGMEPVSLLLERSTESRLWRRARDSGMEPETLVWETVRNSSLEREVRQAGMEPWRPGRRKSESDMSAVSPASADGIWPRTSSAPSMKTLFTRPASLHVRWSHAQQSADAGDHVFSVAGLPSACFTRSSACRSACGHRWGSGEQCAVATSRSASSGRKEAVDAIVALWLWVAATFY

SEQ ID NO: 60729 - protein, 180 aa, Triticum aestivum
  peptide (1)..(180): Ceres Seq. ID no. 13495630
MSAKELGMEPVSLLLERSTESRLWRRARDSGMEPETLVWETVRNSSLEREVRQAGMEPWRPGRRKSESDMSAVSPASADGIWPRTSSAPSMKTLFTRPASLHVRWSHAQQSADAGDHVFSVAGLPSACFTRSSACRSACGHRWGSGEQCAVATSRSASSGRKEAVDAIVALWLWVAATFY

SEQ ID NO: 60730 - protein, 173 aa, Triticum aestivum
  peptide (1)..(173): Ceres Seq. ID no. 13495631
MEPVSLLLERSTESRLWRRARDSGMEPETLVWETVRNSSLEREVRQAGMEPWRPGRRKSESDMSAVSPASADGIWPRTSSAPSMKTLFTRPASLHVRWSHAQQSADAGDHVFSVAGLPSACFTRSSACRSACGHRWGSGEQCAVATSRSASSGRKEAVDAIVALWLWVAATFY

SEQ ID NO: 60731 - DNA, 1198 bp, Triticum aestivum
  misc_feature (1)..(1198): Ceres Seq. ID no. 13663116
ttgggtaccgggccccccctcgaggtcgacggtatcgataagcttttttttttttttttttatgcttaaaacagtgataatgcatcccacttcccacacgaggcggggttcctcctctggattgttaaaatcaagggatattgcgaggaaaatttagtgcatacaacatctctgcataccacaagcaatcagagagcaaaacgacatagtagattggaaaattgcctcaaacaacattagctgaggcggttcgaatctcagtaaaacactacacggccacttttccaagctgcagtcttcatcatgtgtgcggccttacaccgtgtatcgtccacctctgcttggtttctgacttcttgagtcatcgtggaagctgtagaccatcttatcattgtagtcaatcacctccttccatttcttgccaatgtctacctgaacagcttcgttactggcagtcttagtccataatgaaagcttatcctgtctctggcggacactagcaacaacaccacaaatttcctggctttcatcaaactgctctccaatcagagccatacacgtttcaagccacatggtatcaagattggccttcctgctagatatcacagtccatttgcccccatttgcgcactctggatcttcccactttggttctaccccagccttgaataaatgaaaatcagcacttcctaccagcttactcggacggaaaatctgatcatacaagcaccagaactcttcgacggtgtcgaaggtgtagccctttttgagcgaggtgccccaggcggcgccgggcttgggcttggtctggatgtcgtaccagaaggtccactgccgctgcagcttgtgcggccccttcgcctcggccgcacccgcgtcgccctcggccgcgacctccggggtctctgtcgccgccaccgggagcgcagcttcgacctctgccatgtcgcgccgccgcctttgcttttcgagggttttgggatggggaggatgagtcgcgagagccgcagcgacagagagggagagagagagagagaggagcagccgccgaaggaaaggggggggcagagggagctttgctacacgcacgggcataacttttttttcgattaggatgttctaggtaatggtctcgtgcgaattcctgcagcccgggggatccactagttctagagcggccgccaccgcggtgagctcc

SEQ ID NO: 60732 - protein, 146 aa, Triticum aestivum
  peptide (1)..(146): Ceres Seq. ID no. 13663117
MKISTSYQLTRTENLIIQAPELFDGVEGVALFERGAPGGAGLGLGLDVVPEGPLPLQLVRPLRLGRTRVALGRDLRGLCRRHRERSFDLCHVAPPPLLFEGFGMGRMSRESRSDREGEREREEQPPKERGGQRELCYTHGHNFFFD

SEQ ID NO: 60733 - DNA, 687 bp, Triticum aestivum
  misc_feature (1)..(687): Ceres Seq. ID no. 13597974
ctcgaccgatccccctcctcgacctgcctcgccgccgcctaggtaagctccacacgcttcgccatcgacctgctcgccatgtaccgaccaagcttcagctcgagctcgggatagccgtcgatgtcgcttccccggtcacctccagccgccttcttcaagtcggtctgcctccccgtcgtccccttcgtccgctgcttccactacatcgccgacgcagacgccaagttccgcgcctggctcttcctctgcttcctctacttcgcggacagcagcctcgccaggttcagagctcgtctgcgtcgctgcaggctcgactccgtcgccgtatacttgtgcttggagccaggagacgagtacgtgcatgaggaacctgttgagtacgcttacgaggatccatccttcgacaactctgagaaccttgcaggtgccgaggatactggcgcagatggcgcaactgagctgaagtgggaattcgatgaggcccttggtcgttactatgtatcgtttccagatgatcaatagtggggcccaggggacgatcggggatctaacatttggggttgtcttcttttcatttgaacttggccgtagccggtctatgagtgtatttgaatgatgtatgatcttaatttatgtattgtgtgaagtggcgattgtaagccaaccctctttatcccattcttgttc

SEQ ID NO: 60734 - protein, 133 aa, Triticum aestivum
  peptide (1)..(133): Ceres Seq. ID no. 13597975
MSLPRSPPAAFFKSVCLPVVPFVRCFHYIADADAKFRAWLFLCFLYFADSSLARFRARLRRCRLDSVAVYLCLEPGDEYVHEEPVEYAYEDPSFDNSENLAGAEDTGADGATELKWEFDEALGRYYVSFPDDQ

SEQ ID NO: 60735 - protein, 120 aa, Triticum aestivum
  peptide (1)..(120): Ceres Seq. ID no. 13597976
RPIPLLDLPRRRLGKLHTLRHRPARHVPTKLQLELGIAVDVASPVTSSRLLQVGLPPRRPLRPLLPLHRRRRRQVPRLALPLLPLLRGQQPRQVQSSSASLQARLRRRILVLGARRRVRA

SEQ ID NO: 60736 - DNA, 948 bp, Triticum aestivum
  misc_feature (1)..(948): Ceres Seq. ID no. 13656423
actctccgctcgccgccgccgtgctgctgcacgttctcaccctgccgccgccgccctgccctggcgcacagcacgcgtgcttgatcgcaccgatgttggccgctccgctcgccactgcgttgtagcccttgcttactgcacgcaccaccaagcagccatcacggctgggatctgatggctggcaggcgaggcaccggaggcggacagcctaggcctcaggagtgcggaggcgaggtcgggtggtggctcggcgaactacagcaaggggcgtcaaggtgcaggcttggccggaggaggtgggcccagatattcggggggacaaggaggatgagagggaacctcctgcagtggacgacgaagaaggggagtagtacccctcctcagcggaccaagatgacctaccatgccggaggcgaagtgttcagcggcagcggatttgaaggtggcggcagtagcagatcggcttaggaagaggaggaggagtacggtgggctcgacctgctggtggtggacgtcgggattgacgagatgcacagttcctatggtggctgccgggctaataggatttgtaggaggaggaggacgggtgggagagacctgctgctagaggacgagggtcgatgagatgcatgattcctatgcttctcttgagacagccatgatgggaacacgattcatatgctttagttatctatttcaactgatccatggttatagttgtacactgtatgggctaacttcttcaaattcggcttttttttcctgaagtgacgagagatcttagttatataggagtaaatgcgccttttggcgagtacaatttaaagctttattctttgctgatcaaaaaaaaaaaaaaaaaaaaaaaaaaaaaaaaaaaaaaaaaaaaaaaycaaaaaaaaaaaaaaaaaagtttatcgataccgccaacctcaagggggggcccgg

SEQ ID NO: 60737 - protein, 97 aa, Triticum aestivum
  peptide (1)..(97): Ceres Seq. ID no. 15219825
MAGRRGTGGGQPRPQECGGEVGWWLGELQQGASRCRLGRRRWAQIFGGTRRMRGNLLQWTTKKGSSTPPQRTKMTYHAGGEVFSGSGFEGGGSSRSA

SEQ ID NO: 60738 - protein, 67 aa, Triticum aestivum
  peptide (1)..(67): Ceres Seq. ID no. 15219826
MPEAKCSAAADLKVAAVADRLRKRRRSTVGSTCWWWTSGLTRCTVPMVAAGLIGFVGGGGRVGETCC

SEQ ID NO: 60739 - protein, 57 aa, Triticum aestivum
  peptide (1)..(57): Ceres Seq. ID no. 15219827
LSARRRRAAARSHPAAAALPWRTARVLDRTDVGRSARHCVVALAYCTHHQAAITAGI

SEQ ID NO: 60740 - DNA, 565 bp, Triticum aestivum
  misc_feature (1)..(565): Ceres Seq. ID no. 13656643
atcgaaaatctctctccctctactccgccagcgctgcttctccttggccggccaccgcctaccgatcctcccctacgtcccctgcgccgacgatgcggccccgtccagcccctccagccacaccgctgagtagtagaagagtgcctcggtgaacctgtcgaggaaccccggtttgttgtggtccgcctcttgctcgacgaccgtgaagatcttgggctgcaaggaggcgacgcagtctagaacggcgtcgatgggcgcctgatcggctatgtcggcgaggaggcggtggagctggagcacgaagttgaccgccacggcctcgcccggcgtgatctggagcatccacgggtggacctcgttgaggctgttggcggcgaccccgcggaaggagaatcggacgcggacggagcgcgcgaggtcggcgaggcggagaccgagatcgcggagctcgtcacggcctggtgcgtcggtgaagtgaacggcgacgcggccgatgccggaggcggtcgagacggcccgcgagccgaggcgttgtcatcggccaggtgcgcggcccgcgagcgcg

SEQ ID NO: 60741 - protein, 69 aa, Triticum aestivum
  peptide (1)..(69): Ceres Seq. ID no. 13656644
MSARRRWSWSTKLTATASPGVIWSIHGWTSLRLLAATPRKENRTRTERARSARRRPRSRSSSRPGASVK

SEQ ID NO: 60742 - protein, 49 aa, Triticum aestivum
  peptide (1)..(49): Ceres Seq. ID no. 13656645
RKSLSLYSASAASPWPATAYRSSPTSPAPTMRPRPAPPATPLSSRRVPR

SEQ ID NO: 60743 - protein, 43 aa, Triticum aestivum
  peptide (1)..(43): Ceres Seq. ID no. 13656646
SKISLPLLRQRCFSLAGHRLPILPYVPCADDAAPSSPSSHTAE

SEQ ID NO: 60744 - DNA, 1118 bp, Triticum aestivum
  misc_feature (1)..(1118): Ceres Seq. ID no. 13597957
gttgtaacaaatgatcagataagaaatttagtctcacatatggacattccccaatcaaaataggtcatttaatttcacctgtttggttacaaggtaattttctagaaaatctatttaccaaaaatatcaggcttaggactaagtcggccagcctcttgtgaccaaaagagagggatcgatcctcgcatctgtactattgcactcattcttcccttccaggaaccagcttcctcttcaaatactatttgctctgtttcaacatcgtttgcaacttttccatggtcattcacgcctcttttcaaataccgtgtcccagcaaaatgccgagatcttctcgaaatgagaataacatttaactccctgccaaatactgacagcttgacctgcttaaagtgtccatgaacgagagctacactccacagagcattgcggcaccttgagcgaatcggctctgtcagaaaagtgttccatacaaacaaattttcataaggtgtttccttcatccctgcagaggtgacattctgctgcaagctctgcatgattgggtatgtgtagctatagaagaaatcctttgtgagatcaacactggccaaaagcttcttgtaccttagctcgttcttagaggttgcaacatctgtctgtacagatgagtgcgggatggtgatcatctggctctcatctatacaatatatagcatggccacagatgcaaccgatttgacggcgcttggtgactaaaatcaggtaatatgactccaagaacttgatgcaacctgcgatgccgtaggccttggtgacgaaggtgaggccgccggtggagcggttgccctcggcgatgcgctggagtaggctcttgacctcctgctgggagtaccagacggggtcctcgctgaggtggagctccgacggctccgagcggtcaatcttgagcacccgaaaccaccgcttctcccgcgagctcccgatcacgtagaacctggcgcgcgtttcgtagaggcggaacttctccagcgtcgctgacgccgccgtcgggtcgtccgcctccgccgccatcgatcccgatcgaagcgcgcaagggaagagggggtggaagggagtccgaaggggacgatcggaaag

SEQ ID NO: 60745 - protein, 45 aa, Triticum aestivum
  peptide (1)..(45): Ceres Seq. ID no. 13597958
MRWSRLLTSCWEYQTGSSLRWSSDGSERSILSTRNHRFSRELPIT

SEQ ID NO: 60746 - DNA, 852 bp, Triticum aestivum
  misc_feature (1)..(852): Ceres Seq. ID no. 13662646
ccaatcagcaaagctccaggaaatttcaaaaacatgattcacaatcatatggttctgttgatgtttcagaatcaattcctcctatggttcactgctccagctagaattaagattcattctacaaggtgttccagtataggtgaccgaggggagagggatctctagggaactgcctttacaacctcatcaagtcatcattagctcaaagtgaacatgtcatcatgccatcctccttgaacgtatttggcttgcagccgcctgagggattcaacttgatctggtgatgcagtttcgacaaggaatgtctgaccccatatcttccgcagttcagatttatgcatgggtgagaggcacatgatgatcaagtcaaagcgagatactttcgccaaattctccaaaatgctaactgctaacactgcatcatcccggaaaattgaggctgtgcacttcacgatatcaatcagaaaagctgatgaaagtgcatccttaaaaatctctggaagtctctctggtcgaattgactttaacaactgtatttgctgggtaaggtcatcagagatagctctccaagaaacctcaaaatcataagctgtctttggtgtcttcacactttttacagtgctggacatatatcgtgaagcagcacgtgatgcaagctcttgcactgatatttctggcccaggtttctgtttagcatctcgagattgctgcatgttattgtctttgaggcttacaccagatcctcctttggacacaccacctgataattctctgatcccagccgcagctctcccaggcgaatcaacttccatgaaactgtccttctggggatcacttggtgcatgagaagtg

SEQ ID NO: 60747 - protein, 82 aa, Triticum aestivum
  peptide (1)..(82): Ceres Seq. ID no. 13662647
MGERHMMIKSKRDTFAKFSKMLTANTASSRKIEAVHFTISIRKADESASLKISGSLSGRIDFNNCICWVRSSEIALQETSKS

SEQ ID NO: 60748 - protein, 77 aa, Triticum aestivum
  peptide (1)..(77): Ceres Seq. ID no. 13662648
MMIKSKRDTFAKFSKMLTANTASSRKIEAVHFTISIRKADESASLKISGSLSGRIDFNNCICWVRSSEIALQETSKS

SEQ ID NO: 60749 - protein, 76 aa, Triticum aestivum
  peptide (1)..(76): Ceres Seq. ID no. 13662649
MIKSKRDTFAKFSKMLTANTASSRKIEAVHFTISIRKADESASLKISGSLSGRIDFNNCICWVRSSEIALQETSKS

SEQ ID NO: 60750 - DNA, 1528 bp, Triticum aestivum
  misc_feature (1)..(1528): Ceres Seq. ID no. 13658028
ccgggccccccctcgaggtcgacggtatcgataagcttttttttttttttttttgaacaatcacatctttttgttcattcattatcgcactcatacgcatcaaattacattagttctagtactcacacgtgcacgtgccacgcatttggaagtctcaaatgcatacaccgatacacactggatacacagagtttggcacttaaaatatgtatacttcttttttgcgggcacttaaaatacgtatacgccaagtgcttttatcttgccatgatttattaataccaggagtatatatattactcataacgaacaacgaatgaacaaatgaaatactgtgtacactacagggttccttccagaaaaacatatatgagatcaaaagcagcagccgctatggtcgggttaatattatcaaccagctgccccgtcactgtctgaccactgggaacaggcacccgtagaccttcgacaggaaggatttcttgggcttccttcgcgggtggccccacgtgggcaccacccggtccggcgagagctgccgcttcgcgaccggcggcacgtccggcgcggcggccttggcgacctcccggtgccgcttcaccttctcgaactgcaccgtgaagccctgcgccgccgcgttcgcgttctgctcgtcccacacgccgaacttgggcacggccgacggggccttggcggcacgggcctgcggtggcacgccctggcccgggcgccgctcgttagccggcggggacgcggtgaccctcggcgctggcgccgcttgctggtggtgcctcggcaccggggcggcgtacgcgccggcgacctgctgctgctgctggggctggtggtagctgccgccgctgttgccgtagcgcggctggtacggcctgggcggcgagaacttgctggcgcggctgctgacctcggacgcggcgctgctgccattgctcccgttccgccggtggtagcccccgtggccgtgctgcgcggggtagtgctgcgccggcgaggggtgtccgtggccgtgcgagctcggcggcctcgagggcacgttaccgccgaggtggtcatagtgctgcgccggggccgcgtggccgtggccgtgcgagctgggcgggcgcgagggcacgttccggctgaggttctcgtagtactcgtaggggtcgaactcttggtcgtcgtgccccctgggcgctggcgccgccgtgcccggcacgggcgcggccttgttctcgcgcaccttctcgaagaagacggtgtagccgatgttctcggcgtcccacgacccgaacttgggaaccaccggccctttcccggccattaagaaatgatgatgacgcctggcgatgaactgatgagagggaacctcttggtcgatccttgtttctcctctccactcttctctctctctctcgctccccactcgatcacaattgacgataggaaacgaggaggagagagggtgtgggaagggaggcgatggatgtgctcgcagggcagggtggttcttatgattggagtttcagaa

SEQ ID NO: 60751 - protein, 92 aa, Triticum aestivum
  peptide (1)..(92): Ceres Seq. ID no. 13658029
PGPPSRSTVSISFFFFFFEQSHLFVHSLSHSYASNYISSSTHTCTCHAFGSLKCIHRYTLDTQSLALKICILLFCGHLKYVYAKCFYLAMIY

SEQ ID NO: 60752 - protein, 67 aa, Triticum aestivum
  peptide (1)..(67): Ceres Seq. ID no. 13658030
MMMTPGDELMRGNLLVDPCFSSPLFSLSLAPHSITIDDRKRGGERVWEGRRWMCSQGRVVLMIGVSE

SEQ ID NO: 60753 - protein, 66 aa, Triticum aestivum
  peptide (1)..(66): Ceres Seq. ID no. 13658031
MMTPGDELMRGNLLVDPCFSSPLFSLSLAPHSITIDDRKRGGERVWEGRRWMCSQGRVVLMIGVSE

SEQ ID NO: 60754 - DNA, 1763 bp, Triticum aestivum
  misc_feature (1)..(1763): Ceres Seq. ID no. 13657822
gaaggaaaaaacatacaggggcatcagcttacgacaaaatttctacatacatagtacatattttacattctgcaggctacagcacacgaatcccttgcgagaaaacaatctgctcatcatttacaatgctacagcaatgatcagtgcaggatcaggcaaagacagttcatatgctcggtgccagctgaggttcagctacctgtggcttctgggggtccaaacctgggaactgcccgatgtcatgaccttctactcggtttaggctgtcatccagaccaatcgcaaactcctcaggccgttccccaccgctcgcaaagtagtcagcgacatgatctccaagagacattccgctcaatactgctgcttctatacttgaacccgtgagccagtcaccacaaatgcctgctcgaccctggggatcaaatatgcatggtactcctggagtgttcatcggtaaagctgcaccccacaactgtactcttgtgtaaaatggtcgctgaagagatcctgtcgagagccccagagcaagttcaactcccccaagcatgtctcgtttcactttttctgcagtggcatttgggatattttcctgtggaactttgtttttctttccataagaagcagtgctgaaaaatgtccagcactcgggtctgtttgtctccaaagggaaaagcttccgagtattgttggccatccaagagagagaatcaatatctctcacaaatgctccttcaaatgtgccataagagttatcttgtgggattggaagaggatcatcaaatgccgcaagtagtgcccagacagaactcaactccagtctcttcatttgccttgtcagttggggtagacctgacgtagaaagcagacggtttgcacatttcccattgtgtgctattacaacggcatcatattgaccctggggcttctcattctcaaacaagcgccacaggccgttgaacggctcaagcttgcttatccaggaaggccttacaactttaatcaggtcattctcgggcagcattgcgtcggcaagcgggcgcattcctctcacgccgatataccttggcgtcgaggaaggtatagctgtgaaatggccacctgcctcgagctcaccgatcgagcccctccattcgcgggccaaccctttctcgacccactcatcgaccagctcctggaacctctggtcgctcgcggtgaagaactgtgccgcgtggtcgaacaccagccgccgcccgtcgtcgaccatcctggtcgccatcctgccacctaagccgtgcatacccgtgtcgaatacgacggcgcggacgccgcgggcggcgagggcggacgcgcaggcgaggccagaggctccgcctccgatgatggcgacggtggggtcggcgggcacgggggtggaggagaccacctgctcctgctggaagctcttcttgatggccgactgccgcgagaaccggggcttgccgcgcgggcgccgcgggggcgccttcggaggacgcgctcctccggcgccgctggcggcgaccaccgccccggaaaagcgggacgcggcgcgcccggcggcggggcgagcgcatggggcggggtggaagagcggcatcgcggccttgcaaggtgctcgacaaaatgcgggagcgggggaagcagaccgttatctgtttacaagtattttatctttactttggagagagagaaaactgacgttctcacggttgctccatggtattgtatttttcaaggaaattggttgttctttttcgattagg

SEQ ID NO: 60755 - protein, 135 aa, Triticum aestivum
  peptide (1)..(135): Ceres Seq. ID no. 13657823
MMATVGSAGTGVEETTCSCWKLFLMADCRENRGLPRGRRGGAFGGRAPPAPLAATTAPEKRDAARPAAGRAHGAGWKSGIAALQGARQNAGAGEADRYLFTSILSLLWRERKLTFSRLLHGIVFFKEIGCSFSIR

SEQ ID NO: 60756 - protein, 134 aa, Triticum aestivum
  peptide (1)..(134): Ceres Seq. ID no. 13657824
MATVGSAGTGVEETTCSCWKLFLMADCRENRGLPRGRRGGAFGGRAPPAPLAATTAPEKRDAARPAAGRAHGAGWKSGIAALQGARQNAGAGEADRYLFTSILSLLWRERKLTFSRLLHGIVFFKEIGCSFSIR

SEQ ID NO: 60757 - protein, 111 aa, Triticum aestivum
  peptide (1)..(111): Ceres Seq. ID no. 13657825
MADCRENRGLPRGRRGGAFGGRAPPAPLAATTAPEKRDAARPAAGRAHGAGWKSGIAALQGARQNAGAGEADRYLFTSILSLLWRERKLTFSRLLHGIVFFKEIGCSFSIR

SEQ ID NO: 60758 - DNA, 2007 bp, Triticum aestivum
  misc_feature (1)..(2007): Ceres Seq. ID no. 13663290
ctgtttttcggcagtccttgtggtaggaaagttatccattcttcgaaaactcatctactactactcaccttgtagaattttttattctgctgcatatttggttttatcataaaatgaatggattattctgaaatacagtgtaacccctcccccctctcaacgattattattttagcatttatttattattattcttttgcctcttgctattgcttgctaaaggcacatgcatacacaaatctttcctcgtgccattgtttcttctgcaagcacctagcagtgtaatttcatgaatcaaagtaagattctgctatttggcccaaagaattatctgatgataccttttcccctttccttgctatagctactggatgtttattctttttgagacaagaacacttacttttggcctacttatactatcatgtcgattcctaatttaggagtgaatatgggccgtggactgcttttcttgcgtttgcggtgtgtttgttcttaccctttccaggtagagtaacatgaaagatcaataagtcctgcttaaaagtttgatgcactgtttgagcagtgattttgttttttatggtgagagttcctcggatgttatttttcgctcaaattttgcaagaagctcaagcatttgataattattttgtctcaaaatttcagattttttggattttgttttatcatgttttttcagtgtttttcgaaattcggtgtactacactcgagagttgtcacacctttctatatatctcatggttttgtggcttatgccttggaagctttttgccaatgcacaagtgcaaagtcctttcattttcctcctgtatcctcagttgcgtactataacatttgactatgtgtcgtgttggtctcaatgggctggcacagtactacagactatggctaaaggctatgtttacaaacataaaataatgattcaaagaagaggagcagacggtgctacgatatttacctcaaggtgatgaatcaatgaaccgagggacttattattcggtgaggccagcggggtattccatttcctgcatttcctcttcagtatgctgactccaatctccagagtcctcgatgattctttcttagtccatttaaatgggtattatttttaccagttggtacacgtttttctttcaatatgcactctcacaataatttttttttctgttcttcaaattgatttgttgatggtacaagggaatcattgaaaaaatgtcttctcatcaaggattggattgtgttctcattatagaacataatttattatgtgaggcatttgccattgcaacatcttgtctaggtaggtcatgcttggcagaatcgcctcctcccggtcttcaacactcctgcaggaattgagcgccagggtggtcgggacacatagaacaccaacaagggaaaaaaatgcaccactcctaggtcatgcttggcagaatcgcctcctcccggtcttcagcactcctgcaggaattgagcaccagtgtggtcgggacacatagaacaccaacaagcgacaaaaatgcactactccgaatattgatccttttatacagaatatgcagccagagtttgggcaatgatcaaaacgtggcttggtttacatgatgttcatcctacggactggggaggcatggtttccgtcaaggagtggtggcgcagcaacacttaagggaggtcgcaatctcgaaggccgcttgtttcccttattcctatctcttgggaaatctggaatgagcgaaatgctcgggtgttccgcaacaatgcgactccggtcgttgtgcttgtgacacatcaaagcggaggcatcatcggggtgccttgccggacgaaatatttgtgtaatataatgccgcgagagtgattcttaaaatcttcgtcttattcaatgaaaatgacaagcctttggacttgtttcaatataatatggacccgaatggagtgaaatgtttaatwaaaaaaaaaaaaaaaaaaaaaaaaaaacct

SEQ ID NO: 60759 - protein, 90 aa, Triticum aestivum
  peptide (1)..(90): Ceres Seq. ID no. 15220210
MVRVPRMLFFAQILQEAQAFDNYFVSKFQIFWILFYHVFSVFFEIRCTTLESCHTFLYISWFCGLCLGSFLPMHKCKVLSFSSCILSCVL

SEQ ID NO: 60760 - protein, 84 aa, Triticum aestivum
  peptide (1)..(84): Ceres Seq. ID no. 15220211
MLFFAQILQEAQAFDNYFVSKFQIFWILFYHVFSVFFEIRCTTLESCHTFLYISWFCGLCLGSFLPMHKCKVLSFSSCILSCVL

SEQ ID NO: 60761 - protein, 76 aa, Triticum aestivum
  peptide (1)..(76): Ceres Seq. ID no. 15220212
MVLWLMPWKLFANAQVQSPFIFLLYPQLRTITFDYVSCWSQWAGTVLQTMAKGYVYKHKIMIQRRGADGATIFTSR

SEQ ID NO: 60762 - DNA, 1477 bp, Triticum aestivum
  misc_feature (1)..(1477): Ceres Seq. ID no. 13658479
agagatgctcttattcctccatttggcaggactccctggcgcgtgaggaaggaaagccgagcaacccagcggcggagccgacgcggcggttttctcttcggcggcggcgacaccgacgcggcgggcctcctctccagcggcggccctcctctcctctccggtttttggatggactgatgggatcgattcgtgatgaacaacggcaggaggggactgaggaagggaggaagcgagatgtttgagctcggggagcaaatggcgaaaactataaccgctgctctgcgagagtctaagctcatagcctcgtttttccttgctggttcgaattttttttcttcaggtgccgcttgtcttgttcctcccactgagataatttgcgttggatacaagtttggccgtgaacctttcgggccagcgtatggcattcaagttccgaaaggttctgacggtttacccgagactgttaattggcttgttgtgcctgggttgtttcacagagcaaagaccagcgccattgtggtgggtgctacattgttgctgggcttggcagcatatcttctttgaactatctgctgaacagggcaagtatttgtctttcggcccaacacatattggacgcgaatactgtgaccaatcatggttgcgaaggtggttggccagagaatgtatttgacttcatcatcagaaacggtggggtcatatctgagaatgattacccatactgtgctatcagaggtccctgcaaggctgttgaggctgcgggagttactattgctaactgggcggctgtagaaccgacggaagaagctgtgaagtatgcagttgcttaccagcccgttgtggcatcaatctacactgacagcaaatttatgacttaccaaaaggatttccttattgttcctaaaaaccatggtccagtagaccactctgttcttctaatcggatatggtaagtgcccatgacagggccaatgttggatcggtatgaattcattcgaggagccatggggcatgacatgtctccactacaacaacattttctatataccaaggaatacgtgtcatgtggggggagcctttggagtgctgtccgatgttgttcttcccctgggagcttctatggttcttaagattaaaactcgaagtgagagctgccctttgtttcaagtaggtgggcatacctgacagctgatgcttctggcggctcgtcccagttcacttttcttttggttccaaaactacttgtcccatggagtttgagttctgtttggagtcttggctctgagcacctgataaacctgtgatctgatgctgcacttataccatcgtgtcttgactcttgagtcatgtattacatccgtcccaaattacgagatttagctagatacatttgtatctacacaaatgaagacaaataatttgggacggacggagtataaacagaatgatgttgggcagcggaaatttgttttggctcc

SEQ ID NO: 60763 - protein, 123 aa, Triticum aestivum
  peptide (1)..(123): Ceres Seq. ID no. 13658480
MNNGRRGLRKGGSEMFELGEQMAKTITAALRESKLIASFFLAGSNFFSSGAACLVPPTEIICVGYKFGREPFGPAYGIQVPKGSDGLPETVNWLVVPGLFHRAKTSAIVVGATLLLGLAAYLL

SEQ ID NO: 60764 - protein, 109 aa, Triticum aestivum
  peptide (1)..(109): Ceres Seq. ID no. 13658481
MFELGEQMAKTITAALRESKLIASFFLAGSNFFSSGAACLVPPTEIICVGYKFGREPFGPAYGIQVPKGSDGLPETVNWLVVPGLFHRAKTSAIVVGATLLLGLAAYLL

SEQ ID NO: 60765 - protein, 102 aa, Triticum aestivum
  peptide (1)..(102): Ceres Seq. ID no. 13658482
MAKTITAALRESKLIASFFLAGSNFFSSGAACLVPPTEIICVGYKFGREPFGPAYGIQVPKGSDGLPETVNWLVVPGLFHRAKTSAIVVGATLLLGLAAYLL

SEQ ID NO: 60766 - DNA, 2094 bp, Triticum aestivum
  misc_feature (1)..(2094): Ceres Seq. ID no. 13663320
gagtccattccccttcttccttctccccactccccactcccactccatcttcttccgccatcttcttgccggagggcactccgtctccctctcgtgtttgtccatgaatccggttccgactacaatctgattgtgattcttagacctcacccctcctctcaataagtaccaccaccagtcctagataggagtacgcctgtgtgagatcgcacaagacccaccatgccgcacgaaggctattacgaagcctctttgcgtccgccggccttggatgatgcgccggcggcgaaggactggggggaagtcctcctcgaccgcgtcgcttacatggtcgacaagaaaaaccatacttccgtcaaccttcaattcaagagggatctggacggcaaggaggtggatctgtgggtcactctgtgcttcgcccggccgcctcgtctctcctatttctgctgccacgcctcctgccccaacgacaaagaagaagacacccgcttgttcttccgcgagcctttcgtgttcgccacggagggtaacctcgccgtcatcaccctctgccacgggcgcagccgcccctccgccttcgggtccaagaagaacaactacgaatacttggtgtaccaggcaccatcctcaccggcggggaagccggagctcatctgggtcccgcacatccccgccagcatgttgccaagcacgggagtcgactgcatcccttccagctcgattggtgtcgtgcgttacaacagcaacattttcacccatgctcacccccacaaaatccccctcgcgccccctgcccccatcctcagccctgccgttgcacttgcccgccccaaaagtttcccttccacgcccccaacctccgtcctcagcccctccgtcgccgccctccccaaggaggatgaggacttcgatgcccacagaatcgtagcgcttgcctacgactatttccacgactctggcaatagcccacatggcccatactacctgtgcatctacgactccaaaacccaggtttggacccgcaagccagctgctattccacagccgctgctgccattcgactatatctgcgacatcgacatggtcatcaccatcggtggctccagccgtggcatcatgggctgggtcgacctctggaatggcatactattctctgacgtgcttgcagaccacacaccctacagcccgcttcgctatgtctcccttccgaagccaaggcagccgcaaaattgcctccctattcccctggacattggatgccgctttcgggacattgtctttgtcaaagactctggcatcatcaggttcgttgacctgcagatccacaccgaccccaacatcccttactcagaaacccctagtggctggacggtggtcacatggatcctggaggggctcaatgagggtttggaaacccggggtggtttgagcttccggcaggagcacgaactccgttctagtgatatctccaactacaacttgccccagtctctatttgttaccaaccccattctcagcgcccatgaagatggcttcttgtacctcaggaccaatgtcagtagcagaaccagcagcaactcgagagtgatcactgttgacatcaagcatgggaagctgctggatgtgcaggacttcgatatgcagagacccaacacctacatgcgcaccgccatctccagccatctcatgcccccagtttcaaaggagaatttgaaacgacgagcgacagtgcctcagtgatcctctcgcaagaagccacagcatcagcttgccatcactactaacccagcggaagaaggagaggatgatgaggggaatgcgatggacacacagtaggtggtttgttgaggtatgagtgtgcccaccagcgttatggtttcttggctgtcaacatgtatatgcgcgcctgttttcttgcttggttaactagtcaggatcagaattttatttattatttaggttatataagacttggtaagcctgtatgatgggaggttgaggctaggagacgattattaatatttagagcttcctctattttgctagtatcatgttctggtgcaacctgatgtccatggtttgtaatccccg

SEQ ID NO: 60767 - protein, 506 aa, Triticum aestivum
  peptide (1)..(506): Ceres Seq. ID no. 15220216
MPHEGYYEASLRPPALDDAPAAKDWGEVLLDRVAYMVDKKNHTSVNLQFKRDLDGKEVDLWVTLCFARPPRLSYFCCHASCPNDKEEDTRLFFREPFVFATEGNLAVITLCHGRSRPSAFGSKKNNYEYLVYQAPSSPAGKPELIWVPHIPASMLPSTGVDCIPSSSIGVVRYNSNIFTHAHPHKIPLAPPAPILSPAVALARPKSFPSTPPTSVLSPSVAALPKEDEDFDAHRIVALAYDYFHDSGNSPHGPYYLCIYDSKTQVWTRKPAAIPQPLLPFDYICDIDMVITIGGSSRGIMGWVDLWNGILFSDVLADHTPYSPLRYVSLPKPRQPQNCLPIPLDIGCRFRDIVFVKDSGIIRFVDLQIHTDPNIPYSETPSGWTVVTWILEGLNEGLETRGGLSFRQEHELRSSDISNYNLPQSLFVTNPILSAHEDGFLYLRTNVSSRTSSNSRVITVDIKHGKLLDVQDFDMQRPNTYMRTAISSHLMPPVSKENLKRRATVPQ

SEQ ID NO: 60768 - protein, 471 aa, Triticum aestivum
  peptide (1)..(471): Ceres Seq. ID no. 15220217
MVDKKNHTSVNLQFKRDLDGKEVDLWVTLCFARPPRLSYFCCHASCPNDKEEDTRLFFREPFVFATEGNLAVITLCHGRSRPSAFGSKKNNYEYLVYQAPSSPAGKPELIWVPHIPASMLPSTGVDCIPSSSIGVVRYNSNIFTHAHPHKIPLAPPAPILSPAVALARPKSFPSTPPTSVLSPSVAALPKEDEDFDAHRIVALAYDYFHDSGNSPHGPYYLCIYDSKTQVWTRKPAAIPQPLLPFDYICDIDMVITIGGSSRGIMGWVDLWNGILFSDVLADHTPYSPLRYVSLPKPRQPQNCLPIPLDIGCRFRDIVFVKDSGIIRFVDLQIHTDPNIPYSETPSGWTVVTWILEGLNEGLETRGGLSFRQEHELRSSDISNYNLPQSLFVTNPILSAHEDGFLYLRTNVSSRTSSNSRVITVDIKHGKLLDVQDFDMQRPNTYMRTAISSHLMPPVSKENLKRRATVPQ

SEQ ID NO: 60769 - protein, 353 aa, Triticum aestivum
  peptide (1)..(353): Ceres Seq. ID no. 15220218
MLPSTGVDCIPSSSIGVVRYNSNIFTHAHPHKIPLAPPAPILSPAVALARPKSFPSTPPTSVLSPSVAALPKEDEDFDAHRIVALAYDYFHDSGNSPHGPYYLCIYDSKTQVWTRKPAAIPQPLLPFDYICDIDMVITIGGSSRGIMGWVDLWNGILFSDVLADHTPYSPLRYVSLPKPRQPQNCLPIPLDIGCRFRDIVFVKDSGIIRFVDLQIHTDPNIPYSETPSGWTVVTWILEGLNEGLETRGGLSFRQEHELRSSDISNYNLPQSLFVTNPILSAHEDGFLYLRTNVSSRTSSNSRVITVDIKHGKLLDVQDFDMQRPNTYMRTAISSHLMPPVSKENLKRRATVPQ

SEQ ID NO: 60770 - DNA, 652 bp, Triticum aestivum
  misc_feature (1)..(652): Ceres Seq. ID no. 12626516
atattacatattaatactaggttttagtaattgattactgcaagttgtgaactacagtaccatgtcgactagtccagcagtagtctagactagtcacgattagtctatgagtctcaaccttcgaacgactcgtcgactcgtaaacgttgtgtccagcataattgtgtttggcacccagtggctcatgtttatgcctgttttagttgtatttagtgcagaaatgaactatggccaattggccgtagtatttccagtctttttctaattcttctggtttggttttgacttttgaatcaggtatatcacttgatcaacccattgtgacctcttgcggcactggtgtgacagcatgtgttctagctttgggtcttcatcgcctcggcaaaactgatgttgctgtatatgatggatcatggactgaatggggtgctcaccctgacactccagttgctaccgctgtttagtctcccgtgcagtttatggagcgccatcttttgtactcccacctctcagtgtattaaggtcagaaggcaaaggagactgaagagtttgggtgggtgtaaggttgtggaagcgacgctgttcggcgttttcattgtaaattatcgaaacagagaaaattggaatatatacactatgtgaatcaatggtt

SEQ ID NO: 60771 - protein, 83 aa, Triticum aestivum
  peptide (1)..(83): Ceres Seq. ID no. 12626517
MLLYMMDHGLNGVLTLTLQLLPLFSLPCSLWSAIFCTPTSQCIKVRRQRRLKSLGGCKVVEATLFGVFIVNYRNRENWNIYTM

SEQ ID NO: 60772 - protein, 79 aa, Triticum aestivum
  peptide (1)..(79): Ceres Seq. ID no. 12626518
MMDHGLNGVLTLTLQLLPLFSLPCSLWSAIFCTPTSQCIKVRRQRRLKSLGGCKVVEATLFGVFIVNYRNRENWNIYTM

SEQ ID NO: 60773 - protein, 78 aa, Triticum aestivum
  peptide (1)..(78): Ceres Seq. ID no. 12626519
MDHGLNGVLTLTLQLLPLFSLPCSLWSAIFCTPTSQCIKVRRQRRLKSLGGCKVVEATLFGVFIVNYRNRENWNIYTM

SEQ ID NO: 60774 - DNA, 792 bp, Triticum aestivum
  misc_feature (1)..(792): Ceres Seq. ID no. 13658372
aaaccatgtaaaacaagcctatagctctagcattactcgtaccctgctcataaaattttgggccttgccttacatgtttagagggtgggaggagataatatattttttttgagaaaaaaaaaacacaatacaaattgggacacaaaaactagaacacatgtgtgcagagcaaaacggaacaacacatgtttcaccgtagaatcttaaactgaatcggcagcccaaatttccatcagccaaaccataggctacacaaacctaggcggacgtaccaacacaggacgccggccggccggccggccgggcggtagctaagccacgaaggcgtactgctcgtaccgcacgctgcagtccacgagcacggccctcgcgccgacggcgtggctgcaggtggcgttcatctggctgacggcggagccgaggcagctcgcgcagtccgcgcccgacagaccggcgcggcacacggcgtggccgtaggcgaacgcgttcgggtacggggagatgctgtaggcgtcgcgggagcgggactgcggcgtggcggccagcaggacggccagcacgtaggcgaggctctccgcgaaggggtccccggcgccgtacaccgcgccgttgcagatcacggagagcggtgccgtgttgggcgcgccgctggcggtgtgcgggcaggaggagaggaggtgcagcagcgcgagggggaggaagaggagccggtccgctctgcgtgagggcgccatggcgcctccgatcttgggctacgggtgtagtagggtggtgtgtggttgttggtggcgc

SEQ ID NO: 60775 - protein, 36 aa, Triticum aestivum
  peptide (1)..(36): Ceres Seq. ID no. 13658373
NHVKQAYSSSITRTLLIKFWALPYMFRGWEEIIYFF

SEQ ID NO: 60776 - DNA, 1412 bp, Triticum aestivum
  misc_feature (1)..(1412): Ceres Seq. ID no. 13659097
ctgagaatcaaaattaggtttgttcagattgtttctatttgtacttcctccgttcctaaatataagtctttttagagattctaatgcggtctacatatggagcaaaatgagtgaatctacactctacaatatgtctatatacatccgtatgcagtccttattgaaatctctaaaaagactgtttaagaacagagggagtattttggagtagggaagaaggttctgactagctaggacccataaccaagttccaaacagaccaatcttgttaggaggtactgcccaaggaaaagaaaatgtgacttctggatcaggaataataaaaaataagaacctgataaaattgtataccgaaatgacttctggcattaccagtgggatccaaaccacattttcgttggctgacttagttttccttgtcactctatgaacaaccgcacactatgacaaacaaataatcaagaacaaacttcatcatttggataacaaatttacagcaattctgttataaatggatgaaaattgtcacaaatggatcaaaaaccagagttgatacatgtcagcgaggttgtggcgacgtggcagccacgacaccaaataccatttgcaaaaccaccagagggcagagaaaagtggactgtttcattagtttgaggttgtattccaatgattttagagttcaagactgaaaataagccttttccagagtcccaaggtcaaaaaacggaaactggaccttttttatgtttcattataatgcttagatcttttgttttttcctatcacttctgatggcttgtttaccttcaattcttcaaatcaagtgaactaatagttgctgcaggactaattctgaattgattcatgttcattaggcactcaaccctgttagaaagtatgaaggggttcttcatgcccttacgcacatttttgagcaagaagggttgcgaggtctttacaggggtttaagtccaaggctgctcatgtatgtatcccaaggggcgctgttttttacatcctatgagtttctcaaaacaattatgtttcctgaacaagagcttcaggcaaacaacgtttgatcgtagaagcttagaagggaagggctcgttgcagccccggtggaatttctagatcgataccatgagctaagtaatgagttgttgtattgtggttacaaaccatccttcagaggtcttgtaacaaaccagtgtacatcatttttggatgcataggcattagacaaccacacctggtattaacctttttctggtagatatagaaacacaacatgtaggcaagaggaattttgtatcatgagcaaacttgagatgtggatttccttgcgggaggacatgtgaatatgagtgtatcctggtttawmctggtacaataaagttggaacgggagggggg

SEQ ID NO: 60777 - protein, 57 aa, Triticum aestivum
  peptide (1)..(57): Ceres Seq. ID no. 15220667
MKIVTNGSKTRVDTCQRGCGDVAATTPNTICKTTRGQRKVDCFISLRLYSNDFRVQD

SEQ ID NO: 60778 - protein, 47 aa, Triticum aestivum
  peptide (1)..(47): Ceres Seq. ID no. 15220668
MYPKGRCFLHPMSFSKQLCFLNKSFRQTTFDRRSLEGKGSLQPRWNF

SEQ ID NO: 60779 - protein, 41 aa, Triticum aestivum
  peptide (1)..(41): Ceres Seq. ID no. 15220669
MILEFKTENKPFPESQGQKTETGPFLCFIIMLRSFVFSYHF

SEQ ID NO: 60780 - DNA, 611 bp, Triticum aestivum
  misc_feature (1)..(611): Ceres Seq. ID no. 13658622
cttatctctttgcttcacattcctttctttgctcacaatattgaacccacattgaggcttgattttgaatttgttcttgcattatcaataataaagcctcagctttaatattgaagcatgatgtgggtgacttgttaatattgtgattgatcacttctgagccttgtcattgcatcttctgttccacaggctagaatcttagcccttaatgcatcatacttcttgaagaatggcggccactttgtcatttcgatcaaggccaactgtatcgactcgacccaggctgccgaggcggtgtttgcgagcgaagtggagaagctgaaggccgaccagttcaagccctcggagcaggtgaccctggagccctttgagcgcgaccacgcctgcgttgtcggtggttacaggatgcccaagaagcaaaagtgaagttgagaggaagcaaaagaagtggatgtgttgtttctgccatctgcttgctcggatgtactagtagcagtagtagtaatgtgtgacccaagtgtaaggggttttgtgagacaattcctgctgttttacagcaattatgtacttgatttgagcagaaaatgtcactccatctgaaatgagtgaac

SEQ ID NO: 60781 - protein, 35 aa, Triticum aestivum
  peptide (1)..(35): Ceres Seq. ID no. 13658623
LISLLHIPFFAHNIEPTLRLDFEFVLALSIIKPQL

SEQ ID NO: 60782 - protein, 31 aa, Triticum aestivum
  peptide (1)..(31): Ceres Seq. ID no. 13658624
MCDPSVRGFVRQFLLFYSNYVLDLSRKCHSI

SEQ ID NO: 60783 - protein, 30 aa, Triticum aestivum
  peptide (1)..(30): Ceres Seq. ID no. 13658625
MAATLSFRSRPTVSTRPRLPRRCLRAKWRS

SEQ ID NO: 60784 - DNA, 495 bp, Triticum aestivum
  misc_feature (1)..(495): Ceres Seq. ID no. 13598668
tacctagaacatcctaatcgaaaacccatttttggtaagcagaactggcgatgcgggatgaaccggaagccgggttacggtgcccaactgcgcgctaacctagaacccacaaagggtgttggtcgattaagacagcaggacggtggtcatggaagtcgaaatccgctaaggagtgtgtaacaactcacctgccgaatcaactagccccgaaaatggatggcgctgaagcgcgcgacccacacccggccatctgggcgagcgccatgccccgatgagtaggagggcgcggcggccgctgcaaaacccggggcgcgagcccgggcggagcggccgtcggtgcagatcttggtggtagttgcaagccggcgtattttgctagtattgttgtagttggaaggtccttttgtggatggtaccattgtagccttgtagtgtactttgttgatctatatgtatggaactaatgatgatatatgaagtctgatgttgtcattt

SEQ ID NO: 60785 - protein, 59 aa, Triticum aestivum
  peptide (1)..(59): Ceres Seq. ID no. 13598669
YLEHPNRKPIFGKQNWRCGMNRKPGYGAQLRANLEPTKGVGRLRQQDGGHGSRNPLRSV

SEQ ID NO: 60786 - protein, 40 aa, Triticum aestivum
  peptide (1)..(40): Ceres Seq. ID no. 13598670
MNRKPGYGAQLRANLEPTKGVGRLRQQDGGHGSRNPLRSV

SEQ ID NO: 60787 - DNA, 667 bp, Triticum aestivum
  misc_feature (1)..(667): Ceres Seq. ID no. 13663520
cttttttttttttttttttttttccttctcgagtcgtctacaattttaatatcacaggtcacatacatgttcgacacacaacaacaacaacaaaataaatcatgtgtatgcataggcctggctagcaacccaaacaactgacattgaaggcaggcattggtgtctcctgaagttcagtctagccagaaaggttctggcatccgacatcttcctgacgaacttcgtaaaccggttccagttgtgtgactcgaacaggctcttgttcatcctgacatagttgaaggagaaagacgcgcccgaggtgccgcccgagtagcgcctcgagcttctgacgacctggctcagcgacgcatcgtccagcctcgccgcggagttctcgccgttgagaggtaggttccataccttagcggcagccatcagttgccggagagtgccttcggggctgctctgaggaccgcttctctcctcgtccctcaggtcgaaacagccacagcacagggcagctctgtgtcgagagaacatttgggcgatggggagatagccgtctcttagcaatgtgttgtagtagccggctgtcagctcggatgggtgtgaacatgtgtagtagtgccagtgtatgccggaaaccttccccgagatggtcacgccggtgccagaattttcgatt

SEQ ID NO: 60788 - protein, 46 aa, Triticum aestivum
  peptide (1)..(46): Ceres Seq. ID no. 13663521
LFFFFFFFLLESSTILISQVTYMFDTQQQQQNKSCVCIGLASNPNN

SEQ ID NO: 60789 - protein, 37 aa, Triticum aestivum
  peptide (1)..(37): Ceres Seq. ID no. 13663522
MCCSSRLSARMGVNMCSSASVCRKPSPRWSRRCQNFR

SEQ ID NO: 60790 - protein, 31 aa, Triticum aestivum
  peptide (1)..(31): Ceres Seq. ID no. 13663523
FFFFFFFPSRVVYNFNITGHIHVRHTTTTTK

SEQ ID NO: 60791 - DNA, 753 bp, Triticum aestivum
  misc_feature (1)..(753): Ceres Seq. ID no. 13659835
gggatgcgcaaggaagctgacgagcgggaggccctcacgggccgcaccgctggccgaccctgatcttctgtgaagggttcgagttggagcacgcctgtcgggacccgaaagatggtgaactatgcctgagcggggcgaagccagaggaaactctggtggaggctcgaagcgatactgacgtgcaaatcgttcgtctgacttgggtataggggcgaaagactaatcgaaccatctagtagctggttccctccgaagtttccctcaggatagctggagcccattacgagttctatcaggtaaagccaatgattagaggcattggggacgcaacgtcctcgacctattctcaaactttaaataggtaggatggcgcggctgcttcggtgagccgtgccatggaatcgggtgctccaagtgggccatttttggtaagcagaactggcgatgcgggatgaaccggaagccgggttacggtgcccaactgcgcgctaacctagaacccacaaagggtgttggtcgattaagacagcaggacggtggtcatggaagtcgaaatccgctaaggagtgtgtaacaactcacctgccgaatcaactagccccgaaaatggatggcgctgaagcgcgcgacccacacccggccatctgggcgagcgccatgccccgatgagtaggagggcgcggcggccgctgcaaaacccggggcgcgagcccgggcggagcggccgtcggtgcagatcttggtggtagtagc

SEQ ID NO: 60792 - protein, 40 aa, Triticum aestivum; identical to SEQ ID NO: 60786
  peptide (1)..(40): Ceres Seq. ID no. 13659836

SEQ ID NO: 60793 - DNA, 734 bp, Triticum aestivum
  misc_feature (1)..(734): Ceres Seq. ID no. 13663769
gcgactaatgttcagcgccaaaagaaaatttccggtttttgatccaggcatgatgatagctttgctgctatgctccggtgtctcatggcatgacaccggatgaacctagtaagaggctaaaatgttttttttcctgttctattatgataaaacgagatcattgtcgccaagatgcgggggcctcatgcaaacctggacttcatgctcctccggcccgacccggtgctttggtaccatgatctccagtccagtaccggtctcgtcataatacgcttcgatcttggcgttctctgggatccttgtggccagaggtatctccctcacgaactcgcctggagggcagtgctcaggggaagggtcggtcagcttgaaggtcctgtcgtgcctcttaatgaagggcatccgggcggtgctcacacatgttatcttcacgacgccatgcgtcagcgtgttcctccaggtgaccttcacgctgtgtggatcggataagagcatgctcaccattatcaggtagccttcatcatcctcgtatatagtcttggcagcagtaacaggcccacttgcgtgctttgccacaccagtgaagtcatgcatccatgacggctcaccagtgtggacttctacctcttgctctctctcagaacaggaattattggattcggcggcgctccgaggccgaggtgttgctgttcttggttggtggagagagcgagaggggagaaagattccggaat

SEQ ID NO: 60794 - protein, 105 aa, Triticum aestivum
  peptide (1)..(105): Ceres Seq. ID no. 13663770
MRGPHANLDFMLLRPDPVLWYHDLQSSTGLVIIRFDLGVLWDPCGQRYLPHELAWRAVLRGRVGQLEGPVVPLNEGHPGGAHTCYLHDAMRQRVPPGDLHAVWIG

SEQ ID NO: 60795 - protein, 95 aa, Triticum aestivum
  peptide (1)..(95): Ceres Seq. ID no. 13663771
MLLRPDPVLWYHDLQSSTGLVIIRFDLGVLWDPCGQRYLPHELAWRAVLRGRVGQLEGPVVPLNEGHPGGAHTCYLHDAMRQRVPPGDLHAVWIG

SEQ ID NO: 60796 - DNA, 1223 bp, Triticum aestivum
  misc_feature (1)..(1223): Ceres Seq. ID no. 14313624
ttccgatgatgccattgtgtctatgttcaggaatgccttatcagcacaccgaaaccgcccttccgttgaacattggtccggtaaacgtgaggaggtagttcgagtttgactgccgcctcccagcctagtggcatccttgtcctttttaccatttctttaggctcagagctcaatcagagtggatgtcgaagctgagtggtaaagtgccaacaatgcagaagagcctttgctgctaagaaggaagctgcacttgaggctgcagagaagagagcagcagaggcaaaagaaggttgaagctgcatagaaggaagcaggacaagatgaggcatagaaggtagcagctgaagggaagaaatgttagtagattgtacagagtcaaacttttcgtggaactggcatgagtcttcctgaagatatgttatgcggcaacctgatatatgattagtctgcatcagtttgcttctctagctttcctgaagatatgttcagagtcgacagttgtccacttgcacaagcacacccaccaacctccaaaggctgttactgagctcaattttcattgccaatttgccatgatgatttgaagccgcaagatgttggcatagaccccagcatgccgtgcttcaggcagagcgagtcgagagggcctcctgcggtgatgtatctgcatttttagactgctccaagttttcgtttggtatcttctgtttgccaaagtcggttgtcattccacttgttgcttcatttgctgatctgattcttgtcccaaccgcttcaggggctcgtttggcaaaagtaaagacagatgcttcagccgagaccatagatctgtaccctgaaaactgaggcaacctgcactgttccacggcgctgaccgcttgtgtcgtgctcgacgtgatggcacacccatagaaccgcgccgacggaacggactgcacgtactacagcgagtccccattctcaaatgcgaacgctgccgatgactgttttcgtcaatctgctctcagtttgtaagcgtgattttttcgataaaggacgcttttattatctcaaaatgtagcatcaagcgatacaaagcatttagagtatcgtttgtaagcgtgatggatggcaataaacgaaatgccgagaggtatttttctgacaagatgtaaacccgaaacccaatataacatcaacctgagactaaagaacagcacgtagatgcttacttgcgcttgatg

SEQ ID NO: 60797 - protein, 48 aa, Triticum aestivum
  peptide (1)..(48): Ceres Seq. ID no. 14313625
MISLHQFASLAFLKICSESTVVHLHKHTHQPPKAVTELNFHCQFAMMI

SEQ ID NO: 60798 - protein, 35 aa, Triticum aestivum
  peptide (1)..(35): Ceres Seq. ID no. 14313626
SDDAIVSMFRNALSAHRNRPSVEHWSGKREEVVRV

SEQ ID NO: 60799 - protein, 31 aa, Triticum aestivum
  peptide (1)..(31): Ceres Seq. ID no. 14313627
PMMPLCLCSGMPYQHTETALPLNIGPVNVRR

SEQ ID NO: 60800 - DNA, 1161 bp, Triticum aestivum
  misc_feature (1)..(1161): Ceres Seq. ID no. 13503485
aaaatttgagcccatagcccacccgcagcagggaattcttcccgtccatggccatgagggtcgactcggcaatcctcgccgtcgtcgtcgccttcctcctccccctccgcctgctctccctcttcgcccgcctgaaatcctccggtagcgcaggcgatctccgccgatcctgcaccgccctcgccatcgcggccgcgctccttgccaccttcttcgccctaccccgctacgacggcggtcgcacggggcagtgcaccgcccccgttggtttcgcttgggaggagggtaccggccgagaggttcggttggaaatcgagcagctgaagctgcagctcaaccgattggaatcattatgggaaaacaattcaaaagcaccagatgacaaaggtgatgcttcagaggaagatgccgagtttgtgaaagcgatgggactggacattcaggctctgatcaaggaacaagaaaacatcaaggaatcattatggagttctggcggtactatcaaatcagtcgaaaatgaggtacgaattctggcggcagaatccagaaagatgaactctgatatttacaatgtgtggtcattggccaacgatacagagaaaacggttgaagctctacattcagatgtccaaaaggctcaaattataatggatgaatcaaggaagatgaactctaatgctcaccagatatggtcattggcaaaggatacagcaaaaaaggtcgaatctctgtatacagatgttgcaaaggttcaaagtgtaattgatatatcaaaaaagatggaatctaatatacacaaagcgtggtcttatgcaaagcagacagagaagagggttgaagatatattcagatgtcaaaaagggcttcaagaagaaggcctggatgagctgattgcgccgtcgacttgatgggctagcattggcctgggcatggagtaatggagtagagaagccacccggccttgcgtctgcgaacctgtaatgctccttgatattgtatgacacgtttacggttgtgtcgtgcgtgttgtggacatgatcttgctgtgtttctgatctgactcgcttcctgtttctgtgtcgtcatggtaatgtatatattgatgatgtacggcgttaatgcaataacatgcgactttcaggactccgtgattgtagtgtt

SEQ ID NO: 60801 - protein, 286 aa, Triticum aestivum
  peptide (1)..(286): Ceres Seq. ID no. 15223230
MAMRVDSAILAVVVAFLLPLRLLSLFARLKSSGSAGDLRRSCTALAIAAALLATFFALPRYDGGRTGQCTAPVGFAWEEGTGREVRLEIEQLKLQLNRLESLWENNSKAPDDKGDASEEDAEFVKAMGLDIQALIKEQENIKESLWSSGGTIKSVENEVRILAAESRKMNSDIYNVWSLANDTEKTVEALHSDVQKAQIIMDESRKMNSNAHQIWSLAKDTAKKVESLYTDVAKVQSVIDISKKMESNIHKAWSYAKQTEKRVEDIFRCQKGLQEEGLDELIAPST

SEQ ID NO: 60802 - protein, 284 aa, Triticum aestivum
  peptide (1)..(284): Ceres Seq. ID no. 15223231
MRVDSAILAVVVAFLLPLRLLSLFARLKSSGSAGDLRRSCTALAIAAALLATFFALPRYDGGRTGQCTAPVGFAWEEGTGREVRLEIEQLKLQLNRLESLWENNSKAPDDKGDASEEDAEFVKAMGLDIQALIKEQENIKESLWSSGGTIKSVENEVRILAAESRKMNSDIYNVWSLANDTEKTVEALHSDVQKAQIIMDESRKMNSNAHQIWSLAKDTAKKVESLYTDVAKVQSVIDISKKMESNIHKAWSYAKQTEKRVEDIFRCQKGLQEEGLDELIAPST

SEQ ID NO: 60803 - protein, 160 aa, Triticum aestivum
  peptide (1)..(160): Ceres Seq. ID no. 15223232
MGLDIQALIKEQENIKESLWSSGGTIKSVENEVRILAAESRKMNSDIYNVWSLANDTEKTVEALHSDVQKAQIIMDESRKMNSNAHQIWSLAKDTAKKVESLYTDVAKVQSVIDISKKMESNIHKAWSYAKQTEKRVEDIFRCQKGLQEEGLDELIAPST

SEQ ID NO: 60804 - DNA, 656 bp, Triticum aestivum
  misc_feature (1)..(656): Ceres Seq. ID no. 13663928
ttgggtaccgggccccccctcgaggtcgacggtatcgataagcttttttttttttttttttgctgataagaacttttaggacttcatgttctctttataaatgatttggattttagggtagaaggtagtccttgaagagggtcaccatacgatataacataaattaacagttcagaaaatttaagagcaagctatccttgccttcgttacaggaagtaatgcagctgcatgaagataagaaacgtctgtgagtgctgccggcagtggatttgatgctacatcagccacaaatgttctcctatggacttccctcaaggcatatacagagagttgccacaaaagctcaacaaatctcggcccgcagcaggtggcgagagatgaaaccctggagttgctccgtggcagcgctccctgctgctccagctcgctgatgatacattgtacgatcttgcggaactccctggactgcgcggaatcaaagatcggccatactttgtcgaagtccttggcggactgcgcggggccgcggagtgaggataggaggaagtagaggagctgttcgccgaggcgagggttggagtgccggaagaggccgacgcgaggagaggccgcgccggcgggggagccgaggacgactggatcgaggccgaggagga

SEQ ID NO: 60805 - protein, 52 aa, Triticum aestivum
  peptide (1)..(52): Ceres Seq. ID no. 13663929
MLHQPQMFSYGLPSRHIQRVATKAQQISARSRWREMKPWSCSVAALPAAPAR

SEQ ID NO: 60806 - protein, 46 aa, Triticum aestivum
  peptide (1)..(46): Ceres Seq. ID no. 13663930
MFSYGLPSRHIQRVATKAQQISARSRWREMKPWSCSVAALPAAPAR

SEQ ID NO: 60807 - protein, 39 aa, Triticum aestivum
  peptide (1)..(39): Ceres Seq. ID no. 13663931
MIHCTILRNSLDCAESKIGHTLSKSLADCAGPRSEDRRK

SEQ ID NO: 60808 - DNA, 879 bp, Triticum aestivum
  misc_feature (1)..(879): Ceres Seq. ID no. 13659710
ccattcatctttctttctcacaaattggcaccgtacatacatataaatcggtaccgtgtataataatgtttctgcagtctgcacagttcatgttgaactggaaataatacatcaatcgcaactagtactaaataatcgtagcgttcaccgaagcgggtatcgtggctgctaggccggcagcaccgatggagcaaccctgcaggtgttgtaggactggcaatggcaacactttctctgtcccgtcatgcccggatacacccgggtcgtgtcccagcagtggttgcacacgatccatcccttttccatgtgtaagaacttcgcctcaatctcggcatctaaggccctcaggaatttctccatgtcaaagatggacacggagcacatggggcaagtgaacttgtcgtgcttgagcatctcgtggaagcactgcaagtgcatggtgtggccgcatcgcagcaccgacgcctccctcagggagtcgaacaggtactcgtagcagatcgggcagttgttcttcatcgagtcctcgatgcagacatgcttatcccggagggtcaccgagtagcacgatccgcacttgtggcagtgaaagaagttgtccttgcctccaactctgcagatgccgcagtctttgcagtggtattgctccttgtcgacatcgtcgtcgaagaatttgcacgcccggcagaagtactcccccatgcacacgccgcagttgctgcacacctgcgcgaccggctgctcggtgtcacagacgagacatataaccgattcaactgcgtggcggtcgagctcgtgcccgtctttctaagcccgatccaagaagaacaagcgtggagtcgttgtggcaatggcggcagtggaagacgtcgttgcagc

SEQ ID NO: 60809 - protein, 114 aa, Triticum aestivum
  peptide (1)..(114): Ceres Seq. ID no. 13659711
MLIPEGHRVARSALVAVKEVVLASNSADAAVFAVVLLLVDIVVEEFARPAEVLPHAHAAVAAHLRDRLLGVTDETYNRFNCVAVELVPVFLSPIQEEQAWSRCGNGGSGRRRCS

SEQ ID NO: 60810 - protein, 83 aa, Triticum aestivum
  peptide (1)..(83): Ceres Seq. ID no. 13659712
MPGYTRVVSQQWLHTIHPFSMCKNFASISASKALRNFSMSKMDTEHMGQVNLSCLSISWKHCKCMVWPHRSTDASLRESNRYS

SEQ ID NO: 60811 - protein, 69 aa, Triticum aestivum
  peptide (1)..(69): Ceres Seq. ID no. 13659713
MEQPCRCCRTGNGNTFSVPSCPDTPGSCPSSGCTRSIPFPCVRTSPQSRHLRPSGISPCQRWTRSTWGK

SEQ ID NO: 60812 - DNA, 1384 bp, Triticum aestivum
  misc_feature (1)..(1384): Ceres Seq. ID no. 13663740
gaactatgctagcatacatagatactgttattagaattaagccaacacatcaccgatgaaaatctaactttatccatacaggcagcaacaagaaatacatactttgtttagtatggcacaagatagcacttaaaatgcgacagctgttgcttaaaggagatgggctctagtagcaataacctggccaggtaagttacagctgataagagaaaagggaccagttcacagtaacttccattctgcaagagccaattttaagctcagtactggagcttgtacccgatctcctgggttcaaacactacttcatgactcttaacatcttctctgcgatgactctccacaacctgatccccattaatacagtgtgccatgacagaaatcctcagcaatccctcaagtccaacagaaacgaccttgcatctaagcttgatgttgccatcagcatcaagaggcaatctatcatctccacattccagcaacttgactttcaagccagctatgtcatcgatgctcgcacaaaatacaccacgaaaaccatctggccatgatccaccaacgacttttacactgattgtggcctccacagatcggatgatctctttgaatgccatctccagagtgctaagctcactagtgaaacttctatccacaaaacctgtcctgtatgtcataactaggcggcttaaatatttatcctcagattcagcagtgcccttcactttcagctcaatctcaaagtacgaaggatctgatgacaccacaacagcacgggttggacctgtcagcgttagatatggatcctcttggctgatggtctggcagttatccctgtcgcaggagaagatcatgttgcgtttgtgatccaccacatcacgtacggaaaagaacccatacacatccagcggccactgtagactctggtcaatttctgcaactttgactgaaaagaactgcagcgtgttcttggttgagccatcgccggagaaggtgaaacgcatgggggggatactagtctcatcctcaaatttaccaaaatagccgccttcgccccaaacactcgtccagaatccacgaaactgatcccagggatcctgtggttccccccttttctttaagatcttcctccccgtcgcttcaacaaattccttcgcggcctttatcatcgccgatttctttgccttctccgcctcctcctcctcctccttctttgccatccgctcctccatcaccgcctcacgtttctccctctcctccatccgcttgtcacgcatcgccttatccatcgcctccatctcgccacccgacgaatgcatcgccctcttcgtagcccagatggcaggcgccttcgcctacgccgccgccgccgtcaccgctctctttct

SEQ ID NO: 60813 - protein, 163 aa, Triticum aestivum
  peptide (1)..(163): Ceres Seq. ID no. 13663741
MTEILSNPSSPTETTLHLSLMLPSASRGNLSSPHSSNLTFKPAMSSMLAQNTPRKPSGHDPPTTFTLIVASTDRMISLNAISRVLSSLVKLLSTKPVLYVITRRLKYLSSDSAVPFTFSSISKYEGSDDTTTARVGPVSVRYGSSWLMVWQLSLSQEKIMLRL

SEQ ID NO: 60814 - protein, 143 aa, Triticum aestivum
  peptide (1)..(143): Ceres Seq. ID no. 13663742
MLPSASRGNLSSPHSSNLTFKPAMSSMLAQNTPRKPSGHDPPTTFTLIVASTDRMISLNAISRVLSSLVKLLSTKPVLYVITRRLKYLSSDSAVPFTFSSISKYEGSDDTTTARVGPVSVRYGSSWLMVWQLSLSQEKIMLRL

SEQ ID NO: 60815 - protein, 120 aa, Triticum aestivum
  peptide (1)..(120): Ceres Seq. ID no. 13663743
MSSMLAQNTPRKPSGHDPPTTFTLIVASTDRMISLNAISRVLSSLVKLLSTKPVLYVITRRLKYLSSDSAVPFTFSSISKYEGSDDTTTARVGPVSVRYGSSWLMVWQLSLSQEKIMLRL

SEQ ID NO: 60816 - DNA, 1686 bp, Triticum aestivum
  misc_feature (1)..(1686): Ceres Seq. ID no. 14313248
agtaatcaaataatttggtattcagtgtttacttgaatattttatatcgatttctagcaatgttcagtaacagagcaatggagtgagagacattctcagtgtattgtagtttccatgttgtgttatctcgagggagacccggcgtccaattagtcacggacaatatgtcgagtgtggtaccatccaggtacaagagtcggccgcccaggacggcaatgtcggcaagatactccacgtaattctgacctccccatcctcttgtttgatccttcttgttgtgcttttttagctgctgatggttggcgtaccatgttgtgcgtagaggacagaggacaaggggaaagagtacgacaatattgtgagatcaagagttatgatttgtgagggaacaaataattttcttgatctttgtgttgacgagatggtggctttcctagggtagcattgtgtccgatgggggcagggttgcaccatggggaactgtgaatgccatttgggtaggacgaatacaatcaatgatggattgacacagatctttgtcgagttaaaacatgaaaaatattgatatttttctaatacaattcctgcatgatgatgtatctttcacctttgacaatttttttgcataaaaaggcagtggcattgatgatgggcaggaatggtggttgcgctgtagtgaaacatgggtgttgtggacggtccctatagacaatacaggatgacgccaagtcgccaaccatcattacaagtttgccgaattagaaatacgaagagaagtggcaatacagataaaccgctagaaagtatgagctcctgaatgtcctggaatttagtagctcatgaaaatggatgtgccttttagtgaaggaaccagaggggaggatatatgttaaagaatttgaggaagagacttgaagtctgttttatccatgtgtaccggctagaagataatttgaggaagagattaaaaggcacataaatcaatattctgattctggtgtaagaacgttggttcttgtataccttgtcttacatgagaaagagtatgcggttgatgactacttcagcactgccaaaccatctggacgtgcagaggcaggctaatctatggcattctgccattttatacaatcatgtttgcttcatgcatgatcaatcgacatcatttttcccatatgaagtccctttgaatcaaagaggctctataaatctgtgttttctcaaacttaactactccttaacttgtaatctgaaattagagattgtggtgcatgatgctgaagtttgaccttggccatcgggaagaagttgtgcggtgtgacattatgagaattggcaagcagactcctctccagctgagcttgtcacgagattgtgcttgctggcatcaagctatggacttgctacaaaaagatataatggtgtgtttggtgcttatacaaggccctagaagatgattatatgtactactttaatttgtgctttgtatttttctgtatattgccaaatggatttagagcatagccattgcattatatggtagctgtgtgtgttccctacatttttttgtatgttgataaacatggaaacacgctgttagagtgggtcagtttgtatatctgagtgtctacacatgaatcttgactatatatagcaatatgggcacgagaaccctttaaatttaag

SEQ ID NO: 60817 - protein, 84 aa, Triticum aestivum
  peptide (1)..(84): Ceres Seq. ID no. 14313249
MRKSMRLMTTSALPNHLDVQRQANLWHSAILYNHVCFMHDQSTSFFPYEVPLNQRGSINLCFLKLNYSLTCNLKLEIVVHDAEV

SEQ ID NO: 60818 - protein, 80 aa, Triticum aestivum
  peptide (1)..(80): Ceres Seq. ID no. 14313250
MRLMTTSALPNHLDVQRQANLWHSAILYNHVCFMHDQSTSFFPYEVPLNQRGSINLCFLKLNYSLTCNLKLEIVVHDAEV

SEQ ID NO: 60819 - protein, 77 aa, Triticum aestivum
  peptide (1)..(77): Ceres Seq. ID no. 14313251
MTTSALPNHLDVQRQANLWHSAILYNHVCFMHDQSTSFFPYEVPLNQRGSINLCFLKLNYSLTCNLKLEIVVHDAEV

SEQ ID NO: 60820 - DNA, 1043 bp, Triticum aestivum
  misc_feature (1)..(1043): Ceres Seq. ID no. 13660094
gtgcaccgccccgtgacacaactgcactggtggtggagtagataggggcgggaggaggaggagctgacaggaggagagcgagagacagaccgatcgatcgcccaccggccccgcccgccgcgcgcatccgtccgtccgccgctgcccggcccggccatggcgatggcgccgaggaggcggacgctgctcaaggtcatcgtccctcggcgacagcggggtcggcaagacgtcgctgatgaaccagtatgtgaacaagaagttcagccagcagtacaaggcgaccatcggcgccgacttcctcacccaaggaggtcctcatcgaggacaggctcgtcaccttgcagatttgggatacggcagggcaggagaggttccagagcctcggcgtggccttctacaggggagccgactgctgcgtgctagtctacgacgtcaatgccaaaagaacattcaacacgcttggcacctggcatgacgagttcatcaaccaggccggcccatcagaccccaagcaattccccttcattttggtcgggaacaaggtcgatctggacgctggaagcagacgagtggttcctgagaagaaagcaaaagactggtgcgtctccaagggcgacattccgtacttcgaaacctcggccaaggacgactacaatgtcgaccccgctttcctgtgcatcgccaagctcgccttggagcatgagcacgatcaagacatctacttcaattcagttgcagaacaaggccctaaaaccgaaggacagacgagcggatgcgcgtgctaggctagcatcttggcattactgtccagtataaggctacaattctgctgcatttatcgcactgtatccattcttgaatgtaatgtatgtaccatacgatagttagtgactgatcaacagttgcaagctgtgctcccgtagctgggcaataaaatgtaaacagttccaaccaaggaattattgtcgacctaattcttcgtcggttgtaacatgttgcacttcaactgcttggaatgattgtaacagagcatactcactctg

SEQ ID NO: 60821 - protein, 126 aa, Triticum aestivum
  peptide (1)..(126): Ceres Seq. ID no. 13660095
MPKEHSTRLAPGMTSSSTRPAHQTPSNSPSFWSGTRSIWTLEADEWFLRRKQKTGASPRATFRTSKPRPRTTTMSTPLSCASPSSPWSMSTIKTSTSIQLQNKALKPKDRRADARARLASWHYCPV

SEQ ID NO: 60822 - protein, 114 aa, Triticum aestivum
  peptide (1)..(114): Ceres Seq. ID no. 13660096
MTSSSTRPAHQTPSNSPSFWSGTRSIWTLEADEWFLRRKQKTGASPRATFRTSKPRPRTTTMSTPLSCASPSSPWSMSTIKTSTSIQLQNKALKPKDRRADARARLASWHYCPV

SEQ ID NO: 60823 - protein, 88 aa, Triticum aestivum
  peptide (1)..(88): Ceres Seq. ID no. 13660097
MAMAPRRRTLLKVIVPRRQRGRQDVADEPVCEQEVQPAVQGDHRRRLPHPRRSSSRTGSSPCRFGIRQGRRGSRASAWPSTGEPTAAC

SEQ ID NO: 60824 - DNA, 645 bp, Triticum aestivum
  misc_feature (1)..(645): Ceres Seq. ID no. 14301670
aaagaagaggatacaaggaggttggtttcctgagagaagtcgacgaagttgttagaacaggtgacgctttcagaacacttttattcacttgatcaagataaatactagctttgcggtggtcggctgtgaactgcgccttctccagatgataattctcaatctactcttttgcaggagtgacacctgccgagaagcttctgaatctatacgagacgaagtggcagcgcagcgtggaccctgtgttcgaggagttgttatattgatatatactgatatcatatataacttcggtggacgctggacaaggtggacagggtcttcagattgtatccccatacaaaatcccgtccccaattctacaagccacctgaccagggaaacctactctccggtctcgtggctgcgaataattttgagctcggaacactctgtttgtggcttgccgcctttcttttttcggctgtgtggaccttttacagcttctgatttttctcgcatctccagggagccggaacaaacacctgtttgtaccgatccccttttcatcttttcctgatgaactgcttgtattcggaataaatccatctcgtgtgatgatggaaggaacctgttctccagaaataataattcagagtgtttgggacg

SEQ ID NO: 60825 - protein, 136 aa, Triticum aestivum
  peptide (1)..(136): Ceres Seq. ID no. 14301671
MIILNLLFCRSDTCREASESIRDEVAAQRGPCVRGVVILIYTDIIYNFGGRWTRWTGSSDCIPIQNPVPNSTSHLTRETYSPVSWLRIILSSEHSVCGLPPFFFRLCGPFTASDFSRISREPEQTPVCTDPLFIFS

SEQ ID NO: 60826 - DNA, 1663 bp, Triticum aestivum
  misc_feature (1)..(1663): Ceres Seq. ID no. 14303317
tgaaacccagtccactcacgatgccagatctcggcgagtcacccattccaccccctccgctctcgcccccacagccggcgacctcgtctcgcaccgccgcctcctctcatcccctccccagctcccctccactcatccgacggcggctagatgtgcacacaaccggcgaccaacatcacacaaaggtcgccaccgccggcggtggaaggacagtcttctcccgctgctagccgcagcgtccgcctcgccctgatcctcgccctcctcgaccgccgctcgctctcctcggaagcacctcgccgcctccctgcccatgccgtgttcactggctgccctgctcgcgccgacctcgccaatctcgcggacgcgcttggcagtgctcgacttgtcctcgccgccgccagcggcgacgggtccttcccgtgcctctaccgcctcgtggccgagtcctcctctccccaaatcgacacccgcccctttgtcgagcctgccgtgcatgccatatgagcaggatggtgtacaccggcttcacagacatgtggtcgtcgaggcttcggatgaggtcaacgcggatgagaacagtccatagagccgtaccaggtagaacaagctgttccacgcatggggtctgattacaatattttcggagatgcataatatgccaaacacttctaaaggtgcctcgtccatgggtgcatgatagtggaaaaacatctgtaaattgtgcaggatcctatagagcaaatgggcatcatcgacgtgcagtacacgctctcttaggcagataagtaacctcagacaagttattttgtgaagatcggtggttcatggtctgaaagttttgtttttctctcgaaattttgtacttagataataccttaaatgctttttactgcttgatcacataatacatgtccgtgcaagaaaggagttgttaactgaaacaataatgttaatttttgttgttaacttaaacaataatgttaatttatgttaactacaaactgtcttggacattggttttttcaaattaactctgtgttgaactggttcttcttattgtgtgctgcagcccagcaatctgttcatgccaaatgattgagtcctggtgaggttcattgctagacatgcacggtctccgcaggcaaggaacacataaaagtaaatcagcgtgttatcagaaactcatgagcatgaaagagaaatttggatcatgtgcgaacatgggtagagagcagatcgaggagaacttgaagattaaaggcaatgaaaggtttcgtaaaatggcagcgggtagagttcttgtcctgcacaaaggaagccgcgccggcacccgtggatcgctggaagcctcaccgacacccatggcttgctggtagccgtggcggcaccaggggcaaagtttgaagaaacaggcctcgcacacctgatcggacggcaaactttgaagaaacagttcaaatccacatgatccgaacacaaacctggaagcgtggagaatcaggccttgactaccccgctcgaaagataggatttgaaaattatttgttgtatataggaagagcaaaaatattagattaaactgttgtttatggaagcttcttgtgacggaattttctgatatgattccatatgatttgatttgattggtgtcgtaaattgc

SEQ ID NO: 60827 - protein, 118 aa, Triticum aestivum
  peptide (1)..(118): Ceres Seq. ID no. 14303318
MCTQPATNITQRSPPPAVEGQSSPAASRSVRLALILALLDRRSLSSEAPRRLPAHAVFTGCPARADLANLADALGSARLVLAAASGDGSFPCLYRLVAESSSPQIDTRPFVEPAVHAI

SEQ ID NO: 60828 - protein, 91 aa, Triticum aestivum
  peptide (1)..(91): Ceres Seq. ID no. 14303319
MPCSLAALLAPTSPISRTRLAVLDLSSPPPAATGPSRASTASWPSPPLPKSTPAPLSSLPCMPYEQDGVHRLHRHVVVEASDEVNADENSP

SEQ ID NO: 60829 - protein, 83 aa, Triticum aestivum
  peptide (1)..(83): Ceres Seq. ID no. 14303320
MHGLRRQGTHKSKSACYQKLMSMKEKFGSCANMGREQIEENLKIKGNERFRKMAAGRVLVLHKGSRAGTRGSLEASPTPMACW

SEQ ID NO: 60830 - DNA, 1370 bp, Triticum aestivum
  misc_feature (1)..(1370): Ceres Seq. ID no. 13660872
cgacggtatcgataagcttttttttttttttttttcgacaaacacaccaggataccttaatgaacacaatccttaatcaaagttaatgaagcaactaatcgatcgaagagctagcatcaaccaaataaccatctattgttaccagcaaactgagacgctccaatccatcgaatagatggatggattcaatcatatcttccacatgttggagtagtccatgagaggctcgccccggaacagctcctccagatcgaagtacgaccgcgacgacgccatcaggaacgaggtgtccgcgccggcgagcgccgccgtgtccaagcccagcgaagggctcagcagcgcggacgaagacgctacctccgccttcggcttgctgtacctgcggatcgcgacctgctgatcgcccatagcctggtagggtgagtacccgacgccgccaagattgccgttggccgtcgccggcatgaaggagtttgggctctgcatctgctgcggcggctccatcttgatagtcaaatgctccgtgtccgcctcaagcggcagggcggcgctggaggtggagctcgaagcgccggcgaaatcgtcggcgccagacggtgagtccatgagcatcggcaggtcagcgttatcgagcaggtcggcgttgttaagcaagtcatcattgttgagcaagtcatcgaggaaggcgagcggatcctccatccgtggagcattcctcgcccccaagtctttgttgatcacccggcaaacagcccaatcatccttggcggtgcggggaaggcgatggggcagctggccctcgaggcggtactcgtgcatcacccacggcgtcttcccgccgctgggggcgcggccggtgtagaagacgagcgtcttcttcatgccgacgaggacggcgtcccggcccttgccgcggaagatctctttgtccttccccgtcgccttccagtagccgttcttcgtcgcccggttggtgcgcgtccccgtcgggtacttccggcccctgtgcacgaagaagaaccactccttctcgcccatcttcgccaggccagggagctcccacggctcgttcttgttgaggtcgacgtcggtgatcacttggcaggagaaggattcgcggaggaccttgcgggtgaggtagtgggtgaccacctcctcgtcggtggggtggaaccggaaccccggcggaagtgccagctgccgctcctccgcctccagatccatcaccgccgtcacgtccgacatggctgcaccctctccgggatctactagcttgccttgctacgctgtggaagaccctgatggaacgagagctgagcaggaggaagagctagatcgagatgttagaagtgattttgtctgaatggttt

SEQ ID NO: 60831 - protein, 162 aa, Triticum aestivum
  peptide (1)..(162): Ceres Seq. ID no. 13660873
MGQLALEAVLVHHPRRLPAAGGAAGVEDERLLHADEDGVPALAAEDLFVLPRRLPVAVLRRPVGARPRRVLPAPVHEEEPLLLAHLRQARELPRLVLVEVDVGDHLAGEGFAEDLAGEVVGDHLLVGGVEPEPRRKCQLPLLRLQIHHRRHVRHGCTLSGIY

SEQ ID NO: 60832 - protein, 132 aa, Triticum aestivum
  peptide (1)..(132): Ceres Seq. ID no. 13660874
MKEFGLCICCGGSILIVKCSVSASSGRAALEVELEAPAKSSAPDGESMSIGRSALSSRSALLSKSSLLSKSSRKASGSSIRGAFLAPKSLLITRQTAQSSLAVRGRRWGSWPSRRYSCITHGVFPPLGARPV

SEQ ID NO: 60833 - protein, 85 aa, Triticum aestivum
  peptide (1)..(85): Ceres Seq. ID no. 13660875
MSIGRSALSSRSALLSKSSLLSKSSRKASGSSIRGAFLAPKSLLITRQTAQSSLAVRGRRWGSWPSRRYSCITHGVFPPLGARPV

SEQ ID NO: 60834 - DNA, 524 bp, Triticum aestivum
  misc_feature (1)..(524): Ceres Seq. ID no. 13663839
ctttattgtgtttaaacagcgtactcttccttgttgatctcctctggtttcctcatccagataggcttctgcttgttgaccaagttccactcatgagagacttccttgatcttctttttcttcttttccttctcttccttctcctcatcaacatcctcaaccttgccctcctcagtatccttcttctcctcctcatcttcatcatcagaaatttccttctcagtggtcttctcagtccacagggagatggggtagctgataaactcagagtgcttcttaactagatccttgatgcggcgctcctcaaggtattccatctggtcgtccgtgaggctctcgaacctgatcttgtccaaggcatcggaggagttgatgatgagcgagaggagctggttgatctcggcctggaaggcgaaggtctcggtctccgtcgccatggctgcgcgcgttcctgagctgctcgaggcggggcggggagcggaggagaagcgtgcaggaggcggctagggttaggaggggttttt

SEQ ID NO: 60835 - protein, 93 aa, Triticum aestivum
  peptide (1)..(93): Ceres Seq. ID no. 13663840
LLCLNSVLFLVDLLWFPHPDRLLLVDQVPLMRDFLDLLFLLFLLFLLLINILNLALLSILLLLLIFIIRNFLLSGLLSPQGDGVADKLRVLLN

SEQ ID NO: 60836 - protein, 71 aa, Triticum aestivum
  peptide (1)..(71): Ceres Seq. ID no. 13663841
MRRSSRYSIWSSVRLSNLILSKASEELMMSERSWLISAWKAKVSVSVAMAARVPELLEAGRGAEEKRAGGG

SEQ ID NO: 60837 - protein, 63 aa, Triticum aestivum
  peptide (1)..(63): Ceres Seq. ID no. 13663842
MRDFLDLLFLLFLLFLLLINILNLALLSILLLLLIFIIRNFLLSGLLSPQGDGVADKLRVLLN

SEQ ID NO: 60838 - DNA, 2098 bp, Triticum aestivum
  misc_feature (1)..(2098): Ceres Seq. ID no. 14301878
aaaccctaatctcatataggaccaggcggcggcggcggcggcggcgcggcggcgagtatactcgtagacagcaagcctgaatccccaaaaaaactagagagcgagaggatttggaaatcccagatctttaaaggagatggagatggagatcgagagggactcccaggagcagaggaggatgtggatcgcagaccactcgttgaagcatgcgaagatgctagcagagttcggctatgatatgccgagcaggaagaccactatgtccctgaggaaggaggcctccacgtccctgaggttggaagatggaggcttggttgacgctctttgtcgccaccgtgagatcctgaggagggaaaccaacttcttgatgggggaggtcaattcacgggcgcttgcaactttaggcggaaggaaggcttacagggagtcgatccaacgggagaacaatgtcgccgtcgctcttctccgattcgttcgcctcaagaacggtcgacttggtgggggtgagcttgccccactttgtcaccagccatgaggagtccctggatcttctcttgcgcgagtcggatcatctgggccgccggatccagtctctggcgtccataatgaggaaatttgatatccccgtctcctccgacaagcccaaaaagctgctgtttctcatgtcacgcgcagctgtgataatctccaagactatgaagaattattccaaggaggatgctacttcttcaaagcttcttcaccgtgcccactgggaatctatatggggcagtcagatggcaagccatggtgtcttcgatgatataagtatttttgttgtcagcttgctttcttcttcttaattactacccatgtcccgttcaattaataatgcaatcggaccactctctattttcactcttcgtatacttgcttaattaattttgtaatttgttaatatagattttttttgcggttgattaagatagattttctaacaatgcactcttgtttgactttgattttggtgctgcacgcagccacactgagtcctatgcaattcacgccatccacacctggtattactccctactctgctaccacctgcccagcattgcagatctactctatcaaaattgttgacctcaacgtcaacttgagctggccgctccgagtgtacggtgttgtcgccgccagagacactgtggaccgcaaccgcaaccttctcttctaccggtccagggctaactaccaattagtcgagaaagatgtatgtataaatactaagtcttctccttaatttgcttgcttgtccatttttcaattaagtgttagtaatgataagtcgaacgataacgatggtgcttccaggatccttttttgcgcttgactggcccgtctcgcgcaattttggccagcaacccggtgacatttgaagttgaactaaaaactgtgtatcctggagcggagccggatccccaaggcgcattgctctcttgcgtctatgattggcgcgccgtgcaggataccacccctatgttccttggctatgcttgttctgcacagttaagccttgagcaacttcctagagcaatccaggccactatcatgggtgtccacattgttgatggctcatggcctcctaaatatggatgccgggtttcttgctccttgtctgctccagatgatcccactcctagggaagtgttgttgcttgattgttcccgttctgatgctgaaaaaaaaaagccctgttggatcagatggctactttggtctggcaaggaatgttgtttcagctgaactacaatcaacactgaaagttgtcatacaagcccagtcgtggaggcatggtggtgcacagggtcatgtcgagttccctgtccaacaatactgccaaacaagcaagggttcatgtgttgtaggcatgtgtaaggtcgaggttgttgttgcttggtccctccttgtcgagaacaagctgaatctcatgctttgagacgtgagatctactatgtaagagtcagctctagcttgcgactcatcttgacccagatattcgtgtactgactattagcttatcttgtgaaacattgttatgctggtggtttgctagcatgtc

SEQ ID NO: 60839 - protein, 132 aa, Triticum aestivum
  peptide (1)..(132): Ceres Seq. ID no. 14301879
MEMEIERDSQEQRRMWIADHSLKHAKMLAEFGYDMPSRKTTMSLRKEASTSLRLEDGGLVDALCRHREILRRETNFLMGEVNSRALATLGGRKAYRESIQRENNVAVALLRFVRLKNGRLGGGELAPLCHQP

SEQ ID NO: 60840 - protein, 131 aa, Triticum aestivum
  peptide (1)..(131): Ceres Seq. ID no. 14301880
MSPSLFSDSFASRTVDLVGVSLPHFVTSHEESLDLLLRESDHLGRRIQSLASIMRKFDIPVSSDKPKKLLFLMSRAAVIISKTMKNYSKEDATSSKLLHRAHWESIWGSQMASHGVFDDISIFVVSLLSSS

SEQ ID NO: 60841 - protein, 130 aa, Triticum aestivum
  peptide (1)..(130): Ceres Seq. ID no. 14301881
MEIERDSQEQRRMWIADHSLKHAKMLAEFGYDMPSRKTTMSLRKEASTSLRLEDGGLVDALCRHREILRRETNFLMGEVNSRALATLGGRKAYRESIQRENNVAVALLRFVRLKNGRLGGGELAPLCHQP

SEQ ID NO: 60842 - DNA, 2123 bp, Triticum aestivum
  misc_feature (1)..(2123): Ceres Seq. ID no. 13660967
gccgatttctctagagcagacccgaccccgagctctcctgctagcgcgcgctggcgacggccactccggcctcgtcggccaccccaccgctggctcgcagcccagccgccatgctgccgccgcctccaccctcgttgcctgtgggtttcaaaccggttgtcgtcccgccgccatctctatcgttttcccggtcagatctggatcgggacctcctgcttccgccgccgccgacgacgacgatggacctgcccacccagcttcgtgccgtgcccatggcggtgttggtgatgcctccatgcgagctcgaagcgctcacgtcaccgaagcccgcggcagctggtggctgccccgctccgtcgacgacggctgctgctgtcgacatcctgatccccgtggcggccccgtccctcctcctgccggccgtgcccgggagctcgcgtccatcaccatagagctcgctcccctctgagccaacgcccgtggtccctcccgcaccgtcgttcgccgccgccgcactagccgcggctgcacttgcttgccgcagatcggacccggccatcggagggcagaagcctcgttcccaggagggcctggatacctttgcttcgccgcctgctggacgcccttgcctgcccgacggccaacctcctgcactcgctgctcttggttggggggattggcgtggatgcttccatcgtgatgaagtgactgatgttctcgagtgtgagcaagggggatggcagactgtctcgaaggggcgccgctcgccgcctcctgtagcttttcatcgcccttccatcaatgtgcggcgttcccttccggcgtggctgagagacaggtgtttccggtgtctttgtcgaggtcaacgcgcacactcctacagggatccaatccgatgcactgactgccttcgatctggacacatgactcgcttctgtcatgctaagaagcctgtccatcaagctttgccgctccaatgtcatgctccatcgcctgcttccaccggtgatgtctccatgatagatgtgcagttccggtctatctcggctaagcatgtcgggttggtggaggagaccaagatgcttcgcactgagcttcacgactgccttgcgcgtgctggtagtgttttggggagggcggaggccgctcatgccaaactagaggtggtgccggatgtgtcttcgctgcctgagcttcagattggggttgtgcctgatgtgtccctactgcccgagatccaggttgactctgtcgatggggaaggtggcatgtatggagatctctcccctcgtgctacagcctgtcagttgtcgctgcctgtcatgccgattccttccgggagcgaagtcattgttgaggtcgtgactccggtgctgcggattatgcctgagcttcagaagctttgtggggagcccactttgcctatttcgatggtgcttcctgaggagatagggtctcttggaggggacttggtgatgccaactgcgacctcatcgttttcattggagccgagtcagccgcttgcctttgtgaaccttggaggtttggcggctgctgctgctctctcacctgaggttgttggcccggtggcgtctgttggtgctgagtttgatgaggtaggtgctttgacacctgtttctaaggcgccgaagcccgtccagtctctcatctttgaccgtgacactatgttggcacgtattgacgaggtggtcttcgcgaaaaagcttggccgcttgctcactggcttggatgcagcttgtcctgggtctgccaagacgattgcttgcctcctagcggaggaggtttctacgggcaaaattaagaagatgaagaagcctatcaggagtataggcaagaagactgatgtcattaggaaggcgtgcgcggctgcttaatggagtggcgtttggtggtttcgttgcgatgtcattttgtgagggtttgtggttgttgcatgttatgtatgtttgttgggttgaccgtggtgtcatggagtttctttcttagcgagtagtccgcatgtggtctatatgtatcggtttttgcccagttttccgttaattaactgggcaattctctttttcttaattaatcgatgaggcaaatcttttgccttcgtttcg

SEQ ID NO: 60843 - protein, 323 aa, Triticum aestivum
  peptide (1)..(323): Ceres Seq. ID no. 13660968
MTRFCHAKKPVHQALPLQCHAPSPASTGDVSMIDVQFRSISAKHVGLVEETKMLRTELHDCLARAGSVLGRAEAAHAKLEVVPDVSSLPELQIGVVPDVSLLPEIQVDSVDGEGGMYGDLSPRATACQLSLPVMPIPSGSEVIVEVVTPVLRIMPELQKLCGEPTLPISMVLPEEIGSLGGDLVMPTATSSFSLEPSQPLAFVNLGGLAAAAALSPEVVGPVASVGAEFDEVGALTPVSKAPKPVQSLIFDRDTMLARIDEVVFAKKLGRLLTGLDAACPGSAKTIACLLAEEVSTGKIKKMKKPIRSIGKKTDVIRKACAAA

SEQ ID NO: 60844 - protein, 292 aa, Triticum aestivum
  peptide (1)..(292): Ceres Seq. ID no. 13660969
MIDVQFRSISAKHVGLVEETKMLRTELHDCLARAGSVLGRAEAAHAKLEVVPDVSSLPELQIGVVPDVSLLPEIQVDSVDGEGGMYGDLSPRATACQLSLPVMPIPSGSEVIVEVVTPVLRIMPELQKLCGEPTLPISMVLPEEIGSLGGDLVMPTATSSFSLEPSQPLAFVNLGGLAAAAALSPEVVGPVASVGAEFDEVGALTPVSKAPKPVQSLIFDRDTMLARIDEVVFAKKLGRLLTGLDAACPGSAKTIACLLAEEVSTGKIKKMKKPIRSIGKKTDVIRKACAAA

SEQ ID NO: 60845 - protein, 271 aa, Triticum aestivum
  peptide (1)..(271): Ceres Seq. ID no. 13660970
MLRTELHDCLARAGSVLGRAEAAHAKLEVVPDVSSLPELQIGVVPDVSLLPEIQVDSVDGEGGMYGDLSPRATACQLSLPVMPIPSGSEVIVEVVTPVLRIMPELQKLCGEPTLPISMVLPEEIGSLGGDLVMPTATSSFSLEPSQPLAFVNLGGLAAAAALSPEVVGPVASVGAEFDEVGALTPVSKAPKPVQSLIFDRDTMLARIDEVVFAKKLGRLLTGLDAACPGSAKTIACLLAEEVSTGKIKKMKKPIRSIGKKTDVIRKACAAA

SEQ ID NO: 60846 - DNA, 924 bp, Triticum aestivum
  misc_feature (1)..(924): Ceres Seq. ID no. 13660862
aggtcgacggtatcgataagcttttttttttttttttttgttgatacgaataacacatacgcgtgaatatagccgtttaaggatttagtgccagataatttagcaacaaagtggatattgcacattgctttcaaagagagcctgggcagtgacctcattcacttgacataccaaacataggctaaaggagacggtgcgaccagctctacacgcaaaatgcaccatgagggttgatagtaagcagaaggaccaaaacagatttttggtgccagccacctgaaaaaggcaacattatataggttgtttctactttggaggaagtagaccaagatgtgaccgcctctgaactagatgatgtttatttataaacttatccgcatgggatggataggcccctttgatgtacgcccggagacacttgcggtatgagaaatccgcccaatcaccatttgttctaaccacatacaggcatctggacatcttgaaatcaggatgtttgttaaccataatagcatcaagtccacaaccaatcttgtcttccgaacgggggtggtgagcaagaaccttttctaccacaaccttttcatcttccggacttaaaaacgcaccatctccatatctgctggaatggaggatgtttttgacaagttccacgacgggcccaacttcgcggaggatctccgcctcagccacctcccactgctcctcctcggcccccggagcggagggctcgttgccggcggggaggtcgcagaacaggcggctgggggtgtagagtgcagcagaagtggcgtgcggcgggaagccgccgtggaggatgcgcgtggccgctcgagcgagggcggcggccaaggccatggcttcttcagctacggcgagaaagggtttctccttggggtttcaacagatcagtagtatgggcct

SEQ ID NO: 60847 - protein, 95 aa, Triticum aestivum
  peptide (1)..(95): Ceres Seq. ID no. 13660863
MEDVFDKFHDGPNFAEDLRLSHLPLLLLGPRSGGLVAGGEVAEQAAGGVECSRSGVRREAAVEDARGRSSEGGGQGHGFFSYGEKGFLLGVSTDQ

SEQ ID NO: 60848 - protein, 51 aa, Triticum aestivum
  peptide (1)..(51): Ceres Seq. ID no. 13660864
MYARRHLRYEKSAQSPFVLTTYRHLDILKSGCLLTIIASSPQPILSSERGW

SEQ ID NO: 60849 - DNA, 842 bp, Triticum aestivum
  misc_feature (1)..(842): Ceres Seq. ID no. 13660487
acttacctggacggggtcaatgacctatcaagaaggctcatggcctaggttagcagcctccattgcacttcggaggagtgctggcttaccatctccctaagtgggagaatggatgtcataatttgtgctagtagggttacgcgtccgcgcggcccttgccaatttgaagtctaggtatttcgtttgatcacactagtaatggcggctcaagtgcgcgtcgacctcatcgtgtattccgctacaagctttgagaacagagaggatttgtcctccagcaacctggctggcgtttggtgctccacagccatgcctgtaaaattttgccactgtgtttgtcagtccagttcataagtgtcacacccagattgggcagattaacaagacgtagcttaaagttcatttaaaggagtggtgatatggtagctgaccattgtcaagaagcaagactatatcactgtgaaggaccgaggtgattcgatgcgcgattgtgatgacggtcgcccccgagaaatgctgctgcagtgtcttctggatcaggttatctgttgcggtgtccaccgaagcggtggcttcgtccaggaccagtatcttggtccgtctcaagatcaccctgccgagacagacgagctgacgctggccgacgctccagttctctccgttctccaccactgcgagtggacttttgaatttcagaaatttcagaagaagctagactagtggaatgtgaactgtatggttcaatatagatcagacctggcgagtcaagtttgagctcctttctccgaacttcatctcctagctgacagtgatccaaggcctgaaatgtttatttttcagttttt

SEQ ID NO: 60850 - protein, 79 aa, Triticum aestivum
  peptide (1)..(79): Ceres Seq. ID no. 15220028
MRDCDDGRPREMLLQCLLDQVICCGVHRSGGFVQDQYLGPSQDHPAETDELTLADAPVLSVLHHCEWTFEFQKFQKKLD

SEQ ID NO: 60851 - protein, 68 aa, Triticum aestivum
  peptide (1)..(68): Ceres Seq. ID no. 15220029
MLLQCLLDQVICCGVHRSGGFVQDQYLGPSQDHPAETDELTLADAPVLSVLHHCEWTFEFQKFQKKLD

SEQ ID NO: 60852 - protein, 50 aa, Triticum aestivum
  peptide (1)..(50): Ceres Seq. ID no. 15220030
MAAQVRVDLIVYSATSFENREDLSSSNLAGVWCSTAMPVKFCHCVCQSSS

SEQ ID NO: 60853 - DNA, 821 bp, Triticum aestivum
  misc_feature (1)..(821): Ceres Seq. ID no. 13660528
tcgttccccaagatgctctagccgctcagtgggcacgtagcagcaagtcggctgcgctcgcatgccgacaagccgtcccatccggacgccacgtacgtgatgtggcgcgacgcacccaccgtcccagagtggtataagatggccaccatgcgctaaagttagcagcacacgacaccatctacacaccatctctccatctgcttgttctcatcgcctcaagaagctttgcgttgtatacgttcgaccggccgtaggatgtggatgaggaagaagaaggcggcgacgacgaggccggcggccaggaggagggcgccgacgtctctaggggcgctgtggcggcgcgtggtcgggccggcccgcggcggcaagaccaaaaagaccaagaccaagaagagcaagatcgggtcgctctcgcgcgcgttccgggcgttctcctgcgtccgcggccatggcaaagggaggatggctgcccgcgcagcgcgcaggtactgatcggtctgggacgcgcacggccgccgtccgggagtcgagagctgcccatcacaaatttcatgttaactttggatatcctgtacccacgtgtgttttttcctgcggggactgtatccacgtgttgtgcttgtactgcgtgctgtttgtaaaaacatacctccattccataacgtaagacgttttttgacactacactagagtcaaaaaaatgtcttacgggcggagaaagtactggtcctcgaaagaggaagttaagtgcgtttcgtaatctcattacaawaaarwwrraacgggaggggggaaargmttatcgataccgtcgacctcga

SEQ ID NO: 60854 - protein, 78 aa, Triticum aestivum
  peptide (1)..(78): Ceres Seq. ID no. 15220034
MWMRKKKAATTRPAARRRAPTSLGALWRRVVGPARGGKTKKTKTKKSKIGSLSRAFRAFSCVRGHGKGRMAARAARRY

SEQ ID NO: 60855 - protein, 76 aa, Triticum aestivum
  peptide (1)..(76): Ceres Seq. ID no. 15220035
MRKKKAATTRPAARRRAPTSLGALWRRVVGPARGGKTKKTKTKKSKIGSLSRAFRAFSCVRGHGKGRMAARAARRY

SEQ ID NO: 60856 - protein, 72 aa, Triticum aestivum
  peptide (1)..(72): Ceres Seq. ID no. 15220036
MAKGGWLPAQRAGTDRSGTRTAAVRESRAAHHKFHVNFGYPVPTCVFSCGDCIHVLCLYCVLFVKTYLHSIT

SEQ ID NO: 60857 - DNA, 902 bp, Triticum aestivum
  misc_feature (1)..(902): Ceres Seq. ID no. 13583137
aaaggcaaaaattattccatttcattttccatggtagtgtttgcgtgcgctgcaactttttctacccaaacgaaacatcgaaactcttgcctagacgatacatcgaaacaaaatcttgctgcatgtcgtacatgtcgccattttactgcactggagtggcatcaagccggccagcctacctgtagatcactgggtgaacaccacattcgtgatgtcggggaacttctccttgatggctgccttcactccacttccgatggactctgggccgtcatacttaaccaggcagtcctcgccgtcaacggcaagaaccttcacactcccgccgtagttcgcgatcgccggccgcagtatgtccaggtgccggttcaccgcctcaggcgttgtctcctccggctgctggtccccgtcgaacacctggcggatgtccttgatggcgtcaccgaacttctccttgagcactcgctcgatgcccatgttcatcgtcgtcgtcgagcttggacaactgctgcacgccccttcaagcctaagggagacgacgccgtcctcgacggacacgacggcgacgtcgccgccgtcggagatgaggtaggggcgcacgtcgtcgaggacgcggtcgacgttacctggcgtcagttcgtaggtcaccgccgagtacaggccgcctcccggcggcggcggcgtggatgccgaggccgcagccaggtgtccccggaagttggcggtccagatcttggagtctcggaattggggtcgcctagggagcacgggcgggttgaatttgatgattcggcgacggatttgcggcggaaacgacgaggtagcggcggcggccgcggtcagcgacgcctccattgtttgccgtgtgtggtcgtgtatccctttgctttttcgattaggat

SEQ ID NO: 60858 - protein, 300 aa, Triticum aestivum
  peptide (1)..(300): Ceres Seq. ID no. 13583138
KGKNYSISFSMVVFACAATFSTQTKHRNSCLDDTSKQNLAACRTCRHFTALEWHQAGQPTCRSLGEHHIRDVGELLLDGCLHSTSDGLWAVILNQAVLAVNGKNLHTPAVVRDRRPQYVQVPVHRLRRCLLRLLVPVEHLADVLDGVTELLLEHSLDAHVHRRRRAWTTAARPFKPKGDDAVLDGHDGDVAAVGDEVGAHVVEDAVDVTWRQFVGHRRVQAASRRRRRGCRGRSQVSPEVGGPDLGVSELGSPREHGRVEFDDSATDLRRKRRGSGGGRGQRRLHCLPCVVVYPFAFSIR

SEQ ID NO: 60859 - protein, 290 aa, Triticum aestivum
  peptide (1)..(290): Ceres Seq. ID no. 13583139
MVVFACAATFSTQTKHRNSCLDDTSKQNLAACRTCRHFTALEWHQAGQPTCRSLGEHHIRDVGELLLDGCLHSTSDGLWAVILNQAVLAVNGKNLHTPAVVRDRRPQYVQVPVHRLRRCLLRLLVPVEHLADVLDGVTELLLEHSLDAHVHRRRRAWTTAARPFKPKGDDAVLDGHDGDVAAVGDEVGAHVVEDAVDVTWRQFVGHRRVQAASRRRRRGCRGRSQVSPEVGGPDLGVSELGSPREHGRVEFDDSATDLRRKRRGSGGGRGQRRLHCLPCVVVYPFAFSIR

SEQ ID NO: 60860 - DNA, 1345 bp, Triticum aestivum
  misc_feature (1)..(1345): Ceres Seq. ID no. 13595928
cccccctcccgttccaactttattgtgtttaaacatttttttttttttttttttttttttttttttttttttttttcccagaacataacagctcaactcctctgttcacatgcacaactcaacgcctaattagacataaacaaacaagaaggccacgacacggagagaagaaagaaaaggaaaattttaatcacaggccatgagtgagtgcgtgagagtgaccacacacgcactgatgactgatgcctgatgcctgattgctctgtctctgcccatggcgcgttgcctgccgatcacatgacgctgcacccggcgttggggtcctcgccgcagtacggctgctgctgctgctggtagtacggctgccggttgccgtggtaccacccctggtggtcgtgcaccggcacgccgtagtacccgccggccggcacgggcggcctgcagcactggcaacccccgccgcacccgccaccgcagcctccaccgtagtacgacggctgggccggctggccgtacggcgtcgggtcgtagctgtaggacatgggcccggccggcgccggccagatggacggcacggccaccccctgcgcggccacgggcggcgccatcatcggcgggcccagcggctcgccgcgcggcggctggggcccgcctccgccctgctgcttggcctgcttcatcttctccaggagcgggccgaggtcggccatgctcatgccgggcggcagcggcggcatggccttgccgggcttggcgtccgtggccggcggcgcgtcgtcgaacttgaccttcttctccggcttggcggccgcggcgtccttgggcttctccttgtccgccttcccgccgccatccttgggcttctccgccttcccgccgccgtccttgggcttctccgccttcccgccgtccttctcggccttgccgccgtccttgggtgccttctgcttctcgccaccgccgccgtccttgtccgccttctgttcattgccattgacatgcatctccttgatcacccggccggcctcgcagcagagcttcctgcacagcttgtcggggtcgaacggcccggacaccgtcacggcgttgttcttctcgtcgaaggagatgattttgatgttcatcttgtcttggatcttgcagaggaccttcctcatcttcctgtagcatcgcgcgcattcaaggtcaactttgaggacaaccgtggagatcttgtccgccatggcaatggcgccgcctgaggcgtggtcgtcaccttcagaggagcctgtgctgtgtgatgtgtgctctctgtggaggagagagagaggggggagggggaggacgaagaagaagaaatatggat

SEQ ID NO: 60861 - protein, 208 aa, Triticum aestivum
  peptide (1)..(208): Ceres Seq. ID no. 13595929
MGPAGAGQMDGTATPCAATGGAIIGGPSGSPRGGWGPPPPCCLACFIFSRSGPRSAMLMPGGSGGMALPGLASVAGGASSNLTFFSGLAAAASLGFSLSAFPPPSLGFSAFPPPSLGFSAFPPSFSALPPSLGAFCFSPPPPSLSAFCSLPLTCISLITRPASQQSFLHSLSGSNGPDTVTALFFSSKEMILMFILSWILQRTFLIFL

SEQ ID NO: 60862 - protein, 200 aa, Triticum aestivum
  peptide (1)..(200): Ceres Seq. ID no. 13595930
MDGTATPCAATGGAIIGGPSGSPRGGWGPPPPCCLACFIFSRSGPRSAMLMPGGSGGMALPGLASVAGGASSNLTFFSGLAAAASLGFSLSAFPPPSLGFSAFPPPSLGFSAFPPSFSALPPSLGAFCFSPPPPSLSAFCSLPLTCISLITRPASQQSFLHSLSGSNGPDTVTALFFSSKEMILMFILSWILQRTFLIFL

SEQ ID NO: 60863 - protein, 152 aa, Triticum aestivum
  peptide (1)..(152): Ceres Seq. ID no. 13595931
MLMPGGSGGMALPGLASVAGGASSNLTFFSGLAAAASLGFSLSAFPPPSLGFSAFPPPSLGFSAFPPSFSALPPSLGAFCFSPPPPSLSAFCSLPLTCISLITRPASQQSFLHSLSGSNGPDTVTALFFSSKEMILMFILSWILQRTFLIFL

SEQ ID NO: 60864 - DNA, 711 bp, Triticum aestivum
  misc_feature (1)..(711): Ceres Seq. ID no. 13596163
ctttattgtgtttaacatatcgtgagcatgcagtagtgactgccgttgttgatgaaggtcctgaagaatcgacacaccaagttcttctgtctccagcatagttcttcggctctctttaattctgtcagtggactgattcagtctttcagttgtcatcatcaaccttcctcgctgatcagtggacaccgcgagtgtgtcagccatgccagattcaaggagctcctccttggtagtttgcctggcattaggcgccgagatcctcttgagctcgctcttgaggttgttaaggtcagatttgtactcccgcagcttagctagcaaacccgctttcacgctaggcggcgtattcctagcctccaggtccatcctccgaatcagcgattcagcttcctgcacgccggactggatctcggagagcctctgcttcttcttctctccatcgagggcggaggcgacggtgcacttgcgggagagggaggcggattcctcgcagtactggcgctcgtagccctcgaacacctcgctcatgactgctcccctcgatcgcctccgcccgcgcgcaaagattcccccctccggattccgcgcccaaatcgtccggcggcgtcgaatcgagcagatgatcgagacggccgcaattcgatccgggctgcctcacgagggggggctccgggcgtttggtggaagcttcgattttggtcgggtagggat

SEQ ID NO: 60865 - protein, 101 aa, Triticum aestivum
  peptide (1)..(101): Ceres Seq. ID no. 13596164
MPDSRSSSLVVCLALGAEILLSSLLRLLRSDLYSRSLASKPAFTLGGVFLASRSILRISDSASCTPDWISESLCFFFSPSRAEATVHLREREADSSQYWRS

SEQ ID NO: 60866 - protein, 88 aa, Triticum aestivum
  peptide (1)..(88): Ceres Seq. ID no. 13596165
MKVLKNRHTKFFCLQHSSSALFNSVSGLIQSFSCHHQPSSLISGHRECVSHARFKELLLGSLPGIRRRDPLELALEVVKVRFVLPQLS

SEQ ID NO: 60867 - protein, 61 aa, Triticum aestivum
  peptide (1)..(61): Ceres Seq. ID no. 13596166
MTAPLDRLRPRAKIPPSGFRAQIVRRRRIEQMIETAAIRSGLPHEGGLRAFGGSFDFGRVG

SEQ ID NO: 60868 - DNA, 766 bp, Triticum aestivum
  misc_feature (1)..(766): Ceres Seq. ID no. 13596075
cccccctccagtttgcaagaaagctaccaccattctctggcatcgacaccaacttttttgatctgaaccatggatgacatcgtaactcttagttttgcaactatgatgttgcctgttgtctgtgaagtacagttgtaattatttacggcagcagtttgatatcgtgctcttataactttcatcaggttgctaaagatggacttcccttgccaactgacaggacgctgtgccctctgtgctgccaaaagcgcaacaacccgtctgttctttctgtttctggttttgtgttctgctacagttgcatattcaagtctgtctctcagcataaaagatgtcccgtgacattgatgcctgccactgttgagcaaatcaggcgcctcttccatgatttatagcttgaataggcgcagttcaactaaaggaagtactccctctgtaaactaatataagagtatttagatcactaaagtagtgatctaaacgctcttatattagtttacggagggagtagcttatatgggctcaaggctgctagggactctggggcgagaagaagcttttcccgcattcctgttgatgcagagatcacacgagatacagtttctgcttcacgtaatatccatacagctcttgtgccatttttgttgtttgttgaaacttcaacagagatttagaccgtgtaataattactgctaggtgattattgagttgatttattaaagggggggttgaaaaaaaaaaaaaaaaaagcttatcgataccgtcg

SEQ ID NO: 60869 - protein, 59 aa, Triticum aestivum
  peptide (1)..(59): Ceres Seq. ID no. 15221760
MGSRLLGTLGREEAFPAFLLMQRSHEIQFLLHVISIQLLCHFCCLLKLQQRFRPCNNYC

SEQ ID NO: 60870 - protein, 48 aa, Triticum aestivum
  peptide (1)..(48): Ceres Seq. ID no. 15221761
MDFPCQLTGRCALCAAKSATTRLFFLFLVLCSATVAYSSLSLSIKDVP

SEQ ID NO: 60871 - protein, 39 aa, Triticum aestivum
  peptide (1)..(39): Ceres Seq. ID no. 15221762
MQRSHEIQFLLHVISIQLLCHFCCLLKLQQRFRPCNNYC

SEQ ID NO: 60872 - DNA, 718 bp, Triticum aestivum
  misc_feature (1)..(718): Ceres Seq. ID no. 13596290
ctcaacctccccccgcaccaaaaacccgcgcccaaatcccacaaccgcgcccagatccgccccgccatcccgcatggcgcacccggccgcggaccgccgcctgcgctcctccccggcgtcctccgcgtcgcgctgcgaccacaaccgcttcttccgccccggcgcgctcgccaggctccgcgactccaagatcgtagcccgctcccttcgctccgccgcctccgcgcgcctcctcccgccctccccctcctcgcccgctcccttgtcacccgcgcacgctgcggagaccggcgtgccgcacttcttcggggccgcgcggggcggcatgcggtacccgctccggaagaagctcgccgccgcccggggcgtcgtgttcctgcccccgccgcccgtgtcgccgggcgccctggaggccttcctcggcgctttcgccgccgcgccgtccgagctcctcgccgcgcactgataggccggccggccggccggtagactcctgtgccactgccgctgtggggatgcgttcgcagcggcgcagtcggagctggaggatgccgcgtgccgaagaccaactgctgtgccgctcagctgctgtctaggcttcgttagatctgtgtagatgcttctttcttttaggaactgcaactttttcagatgttggaagtgcaaccttgggagtactactagcaaaaaaaaaaaaaaaaaagcttatcgataccgt

SEQ ID NO: 60873 - protein, 162 aa, Triticum aestivum
  peptide (1)..(162): Ceres Seq. ID no. 13596291
LNLPPHQKPAPKSHNRAQIRPAIPHGAPGRGPPPALLPGVLRVALRPQPLLPPRRARQAPRLQDRSPLPSLRRLRAPPPALPLLARSLVTRARCGDRRAALLRGRAGRHAVPAPEEARRRPGRRVPAPAARVAGRPGGLPRRFRRRAVRAPRRALIGRPAGR

SEQ ID NO: 60874 - protein, 154 aa, Triticum aestivum
  peptide (1)..(154): Ceres Seq. ID no. 13596292
STSPRTKNPRPNPTTAPRSAPPSRMAHPAADRRLRSSPASSASRCDHNRFFRPGALARLRDSKIVARSLRSAASARLLPPSPSSPAPLSPAHAAETGVPHFFGAARGGMRYPLRKKLAAARGVVFLPPPPVSPGALEAFLGAFAAAPSELLAAH

SEQ ID NO: 60875 - protein, 130 aa, Triticum aestivum
  peptide (1)..(130): Ceres Seq. ID no. 13596293
MAHPAADRRLRSSPASSASRCDHNRFFRPGALARLRDSKIVARSLRSAASARLLPPSPSSPAPLSPAHAAETGVPHFFGAARGGMRYPLRKKLAAARGVVFLPPPPVSPGALEAFLGAFAAAPSELLAAH

SEQ ID NO: 60876 - DNA, 1481 bp, Triticum aestivum
  misc_feature (1)..(1481): Ceres Seq. ID no. 13589000
atcgataagctttttttttttttttgcagctaaaagagatggacacactcaattggtttgtaaatgggagaaatacaaagggctatcacaagtttcaaaccatgtaaacctcctgagctgaggcaaaaagtagcatggaaaaaacagtaattcacatacgagatctcctaaatttacaatgaaaaactcatctttacattggatgagtggagacaagttttcacaccaccaaagatggaagtatttggtctggcgaagcctgttatcgtttcttcttcatgattgccgccgtgcgcatctcggcgtcttccttggcgaagctccaccagaggtatgacagggggatagccatggcgaggcagattgcgtgtccatcaacatatccccatcgcggagggacatcatgtgcttccaggtatagtgagaggacaccaccgatggcaacaaaggcgaccttcaggcgtgaaggatgccttgtgatagcagcccacactgtccatagaaggagctgagcaacgctaataacagtgcaaaccttcatgttcaggcctttgtcgagttcgtagaagttgaggtacaaaatgtgggttgtcacaaaagccagaattggagctgcaaccatcactcttgaagcttcatccctcagattcgaagttcgcagtatggccaagatgagggagtaaccaaaaaaagcagcagctgatgacaaatacagcttttctgtccaagcagtatcacaactgtgatatatggcacaccagaaccacgaattcatggccaagagcgcgttgatgtgccataatccggtgtattcgtagtatgtggcatgagtttctggcctaagaggcagcttgtaagaaagcaagaggaaaaacgatagccatccattaaactgcacgagaagagtcagggcagatagagctgcagaaagaggttcctgaaacacagaagcacgtttgagaggccatttgccatgatacttgacgggccctagcccaagctcttccctttcctgctctctttccatcatacaatggtatcggcattcgctgttgcagttccactccttccactggaggtacaatggctcgtgcgcgtaccatgccttgtcagcgggctggtcatcggtcggcacaacacagtgtttgatagaatcctctttcagggtgccagtcctttgacattcttcgaagcaagctctgtagagcggatcggcgtcgccctcggaggcggaggcggaggcggccaaggccgtggccgccaggccgagaagcatcagcagcggcggccctctcctgcggagccccatcccccctcctctccgtccgcgcggctccgaatcgggcggggcggggcggggaggactagcaagcagcggcagcagctagagggagagggagagggagagcggggcggggcggagatccattaatccacgcgagacggagttccgaggggggagggggagatgggggtgattt

SEQ ID NO: 60877 - protein, 132 aa, Triticum aestivum
  peptide (1)..(132): Ceres Seq. ID no. 13589001
MVSAFAVAVPLLPLEVQWLVRVPCLVSGLVIGRHNTVFDRILFQGASPLTFFEASSVERIGVALGGGGGGGQGRGRQAEKHQQRRPSPAEPHPPSSPSARLRIGRGGAGRTSKQRQQLEGEGEGERGGAEIH

SEQ ID NO: 60878 - protein, 77 aa, Triticum aestivum
  peptide (1)..(77): Ceres Seq. ID no. 13589002
MIAAVRISASSLAKLHQRYDRGIAMARQIACPSTYPHRGGTSCASRYSERTPPMATKATFRREGCLVIAAHTVHRRS

SEQ ID NO: 60879 - DNA, 1142 bp, Triticum aestivum
  misc_feature (1)..(1142): Ceres Seq. ID no. 13596346
atcctttcccccctccagttcccactttattgtgtttaaacactataacattcatcagtctacaaccacattgccataacagatgcgtaaggtgaacatcagcaggtctcggaggagaacactctaatgtcgaggaggagacaaacaagcccccagtccataaaacaaggtgcttcaacacagttcacggaatttcatatgacatcaatcaggttgacgcagaaggggcctcggccatctcttgctcgacaggagccgcctggactgggtagtagtggtagtgcagctctccaacatcatctccagacaacttcttccagccgtcagggccaacatagtagacactaacacagccaccactagctccgtcacggaatgttgcgtggtaaatagcccgccgagctaactcagcagcttcctcaactgacatgttgaatttgtaaccctcgtccaagataccataagcatatagagagccagaaccaacagagaatcggcttcccttgagccttgcaccctcgctatcaacatagtacaagcccggaccagtttcatcaaatccagcaatcatggtaccgattgaaagtcccatcccgcggtatgaataaaggatattagccaacgtctttgaagaaccagcaatggagatcctccgcttgttcgcgagctcatggagccggcacttgacccccaagtttctatgccaaaattggcaatcagcagcacctccagccatggttcccagcatgtagggattaatctcgatgattttcctcacagtttgcgaagatatgtagccgcccatgctggcccgggagtcggcggcgacgatgacgcccttgtcgaagatgaaggagagcgtggtggtccccttcttgttgttcaccatctccttggtcgccttctggaacccatcgaagtcgttgcaggtggggaactcgagggcgagctggtcggcggcgtcggcggagaagaggccggcgaagtcgtcgctgccggcggcggcggcgccgaagtggttctcgagggcggagaggttgggaatcatggcgtcgtcggcgggtgtgggggtgcggcgaggcggaggcggaggcgatgaagtgagcttttcctctctttcgacccacggacttttcctcttc

SEQ ID NO: 60880 - protein, 142 aa, Triticum aestivum; identical to SEQ ID NO: 51132
  peptide (1)..(142): Ceres Seq. ID no. 13596347

SEQ ID NO: 60881 - protein, 132 aa, Triticum aestivum; identical to SEQ ID NO: 51133
  peptide (1)..(132): Ceres Seq. ID no. 13596348

SEQ ID NO: 60882 - protein, 113 aa, Triticum aestivum
  peptide (1)..(113): Ceres Seq. ID no. 13596349
MLARESAATMTPLSKMKESVVVPFLLFTISLVAFWNPSKSLQVGNSRASWSAASAEKRPAKSSLPAAAAPKWFSRAERLGIMASSAGVGVRRGGGGGDEVSFSSLSTHGLFLF

SEQ ID NO: 60883 - DNA, 478 bp, Triticum aestivum
  misc_feature (1)..(478): Ceres Seq. ID no. 13589012
ctgaatctaggttttctttcctcttccccaccctggggaaagtagggttcgacgggaacaatcgaacttggcgagagctggtgagatggagacggagacgatggaggctggaagaaagagagagcgtctgatggagacggcgaaatcggggagaaagcgggcggggaaaaagaaggcgtcgaatgcggtgtcgttttttatgcaattgacggttgattcagcgaagatggtcgaagagggaaggctgaagcgagcggtggcgaggcggaacgaggagaactccggcgtggcgccgatcgtgccggaggcgctcacggagcaggagcgggcggcgctgctgcaggaagagatggcgagggagaagatattgtcgcgcgagcgctccctgcagatgcacgcggagagactaagggaaaaagaggagaggccccgggcgccgccgggtccgaaccaagaagacgagtctgaacaggattac

SEQ ID NO: 60884 - protein, 131 aa, Triticum aestivum
  peptide (1)..(131): Ceres Seq. ID no. 13589013
METETMEAGRKRERLMETAKSGRKRAGKKKASNAVSFFMQLTVDSAKMVEEGRLKRAVARRNEENSGVAPIVPEALTEQERAALLQEEMAREKILSRERSLQMHAERLREKEERPRAPPGPNQEDESEQDY

SEQ ID NO: 60885 - protein, 126 aa, Triticum aestivum
  peptide (1)..(126): Ceres Seq. ID no. 13589014
MEAGRKRERLMETAKSGRKRAGKKKASNAVSFFMQLTVDSAKMVEEGRLKRAVARRNEENSGVAPIVPEALTEQERAALLQEEMAREKILSRERSLQMHAERLREKEERPRAPPGPNQEDESEQDY

SEQ ID NO: 60886 - protein, 116 aa, Triticum aestivum
  peptide (1)..(116): Ceres Seq. ID no. 13589015
METAKSGRKRAGKKKASNAVSFFMQLTVDSAKMVEEGRLKRAVARRNEENSGVAPIVPEALTEQERAALLQEEMAREKILSRERSLQMHAERLREKEERPRAPPGPNQEDESEQDY

SEQ ID NO: 60887 - DNA, 1131 bp, Triticum aestivum
  misc_feature (1)..(1131): Ceres Seq. ID no. 12614713
agccaaaaccagtctcccactaattacggaaaaccacggttacgaatagctagagttgttcgagactgccaagataagtcaacaagaatgtcacagatagatttattcgcaatttacaggcgatgacatccgtaggttcagtttggccagcctcccaaatagcatgcttgcatagagggatgaggaagatgacatcttcaaatgcgagacaagcaagccttgtagtagggtatgacatctgcttctgcgcgggagagagcaaccaaaggagtaacagtaatatatccatctgcaagggatttgtagtccatgtcctccccttcctcttcatcataacttctctttactatcactcttttaaacagtaggtcattcgccgatgaagtgtctatatctctgtccttttcaccgtcaatatccatgcttgccgtctggtaactttctacagaaggcttttggtagactgtttgctcccatccaattctggccatatattttccttgctttgtaattttgtatcccttgtggtgtgcagcatcagatggcacatctatattcaggaatgatcctttagggtaggttccactcttgatctcgaccatgacagcatttatcagagggatacaaacctctgcagccactttgaggtcattaacactgctctgaccagcaacccaattgtatgacatagataatgcaggaatcccgtatataaatgcctccctagcaccagcaactgttccagaatatacaacatgtaatccacaattattgccaatgttgattccgctaagcaccaaatcaggaaccaaaccatcaaagagcttcccagagatgcctaaagaggcacagtcagcgggagttcctgaaactccaaatgctgtagcaccattgatattgacacgtttacagcgaagtgcagaacgccatgtaatgcagtggctaacgcccgacctgtctgtgtcgggcgcgcagacgaggacgcggtagcgcccctgggcgacgagctggtcgacgaggaagcggagccccggcgcgtcgatgccgtcgtcgttcgtcaccatcaccaccggcgccgccgccgcggccgccgtggaggccatggaggcaagagccgtgtacgggcgcggg

SEQ ID NO: 60888 - protein, 81 aa, Triticum aestivum
  peptide (1)..(81): Ceres Seq. ID no. 12614714
MTSVGSVWPASQIACLHRGMRKMTSSNARQASLVVGYDICFCAGESNQRSNSNISICKGFVVHVLPFLFIITSLYYHSFKQ

SEQ ID NO: 60889 - protein, 70 aa, Triticum aestivum
  peptide (1)..(70): Ceres Seq. ID no. 12614715
MLIPLSTKSGTKPSKSFPEMPKEAQSAGVPETPNAVAPLILTRLQRSAERHVMQWLTPDLSVSGAQTRTR

SEQ ID NO: 60890 - protein, 62 aa, Triticum aestivum
  peptide (1)..(62): Ceres Seq. ID no. 12614716
MRKMTSSNARQASLVVGYDICFCAGESNQRSNSNISICKGFVVHVLPFLFIITSLYYHSFKQ

SEQ ID NO: 60891 - DNA, 1715 bp, Triticum aestivum
  misc_feature (1)..(1715): Ceres Seq. ID no. 12614112
ggatacgaacggcattggatctttcccaggtagcaggtacaatatcgaatcgaattatttacgacagcgacgcggtacggatcgagtcctctcgtctcgtctgtcgatttggattgcagcaccatgcagtgcatgcaagccggcctgccggctggctagttgccggcgagggcgacctgcccggcgacgaacgccctgaggttcctctcggacgagccgcccacggcagccgccgcccgcgccttctccctccacagcgccgccttggcgcgcaccacatccgacgtggcgaagccgacgcatctctgcagctcgtcggcctccagcacgccgtccttctcgctcacggcggccctgaccccggtgccgagctgccgctccaccagccacgcgttggtgccctggtccgtccactgcggcactcccaccaccggcacgccgcacgccacgctctccagcgtcgagttccacccgcagtgcgtcacgaagcaacccaccgccgggtgcgacagcaccttcccctggtcgcaccactccaccaccatgcccccgccggtgcacaagtcgtcgccgtcgacctcgccgcggttatccttcctcagcacccacaggaacgggcggccgatctccgccatgccgcgcgacacctccgtgatctgccgcttgctcatcgtcgacaggctcccgaaggagatgtagacgaccgaccccgcttcctgcgcgtccagccactccaggtaccccttgccgtcctgcttgaacaggtcgttgctgtcgttggccgccgccgctgccgaggcgtccaggaaggagaggacggggcctatggggacgacgttgatgccgtgctggtgcagcgtcgccaccgcgtcgggctccatggcatcgaacgtgttggcgagcacggtgggcgagtcctcgcggtccagcacgtcgagcagctcacggaacgcggcgagcacaaaggagtaggggtggtcgtcggacgcgatggtgaggaacgacggcaggtcgcgcaggcgcatcggcgggagcccccggacgcggacgtccgcccacgggtcgctcgctgcggcggtgacggcctggtcgaggccgtcagtgccgcggaagaagtggaagtaggcggcgagcacggaggccggctggatccagtagagcgcggcggggacgccgtgcgcgtgcgcgacgtcggcgacccaggagaggagcaccgtgtacaccacctgagtgacgggggtgccggcgtcgcggaggcgcgcgagcacgccgtccagcgtgcgggcccccacgaccttgaggttggacatgtagtgcatgctgtcgtgcgcggacctgtcgaagccgccgtcgtagccgtcggagtagggcacgtagcggacgccggcgccgtcgacgtggtccactgccgccgcgtccgcgtcgtccgggaacatcttgcggcaggcggagacggcggtggagacggtgacgcgggcgcccagcgcggcgcggagcaggcgcagcgcgaggtggcgcgccgggttgatgtggccctgtgccgggtacgtgaccacgaggaagtgcggcgcctcctcccccgcgcgctccatggccggcattgccgcgtgcgtgcgtgcgatgcgagtgcaagaagccaagagccaagaagccaagagcgtactaggtaagcaagagtgtccttgctggggtgggttgcggcgcgtggtggatgt

SEQ ID NO: 60892 - protein, 555 aa, Triticum aestivum
  peptide (1)..(555): Ceres Seq. ID no. 12614113
IRTALDLSQVAGTISNRIIYDSDAVRIESSRLVCRFGLQHHAVHASRPAGWLVAGEGDLPGDERPEVPLGRAAHGSRRPRLLPPQRRLGAHHIRRGEADASLQLVGLQHAVLLAHGGPDPGAELPLHQPRVGALVRPLRHSHHRHAARHALQRRVPPAVRHEATHRRVRQHLPLVAPLHHHAPAGAQVVAVDLAAVILPQHPQERAADLRHAARHLRDLPLAHRRQAPEGDVDDRPRFLRVQPLQVPLAVLLEQVVAVVGRRRCRGVQEGEDGAYGDDVDAVLVQRRHRVGLHGIERVGEHGGRVLAVQHVEQLTERGEHKGVGVVVGRDGEERRQVAQAHRREPPDADVRPRVARCGGDGLVEAVSAAEEVEVGGEHGGRLDPVERGGDAVRVRDVGDPGEEHRVHHLSDGGAGVAEAREHAVQRAGPHDLEVGHVVHAVVRGPVEAAVVAVGVGHVADAGAVDVVHCRRVRVVREHLAAGGDGGGDGDAGAQRGAEQAQREVARRVDVALCRVRDHEEVRRLLPRALHGRHCRVRACDASARSQEPRSQERTR

SEQ ID NO: 60893 - DNA, 1212 bp, Triticum aestivum
  misc_feature (1)..(1212): Ceres Seq. ID no. 12614805
caaccacaagcccaactgcacggcgagcgggattggatcagtcagtagcggcgctagagagaggtaacagagggattggattggtggctggcactttgatttgcttagcgcgcgacgaagcaagctaagcgagcgcgatggtggtgctcatggagtacgcccccggcgtcggcgcgaccatgaagaggaagggagaggaggagccggggctgttcgcgttccccgatgacggcgacggcggcagcgttccggtttcctgccgtgccaccaagatgaggcgtctggagggtgccggcgccggccacgatgtgccggcggcagcggccgttgagacggagggcgacgtaatgatggcggaggagccgccggcgccgtccctcggggccgtggaaggggaaaagagggctgtggtggtgtacggcccggcagtcgacgccgcgtgcactggtggccggctcggccttctcggccaatggcggctccgcccgtgggcgcccctgagcgccggcgccgagtggatccgtgacatgctgcgcgaggcggatggccgcacggtgcgggcggtgctgtccagcgctcaggaagggggcggcgccgacctggccctggtcccttggggcgccgcacacgtgccggcagaggcgaatcaggcgtccacggccgcggagacggtggacggggaagaggacgccgagggaacggcagcgatggacgtcgaagaggagagggaccatcatcaggcccaggcggtcggggccggctgcggtgaggggtacttgtgccggtggccgcagcactgtatggcgccgcctccgttgccggcggttcgccaggcgaccccggctgtgtggtcgtggtgaaccgcgcgtggctggacgactacgaccgacggaattgatatgttcctctttgccgatgcgtgtcgcgtcgatttgtgtttgtggtgtccagttcgtcgaaatcagagcaagatcatctcttttctgacggaaagaccttcctgcccagctttattaaaattcaaataatgctaagaatgaaatctggatctggtggtgcctccaccattcaaaccgtgttgacactactcactagctagctcagggctgcaagaaaagcacgaggctcgtgagccgactcgcattttgactcgactcgaaaaaaataagctaaatataaacattttcttttttcaaaaaaaatttgtttatt

SEQ ID NO: 60894 - protein, 240 aa, Triticum aestivum
  peptide (1)..(240): Ceres Seq. ID no. 12614806
MVVLMEYAPGVGATMKRKGEEEPGLFAFPDDGDGGSVPVSCRATKMRRLEGAGAGHDVPAAAAVETEGDVMMAEEPPAPSLGAVEGEKRAVVVYGPAVDAACTGGRLGLLGQWRLRPWAPLSAGAEWIRDMLREADGRTVRAVLSSAQEGGGADLALVPWGAAHVPAEANQASTAAETVDGEEDAEGTAAMDVEEERDHHQAQAVGAGCGEGYLCRWPQHCMAPPPLPAVRQATPAVWSW

SEQ ID NO: 60895 - protein, 236 aa, Triticum aestivum
  peptide (1)..(236): Ceres Seq. ID no. 12614807
MEYAPGVGATMKRKGEEEPGLFAFPDDGDGGSVPVSCRATKMRRLEGAGAGHDVPAAAAVETEGDVMMAEEPPAPSLGAVEGEKRAVVVYGPAVDAACTGGRLGLLGQWRLRPWAPLSAGAEWIRDMLREADGRTVRAVLSSAQEGGGADLALVPWGAAHVPAEANQASTAAETVDGEEDAEGTAAMDVEEERDHHQAQAVGAGCGEGYLCRWPQHCMAPPPLPAVRQATPAVWSW

SEQ ID NO: 60896 - protein, 226 aa, Triticum aestivum
  peptide (1)..(226): Ceres Seq. ID no. 12614808
MKRKGEEEPGLFAFPDDGDGGSVPVSCRATKMRRLEGAGAGHDVPAAAAVETEGDVMMAEEPPAPSLGAVEGEKRAVVVYGPAVDAACTGGRLGLLGQWRLRPWAPLSAGAEWIRDMLREADGRTVRAVLSSAQEGGGADLALVPWGAAHVPAEANQASTAAETVDGEEDAEGTAAMDVEEERDHHQAQAVGAGCGEGYLCRWPQHCMAPPPLPAVRQATPAVWSW

SEQ ID NO: 60897 - DNA, 876 bp, Triticum aestivum
  misc_feature (1)..(876): Ceres Seq. ID no. 13596720
ggcattcctggtagttttgcatctagcattgtactatacacactgggagatatttacagtctatttcccaatttgtttgttctttcccgcctaaatctacaaaaatcaatttaatactattggcctaggccgtttggcctcaggaattaagaatggttccaaaattgaaggaacaaaaaaaatgaacaacactatctttctcttgtagaaatgctcgagtcagtcagcagcctcctggatgatgctcagagcccgcttcagcctcagccgcgaccgcggggcgagcttcccgttgctcttcttcgccggactcaccgacaccgcgaactccccgagcgtccgctcgttaagcttctcgttgaacatgacgtcctcgcggtcttccacctgatcctcgtgcaccggcacgacgcgcaggttcttggtcttgccgccgcgccgctcaggcctcttggcggcgatcgcggcactcgcccgcacggcgagcgcggccatgtcggcgctcgagagcggccgccccagctccgcggcagggagcaggaagtatatttgtcccggccggaggagctcgtcggaggccagcgccggtgggggctcgttgaagtagagcgcgtcggagttgcacacgaagaaggaggcggcctcgccggagagaacgtcggagacggcgactcgggggctggccgggagctccttcagcgagccgtcggcggcgatgaccctgaccggtcccggatggtgtggctgctgcgagagggtgcatcggtgggtggaaaagcaggaaaccttggcgcccatggaatctttgcaggtgtgctgtgcgtggaagtgtgagactgagatttttctgtcgagttcgttggagctttggatgtt

SEQ ID NO: 60898 - protein, 207 aa, Triticum aestivum
  peptide (1)..(207): Ceres Seq. ID no. 13596721
MLESVSSLLDDAQSPLQPQPRPRGELPVALLRRTHRHRELPERPLVKLLVEHDVLAVFHLILVHRHDAQVLGLAAAPLRPLGGDRGTRPHGERGHVGARERPPQLRGREQEVYLSRPEELVGGQRRWGLVEVERVGVAHEEGGGLAGENVGDGDSGAGRELLQRAVGGDDPDRSRMVWLLREGASVGGKAGNLGAHGIFAGVLCVEV

SEQ ID NO: 60899 - DNA, 1151 bp, Triticum aestivum
  misc_feature (1)..(1151): Ceres Seq. ID no. 13598427
aacaaacaacatatgctttttgtctagatctgaatactttgtttacatcctttacatgctgttcttcctccaaagcgttggttatagggagaagtccaaaggaaaaaactactgtgattaggaggaccgcggaccgaggcgtagcatcacccagagagtcagtctaggtccacctccaaatgagccagtaatcacaactgcatatcacctttgttcatctcccacagacacaatgcacagacagcagggaagcttcagcactaagcacatcttatcaccttgaaaccgagggagctctagagctcactataatttcgccaaactgctcggaattcctctctgaacgtattcagacgtgctttcaaattaggtgttctgaagctggcatgaagtaccgttgtaagcagagcaatgagaagagcccatagaactgtgaggaggctgcatgaggtcaaccagagcatgcagctaactgccgaaaataaaaggacaaacaaccagcgaggccgcccacaaatatgaattgatctctttgagcttggtcgaccacgaataacaggggttatcggtggtctcatctttgcagctaaatgtggtgagaactgcctgacagttcttgtgactttctcattaaaagtgacagcaaaactgtcattaagaaaagcaatgctgaatccagtcataaaagctgcaagaatagcaactggcttccaaaggaaacccaacccaagaatgaacatgatcaagatgaaatagtttgtcctgtagtagtagaggttgcacttgaggcggctggtccacttggagtaggagcgggggacggtgaagcgggagaagaactccgggacggggcgcggcggcgtggaccagtccacctcccgcagcgcggccaccaggtcctccgccgtcaccgcgctccagtccatcgccgatccaatccgccccgatgcctcggctagcgggcgaaccgaaacctggcggtcggtcgggcgggcgggcgggtgagacgggcggcgggtctcggcggggacgggggctgttgggtcgtgcgggagagagtttcctcggcttcgcttcgatttggggattttgggaaggaagctttgccgtgtccggagaggaggaggagaggagaggtcagaggacagcag

SEQ ID NO: 60900 - protein, 68 aa, Triticum aestivum
  peptide (1)..(68): Ceres Seq. ID no. 13598428
MPRLAGEPKPGGRSGGRAGETGGGSRRGRGLLGRAGESFLGFASIWGFWEGSFAVSGEEEERRGQRTA

SEQ ID NO: 60901 - protein, 54 aa, Triticum aestivum
  peptide (1)..(54): Ceres Seq. ID no. 13598429
QTTYAFCLDLNTLFTSFTCCSSSKALVIGRSPKEKTTVIRRTADRGVASPRESV

SEQ ID NO: 60902 - protein, 39 aa, Triticum aestivum
  peptide (1)..(39): Ceres Seq. ID no. 13598430
TNNICFLSRSEYFVYILYMLFFLQSVGYREKSKGKNYCD

SEQ ID NO: 60903 - DNA, 780 bp, Triticum aestivum
  misc_feature (1)..(780): Ceres Seq. ID no. 13596994
gatttctctcccacttccaccaccaccgccatggccgccgccccccatatccgccgtgcggccgccactcctctccggcgagccgccgcctccgtctgcaccaggcctcttgcccaactctgccaccgcgcctcgtcccacaccactcgccgccccctctgtgacggggcgcctgcacagatcccacccaagatccggcgtgagatcaccagggtcgagttggccggcatttccttccaccgtgagctcgccaaggagcttaggcagctcagcatgagggttacccgaggccaaggtgcggcgagggtgaacacggcggacgccgccatgcaggtcggggtggtttcgtggcgtgtctgcgcagccgtggttgccgtgacggtggcagcggggctcgggctagcgcaggtcgccaaggaccgctgggaggccgattgccaattggccgcctgtaaccttgtcaccgcaaagctggacaaattgggcaaagatctggaggattgcttggtccggtgcatccagcagaagaaggcaacggcggacgcaaatgcgtttcttgaggagcagaggcacaaggaggtctttgcaagggaggcggagctcgccctttgggagtctgagataatcaagagagagtccaagtaaatgtgttcggttgcaggaaatattgtagtatgatagtagtgtgctgaatgtactagtaagtaagtattgtgacatctacagccgattgatttcgattctgctagcttgggcttcaagtttgtgcggagaccatcc

SEQ ID NO: 60904 - protein, 214 aa, Triticum aestivum
  peptide (1)..(214): Ceres Seq. ID no. 13596995
DFSPTSTTTAMAAAPHIRRAAATPLRRAAASVCTRPLAQLCHRASSHTTRRPLCDGAPAQIPPKIRREITRVELAGISFHRELAKELRQLSMRVTRGQGAARVNTADAAMQVGVVSWRVCAAVVAVTVAAGLGLAQVAKDRWEADCQLAACNLVTAKLDKLGKDLEDCLVRCIQQKKATADANAFLEEQRHKEVFAREAELALWESEIIKRESK

SEQ ID NO: 60905 - protein, 204 aa, Triticum aestivum
  peptide (1)..(204): Ceres Seq. ID no. 13596996
MAAAPHIRRAAATPLRRAAASVCTRPLAQLCHRASSHTTRRPLCDGAPAQIPPKIRREITRVELAGISFHRELAKELRQLSMRVTRGQGAARVNTADAAMQVGVVSWRVCAAVVAVTVAAGLGLAQVAKDRWEADCQLAACNLVTAKLDKLGKDLEDCLVRCIQQKKATADANAFLEEQRHKEVFAREAELALWESEIIKRESK

SEQ ID NO: 60906 - protein, 123 aa, Triticum aestivum
  peptide (1)..(123): Ceres Seq. ID no. 13596997
MRVTRGQGAARVNTADAAMQVGVVSWRVCAAVVAVTVAAGLGLAQVAKDRWEADCQLAACNLVTAKLDKLGKDLEDCLVRCIQQKKATADANAFLEEQRHKEVFAREAELALWESEIIKRESK

SEQ ID NO: 60907 - DNA, 1274 bp, Triticum aestivum
  misc_feature (1)..(1274): Ceres Seq. ID no. 13585458
gtagtaacaatatactttcgattaatatcaccgccttgaatgatatataaattataaaaggcaagagtgggcgggagagcgtatcttgtacgcctgcctcctccatttcccacacagccttttcccatttgccaatacacgactcatcacagccctagagacccagacccacacccagccaaacttttctcacctagaaagacgcaccgacaccacacacacccccaccacccgatacagtttacaacgactcaaggcaaacgaccgtacactcccaatgactgaccgactcacttgaccgtagcagctagccgcgtagtagcattaccagtactccgattggcaacggaatcatggtgggttcagctgtactgcacgaaggagcggtagaaggtgttgggcctccagttggccgggatgaccttgttggcgacgagcgtcttgccggactcgttgcggatgcggatggagaagggcgcctggaggcggtggttggagtcgaggcgccacacggagccccacgactccctcatcctcgtccacttgccgccgcccggcccccgcgactccatgaggtccacctgcaccacgtcgccgtcgccgtcctcgtactccaccagcaccgcgaagtagacggggttcgagtactcctccacgtggaacccgatcttcagccccgggaactcacacggcacccgtgtgaactcgatgtcgatgatgccggagtggcggagcctgtcgttgaggccgggcttggcgagcctgccgaacgccgtgccgctgaggtcgaagtggaagggcgccaccgggtagtagttcatgtcggtgatgatcaccgtctccgtcctgccggagcaggacatgtccttcctgcatctgatcttgtagcatgagccgcaccccttgccgtccttgaacaatggctggttgccgcaggaggtcatggacgcgaacgggtactggttggtgtgcttgaagccgcaggcaccgccgttgtcgtcggggccggcgccgttgggctggccgtaccaagtcgccctggccggggtccaggggccccagtacttggtggcgtcggtggcgttcaggtcgacgtcgaagggggaggggtcggtggtgttgaggtccacggcgccgccgacggcgaggaagcagagaagcgccgcgagcacggcgagggaggggagggggagggagcccatgccgcgcgctgtggcgtgtggatctgacgagtggcggtggggagtgagtgatggtgtgctcggttcctgtgt

SEQ ID NO: 60908 - protein, 179 aa, Triticum aestivum
  peptide (1)..(179): Ceres Seq. ID no. 13585459
MVGSAVLHEGAVEGVGPPVGRDDLVGDERLAGLVADADGEGRLEAVVGVEAPHGAPRLPHPRPLAAARPPRLHEVHLHHVAVAVLVLHQHREVDGVRVLLHVEPDLQPRELTRHPCELDVDDAGVAEPVVEAGLGEPAERRAAEVEVEGRHRVVVHVGDDHRLRPAGAGHVLPASDLVA

SEQ ID NO: 60909 - protein, 110 aa, Triticum aestivum
  peptide (1)..(110): Ceres Seq. ID no. 13585460
MDANGYWLVCLKPQAPPLSSGPAPLGWPYQVALAGVQGPQYLVASVAFRSTSKGEGSVVLRSTAPPTARKQRSAASTAREGRGREPMPRAVACGSDEWRWGVSDGVLGSC

SEQ ID NO: 60910 - DNA, 1336 bp, Triticum aestivum
  misc_feature (1)..(1336): Ceres Seq. ID no. 13656613
atattttagcccgtatgtcccatccatcccatcatgcgccgccacccactcaaatctctcgggatccattccccaacccaagaagcctctgaccccctcctggttttcagcgcagccgcacctgatcccctctcctccctccatggagtcgtcatagccggcgaacccagccaccaggatcggcctcctccctgtccttcctcctccttcccgaggtttcttctcctctaacctctctctccctcccgttcctctcgcaggagctcgccgccgctgccgtggatttggaggagcgccgccatcgagcttagtccgcggccaccgttgcccggatccagcaatggccgacctgtttcacacgtttctctgcccgccggacctccctgcgtgctgctcccgtcccaggccgccaagccacgccatggatgccaccaccaggaccttcgcctgtgctgccgccatggattggatttggccggagcggctcatccgcctcacctcccgtcctctgctaccttcctcgctcggatccgagccgtcccggagtcccctcgccggagtccttctccatgacgctaggctgcactgcctccgccttggtgcacctttcccctgccgcttcctgctcatggccgcctccaacctctccaacggcgcctcgacctcgccaccacgtcgttgctccggccaactccggcaagccgccggcgatctggccacccaggacgcccctgcctccttcctcgttgtcgctgagttcccctgcttcgtgcctctgctcgcaccgctgccagatcgagcgagcgaggagagcgctcacgttgacccttccccgattggaccaatgcagaccgacccagcgcgcctcctcccgtgccagatcgcagcccaaccggtccacctcaccatcgactgggccttggccttggttggatccggtaacgtcgcgtttgtgaggacccgttctactatgtccgtttgtcttcttcatgaactcgttcttcttccttgcgggatttcagcttgcaggtgccgacgataccatgcaggtgacgcaaccaagctcaaggaggagctctttgaagatcttgtcctttgtgttgtttcgttctagtcgatcagtaatggagcccagttggggtcgatcggggatctgtgtagcatttggggtagtcttcttttattttggctccgtagtcgggccttgattgtaactggttgatgtaatgctttattcatgtattgtgtgaagtggcgattgtaagccaactatgtatctctttcccttatgtattacatgggttgtgtgaagcacaataaagtgggaacgggaggg

SEQ ID NO: 60911 - protein, 257 aa, Triticum aestivum
  peptide (1)..(257): Ceres Seq. ID no. 15219836
MADLFHTFLCPPDLPACCSRPRPPSHAMDATTRTFACAAAMDWIWPERLIRLTSRPLLPSSLGSEPSRSPLAGVLLHDARLHCLRLGAPFPCRFLLMAASNLSNGASTSPPRRCSGQLRQAAGDLATQDAPASFLVVAEFPCFVPLLAPLPDRASEESAHVDPSPIGPMQTDPARLLPCQIAAQPVHLTIDWALALVGSGNVAFVRTRSTMSVCLLHELVLLPCGISACRCRRYHAGDATKLKEELFEDLVLCVVSF

SEQ ID NO: 60912 - protein, 230 aa, Triticum aestivum
  peptide (1)..(230): Ceres Seq. ID no. 15219837
MDATTRTFACAAAMDWIWPERLIRLTSRPLLPSSLGSEPSRSPLAGVLLHDARLHCLRLGAPFPCRFLLMAASNLSNGASTSPPRRCSGQLRQAAGDLATQDAPASFLVVAEFPCFVPLLAPLPDRASEESAHVDPSPIGPMQTDPARLLPCQIAAQPVHLTIDWALALVGSGNVAFVRTRSTMSVCLLHELVLLPCGISACRCRRYHAGDATKLKEELFEDLVLCVVSF

SEQ ID NO: 60913 - protein, 217 aa, Triticum aestivum
  peptide (1)..(217): Ceres Seq. ID no. 15219838
MDWIWPERLIRLTSRPLLPSSLGSEPSRSPLAGVLLHDARLHCLRLGAPFPCRFLLMAASNLSNGASTSPPRRCSGQLRQAAGDLATQDAPASFLVVAEFPCFVPLLAPLPDRASEESAHVDPSPIGPMQTDPARLLPCQIAAQPVHLTIDWALALVGSGNVAFVRTRSTMSVCLLHELVLLPCGISACRCRRYHAGDATKLKEELFEDLVLCVVSF

SEQ ID NO: 60914 - DNA, 248 bp, Triticum aestivum
  misc_feature (1)..(248): Ceres Seq. ID no. 13656401
aatccctttccccgtttcactgccactgcctccgcccgtctgacgactcctgacggccggacctgccggcggccggccagaggcgccgccgccgccgccgctgcaagcgcctccggaatgcctccagggaagagacacgggagcgcgccgccgccggtgcgcggcgcggaccgcatcggcgcgctgcccgaccccatcctgcagcacgtcctctccttcctcccggcgcaggcggccgkgcggacgtg

SEQ ID NO: 60915 - protein, 82 aa, Triticum aestivum
  peptide (1)..(82): Ceres Seq. ID no. 13656402
  misc_feature (80)..(80): Xaa is any aa, unknown or other
NPFPRFTATASARLTTPDGRTCRRPARGAAAAAAASASGMPPGKRHGSAPPPVRGADRIGALPDPILQHVLSFLPAQAAXRT

SEQ ID NO: 60916 - protein, 43 aa, Triticum aestivum
  peptide (1)..(43): Ceres Seq. ID no. 13656403
  misc_feature (41)..(41): Xaa is any aa, unknown or other
MPPGKRHGSAPPPVRGADRIGALPDPILQHVLSFLPAQAAXRT

SEQ ID NO: 60917 - DNA, 1487 bp, Triticum aestivum
  misc_feature (1)..(1487): Ceres Seq. ID no. 15175739
cctgtaaaatcttcaaggcgccatttatgcgtgcccccttctatttaatctttagtggacccacaaccggtatataatctttttggcagcatcgtccattcaggtttctcccaagattctggtcattactatgcatatgttaaggatgctactggtcgctggtactgttgtaatgattctcaggtctccctctcaagatctcaggacgttttgactgagaagttaaatcttccaacaccaatgggaatggcatatcaagtgccgcatgtagtgagcccctgaagataccattagtgaagcagaacggctcatgctctactaaaggtattgtgccactacccctaaagaatggcaagattgcaccaggtctacagttcaagccgatccacttgaagaatacaggaacagagaaggttgcatcaaatggcaaaccgcaccccgttttgagaaagccagaagttaatgaagccacagcactagtggaatcgaacggatgcggacccgcaaaatctgcagaacccagtgaagggtatgctaatggtagtatttcctgcgataagttggacgctgattcacaaagaatgttgcaaggcacagatggaaatggacatccagttcattttgttggcctccaagagaccagtggtgccaaggccacgtgtgctgaaaacccccctgaacagccatctagtgttgttacctcaacattggacaagagcatttgtagttcagaaaagggtcctaaaagctcagttttacaccctgaagtatctgctgactcagtcaaagcagtggtggcttcagccaaggacagtgcatgcttgaagcatcatcttgaagaaggaaagtttaaggaaatgcttgctgaatcagcatcttctgagcttcggtcgtctggttgggcggatgatgtatgtaattttatgcgttctgcaaagaggcagtgtatacagaacacaggcatgtctcaagatagtgaggcaatcaggaagcagctaataagtgattctggaagagtatttaggtccaaaattccagagttactgcgggaagatctgattcaatccctgagatcatacttcgaggataaattttgactggatgcttaagcttgtgtgggccttgtttaaaaggtgccagtggtctactaggaagctcatgcacggctggcttatttttgaggcgtttttgttccctgagatgagatgaggttgagaagtagagcgacgtgtaaagcttgcctcctttttgctgttgttccccatgctatactgtaggcttgaaaccccacaatcagcaccccctttcttctgtttctagcatgtagcagcatactgtttcttgttttcccccctttgtacaattataagtggtagacccctttgtacgattataactggtagattagctcatgaatttcttgggttttgacctgatctcaaaataaacctgttgatggttttaattatatatgatcggttacttac

SEQ ID NO: 60918 - protein, 171 aa, Triticum aestivum
  peptide (1)..(171): Ceres Seq. ID no. 15175740
MLQGTDGNGHPVHFVGLQETSGAKATCAENPPEQPSSVVTSTLDKSICSSEKGPKSSVLHPEVSADSVKAVVASAKDSACLKHHLEEGKFKEMLAESASSELRSSGWADDVCNFMRSAKRQCIQNTGMSQDSEAIRKQLISDSGRVFRSKIPELLREDLIQSLRSYFEDKF

SEQ ID NO: 60919 - protein, 97 aa, Triticum aestivum
  peptide (1)..(97): Ceres Seq. ID no. 15175741
MLMVVFPAISWTLIHKECCKAQMEMDIQFILLASKRPVVPRPRVLKTPLNSHLVLLPQHWTRAFVVQKRVLKAQFYTLKYLLTQSKQWWLQPRTVHA

SEQ ID NO: 60920 - protein, 95 aa, Triticum aestivum
  peptide (1)..(95): Ceres Seq. ID no. 15175742
MVVFPAISWTLIHKECCKAQMEMDIQFILLASKRPVVPRPRVLKTPLNSHLVLLPQHWTRAFVVQKRVLKAQFYTLKYLLTQSKQWWLQPRTVHA

SEQ ID NO: 60921 - DNA, 1393 bp, Triticum aestivum
  misc_feature (1)..(1393): Ceres Seq. ID no. 13661015
aaaaataggctcgtggcaaatctggtctaccagtcgccccctcacccacccaacccgcccacggagaaaaatcccccaggaagaagaaattccacgctgctgccattccgacgatgcgccgcgccgccgtcgccgtcaccgccgcgctcctcctcctcctcgtcgccggcgcagctgcgggctcccccggcgcggagcccacctgcccgcggggcgccggcccgccgttcctcgacgcgctcggatcgcggtgcccccgcggcgcccggatcgtgccctccccgcccctcgaggtcagaggagatgctgttgataaagaattgaaccttcgctgtaccggtgcctcatgctccattctcttctatgccgcatggtgtcctttctcgagcaaatttcgaccaatatttgaagctctcagcaccatgttccctcagatacatcactttgctgtcgaagaatcttctgcgacgcctagtttgttttcaagatatggtgtccgtggcttcccagccattcttctggcaagtgagactacaatggttcgttacaggggcacaaaagatctgaagtctctggttcagttctatcaagagactacaggcctcgacccaattacatatattgatgttgatcagcaagagagcactggaagtttaggatcagccatgccaggaggccgctctctgcgcaaaatggcgaaagacgagccctttctgtttcttggagccctttttataatcatgaagatcgcggcacacttcgtccccactgtcatctcccaactgagagccttcttgattgtgcgtgttcagaacttgaacttaagaatctgtaggggatcaagccaacttatggaacgggcattgactgtgcttgatgttcagaggctctggagcaagcttagactgagcagtaagacaagggacctaagtaaaggggcgagtaatgctcgagcttgggcttcgtcgtttgcgtccgtctcactgggtgaaccatcctccttacggcatgcctagcctcttcctcatgatgctggtcgatagtctagctgctgatatatggcccaaaattgtttggtcttgcttccccatcctgctatgtacgtgcatccgcgcatgtggggacccaggaatgtaaattttcaggatctcatcttgttgtatataggaacgcgttttcgctttgctgacgcgatagctgatctctgacctttgtttcagttaactctttgatgtatggtgaagatctgagtatttcttcgatctctttcggttgctgttagaatttggctttgctatgtcgcccttgcctgcgccagcttaaatcctgggccgccgactcctgctctgaattgtaaaactgtcttgatttttattcacaccatgctgtttgg

SEQ ID NO: 60922 - protein, 300 aa, Triticum aestivum
  peptide (1)..(300): Ceres Seq. ID no. 13661016
  misc_feature (59)..(164): Homolog of NCBI NO: 15236643 NR Description: protein disulfide isomerase -related [Arabidopsis
  misc_feature (3)..(199): Homolog of NCBI NO: 6006856 NR Description: unknown protein [Arabidopsis thaliana]
  misc_feature (80)..(296): Homolog of NCBI NO: 18399435 NR Description: expressed protein [Arabidopsis thaliana]
  misc_feature (11)..(297): Homolog of NCBI NO: 29367467 NR Description: disulfide isomerase-like protein
  misc_feature (39)..(163): Homolog of NCBI NO: 9758894 NR Description: contains similarity to protein disulfide
  misc_feature (164)..(296): Homolog of NCBI NO: 9758894 NR Description: contains similarity to protein disulfide
  misc_feature (39)..(296): Homolog of NCBI NO: 18418521 NR Description: expressed protein [Arabidopsis thaliana]
  misc_feature (39)..(296): Homolog of NCBI NO: 21536613 NR Description: contains similarity to protein disulfide
  misc_feature (3)..(296): Homolog of NCBI NO: 18396691 NR Description: expressed protein [Arabidopsis thaliana]
  misc_feature (1)..(300): Homolog of NCBI NO: 30103009 NR Description: unknown protein [Oryza sativa (japonica
MRRAAVAVTAALLLLLVAGAAAGSPGAEPTCPRGAGPPFLDALGSRCPRGARIVPSPPLEVRGDAVDKELNLRCTGASCSILFYAAWCPFSSKFRPIFEALSTMFPQIHHFAVEESSATPSLFSRYGVRGFPAILLASETTMVRYRGTKDLKSLVQFYQETTGLDPITYIDVDQQESTGSLGSAMPGGRSLRKMAKDEPFLFLGALFIIMKIAAHFVPTVISQLRAFLIVRVQNLNLRICRGSSQLMERALTVLDVQRLWSKLRLSSKTRDLSKGASNARAWASSFASVSLGEPSSLRHA

SEQ ID NO: 60923 - protein, 197 aa, Triticum aestivum
  peptide (1)..(197): Ceres Seq. ID no. 13661017
  misc_feature (1)..(61): Homolog of NCBI NO: 15236643 NR Description: protein disulfide isomerase -related [Arabidopsis
  misc_feature (1)..(96): Homolog of NCBI NO: 6006856 NR Description: unknown protein [Arabidopsis thaliana]
  misc_feature (1)..(193): Homolog of NCBI NO: 18399435 NR Description: expressed protein [Arabidopsis thaliana]
  misc_feature (1)..(194): Homolog of NCBI NO: 29367467 NR Description: disulfide isomerase-like protein
  misc_feature (1)..(60): Homolog of NCBI NO: 9758894 NR Description: contains similarity to protein disulfide
  misc_feature (61)..(193): Homolog of NCBI NO: 9758894 NR Description: contains similarity to protein disulfide
  misc_feature (1)..(193): Homolog of NCBI NO: 18418521 NR Description: expressed protein [Arabidopsis thaliana]
  misc_feature (1)..(193): Homolog of NCBI NO: 21536613 NR Description: contains similarity to protein disulfide
  misc_feature (1)..(193): Homolog of NCBI NO: 18396691 NR Description: expressed protein [Arabidopsis thaliana]
  misc_feature (1)..(197): Homolog of NCBI NO: 30103009 NR Description: unknown protein [Oryza sativa (japonica
MFPQIHHFAVEESSATPSLFSRYGVRGFPAILLASETTMVRYRGTKDLKSLVQFYQETTGLDPITYIDVDQQESTGSLGSAMPGGRSLRKMAKDEPFLFLGALFIIMKIAAHFVPTVISQLRAFLIVRVQNLNLRICRGSSQLMERALTVLDVQRLWSKLRLSSKTRDLSKGASNARAWASSFASVSLGEPSSLRHA

SEQ ID NO: 60924 - protein, 159 aa, Triticum aestivum
  peptide (1)..(159): Ceres Seq. ID no. 13661018
  misc_feature (1)..(23): Homolog of NCBI NO: 15236643 NR Description: protein disulfide isomerase -related [Arabidopsis
  misc_feature (1)..(58): Homolog of NCBI NO: 6006856 NR Description: unknown protein [Arabidopsis thaliana]
  misc_feature (1)..(155): Homolog of NCBI NO: 18399435 NR Description: expressed protein [Arabidopsis thaliana]
  misc_feature (1)..(156): Homolog of NCBI NO: 29367467 NR Description: disulfide isomerase-like protein
  misc_feature (1)..(22): Homolog of NCBI NO: 9758894 NR Description: contains similarity to protein disulfide
  misc_feature (23)..(155): Homolog of NCBI NO: 9758894 NR Description: contains similarity to protein disulfide
  misc_feature (1)..(155): Homolog of NCBI NO: 18418521 NR Description: expressed protein [Arabidopsis thaliana]
  misc_feature (1)..(155): Homolog of NCBI NO: 21536613 NR Description: contains similarity to protein disulfide
  misc_feature (1)..(155): Homolog of NCBI NO: 18396691 NR Description: expressed protein [Arabidopsis thaliana]
  misc_feature (1)..(159): Homolog of NCBI NO: 30103009 NR Description: unknown protein [Oryza sativa (japonica
MVRYRGTKDLKSLVQFYQETTGLDPITYIDVDQQESTGSLGSAMPGGRSLRKMAKDEPFLFLGALFIIMKIAAHFVPTVISQLRAFLIVRVQNLNLRICRGSSQLMERALTVLDVQRLWSKLRLSSKTRDLSKGASNARAWASSFASVSLGEPSSLRHA

SEQ ID NO: 60925 - DNA, 1535 bp, Triticum aestivum
  misc_feature (1)..(1535): Ceres Seq. ID no. 12781104
tagtttctttataaaatactgctactccctctgatccatattagttgtcactcaaatggatgtatctagcactaaaatacatctagatacatccgtttcagctacaactaatatggatcggagggagtagtatatttttggtttacctgttttgctagaaatgttgcctcagatcgaatgaacttaaatatgagcaatatatgtgcacctatttctatcatatggtcttattaactttatctagtaaactagggcgtggtccttaagaagtcctttacttgttctattctaatttttgtttttccctgctaagcaggaagttctcttctgaacttcggatttagcttgtggatgggcggacctttggtagactgcagtgctgaaggtgtgagcagcagctcatgtctcagccgcagcacctgtggaaaagcaggttttgagcacagctcttgtgctctccctgaagatgaaaagtttgaagctggaatagcatgtgtgaaagatgatttggttgtcaaggaaatcagtttggctcttgctgaggtgatgcgtgtctataatgacaatgatgatgaagagacagatctgagtgaagactctgacgaaaatggggattcactttctgtagaatcagattcggctgatgatttggttgatattgacactgaagtggtcacatcgtcagccttcactgctgggaatgcgtctgaatcatcaactggaaattcagagaatggaaattcctcaaccactgggactcaactgttggtttccgcaatgaaaggaagccgtgcaaagcggggaattgtgacaaagttgagtgtttcatgggcccctgacgtatatgatcctcctgttacttctgactcacacacagtgaagccgcaccagagaagttcaaggaagagccactacaaatacaagcccccaaagggcggcagcggcagcagcagccgcagcagcagtggcagcataaaggaaaagaagcattctcaccacagcagcagcagcagcagcaagagagataagaaaccttcctaccgcagtagcaatggcggcagcagcagaaccgacactagtgatcctcaacatcggaaggcatatggcagcagcattaccagcagaactgacactagtgttcctgaatatcacaagttatcgccgtggcagccactggctagtgccgccgtggaagaagctatgccccccgtacctgtactgaaggccatggaacagatcaaacgcagttccagctgctgcaaggagccgccgataagcatgaaggccatggaacagatcaagcgtagctccagctgctgcaaggagccgccgataagcatgctatcacgccaattcgtggctgccaagtacaaagggatgttttccttcttgagtcagaaccaacttgcttcttgagcatatcgcggagactcctgcgctattcactgccgtgcttttggttatcagcaaggctttcatgttggatggtgtttgatctatgaacttttgtttggacatcagtgggcatggtttcg

SEQ ID NO: 60926 - protein, 354 aa, Triticum aestivum
  peptide (1)..(354): Ceres Seq. ID no. 12781105
  misc_feature (60)..(262): Homolog of NCBI NO: 28828184 NR Description: similar to Leishmania major. Ppg3 [Dictyostelium
  misc_feature (131)..(226): Homolog of NCBI NO: 15231857 NR Description: putative protein
  misc_feature (80)..(226): Homolog of NCBI NO: 30687157 NR Description: expressed protein [Arabidopsis thaliana]
MGGPLVDCSAEGVSSSSCLSRSTCGKAGFEHSSCALPEDEKFEAGIACVKDDLVVKEISLALAEVMRVYNDNDDEETDLSEDSDENGDSLSVESDSADDLVDIDTEVVTSSAFTAGNASESSTGNSENGNSSTTGTQLLVSAMKGSRAKRGIVTKLSVSWAPDVYDPPVTSDSHTVKPHQRSSRKSHYKYKPPKGGSGSSSRSSSGSIKEKKHSHHSSSSSSKRDKKPSYRSSNGGSSRTDTSDPQHRKAYGSSITSRTDTSVPEYHKLSPWQPLASAAVEEAMPPVPVLKAMEQIKRSSSCCKEPPISMKAMEQIKRSSSCCKEPPISMLSRQFVAAKYKGMFSFLSQNQLAS

SEQ ID NO: 60927 - protein, 289 aa, Triticum aestivum
  peptide (1)..(289): Ceres Seq. ID no. 12781106
  misc_feature (1)..(197): Homolog of NCBI NO: 28828184 NR Description: similar to Leishmania major. Ppg3 [Dictyostelium
  misc_feature (66)..(161): Homolog of NCBI NO: 15231857 NR Description: putative protein
  misc_feature (15)..(161): Homolog of NCBI NO: 30687157 NR Description: expressed protein [Arabidopsis thaliana]
MRVYNDNDDEETDLSEDSDENGDSLSVESDSADDLVDIDTEVVTSSAFTAGNASESSTGNSENGNSSTTGTQLLVSAMKGSRAKRGIVTKLSVSWAPDVYDPPVTSDSHTVKPHQRSSRKSHYKYKPPKGGSGSSSRSSSGSIKEKKHSHHSSSSSSKRDKKPSYRSSNGGSSRTDTSDPQHRKAYGSSITSRTDTSVPEYHKLSPWQPLASAAVEEAMPPVPVLKAMEQIKRSSSCCKEPPISMKAMEQIKRSSSCCKEPPISMLSRQFVAAKYKGMFSFLSQNQLAS

SEQ ID NO: 60928 - protein, 212 aa, Triticum aestivum
  peptide (1)..(212): Ceres Seq. ID no. 12781107
  misc_feature (1)..(120): Homolog of NCBI NO: 28828184 NR Description: similar to Leishmania major. Ppg3 [Dictyostelium
  misc_feature (1)..(84): Homolog of NCBI NO: 15231857 NR Description: putative protein
  misc_feature (1)..(84): Homolog of NCBI NO: 30687157 NR Description: expressed protein [Arabidopsis thaliana]
MKGSRAKRGIVTKLSVSWAPDVYDPPVTSDSHTVKPHQRSSRKSHYKYKPPKGGSGSSSRSSSGSIKEKKHSHHSSSSSSKRDKKPSYRSSNGGSSRTDTSDPQHRKAYGSSITSRTDTSVPEYHKLSPWQPLASAAVEEAMPPVPVLKAMEQIKRSSSCCKEPPISMKAMEQIKRSSSCCKEPPISMLSRQFVAAKYKGMFSFLSQNQLAS

SEQ ID NO: 60929 - DNA, 382 bp, Triticum aestivum
  misc_feature (1)..(382): Ceres Seq. ID no. 13662823
tcttcgtttcgtgctttcctctccttcttcctagcgcgcgcagacttgtccgccacttcacggaaattcccccaggaatacttctacatatatatacgccgcccgcctccattccggtgttcctagtttccactcatccgccgccgcacccgaatccccgccccacgaagcttcgtcgcgcaaggtgatgcttttagcaacaacaggcatcaaacaatgtcgatgagttacgatgggtctcaaagtgaggatcggcaaagtgaggaggttcagtcagcatacaaaaagttcagtgcaggggatgaggacgtggtaaggggttttgtaaatttggatgaaaccgaagagcaaaatgaagaaaatgagtggagttgggtgcccc

SEQ ID NO: 60930 - protein, 61 aa, Triticum aestivum
  peptide (1)..(61): Ceres Seq. ID no. 13662824
FVSCFPLLLPSARRLVRHFTEIPPGILLHIYTPPASIPVFLVSTHPPPHPNPRPTKLRRAR

SEQ ID NO: 60931 - protein, 55 aa, Triticum aestivum
  peptide (1)..(55): Ceres Seq. ID no. 13662825
  misc_feature (1)..(54): Homolog of NCBI NO: 38344752 NR Description: OSJNBa0089K21.10 [Oryza sativa (japonica
MSMSYDGSQSEDRQSEEVQSAYKKFSAGDEDVVRGFVNLDETEEQNEENEWSWVP

SEQ ID NO: 60932 - protein, 53 aa, Triticum aestivum
  peptide (1)..(53): Ceres Seq. ID no. 13662826
  misc_feature (1)..(52): Homolog of NCBI NO: 38344752 NR Description: OSJNBa0089K21.10 [Oryza sativa (japonica
MSYDGSQSEDRQSEEVQSAYKKFSAGDEDVVRGFVNLDETEEQNEENEWSWVP

SEQ ID NO: 60933 - DNA, 983 bp, Triticum aestivum
  misc_feature (1)..(983): Ceres Seq. ID no. 12623128
aatgcctcacaaaatagaaattcaaattccagcaacatagacagcatcaacattagagggcgggtgcagcagcaggagttgagggttctcttctccgaaggcgccgaagttcttcagcttggcaagtaagtgataatcaatggcttataagcttccactggcaggagttaggacttccaatttcgagcgtagagagcttccatcaaacagctacctggatctgggagggccttatggaaaatttgtgcctttcgtaatcgcgggagaagggggctttggggagcataagcagctcaactggacaaacttgtttttactaaacaagcttggcagtgacatacacagcgatcatgtagaggtgatcaatcagatcaaagtagagagagatgttgaaaaggtaaaagagttgataaggctactgcctcgtgaaatttctgagcaattggaaggccacgagacccatgagcaggttgaaatcctgagatatctgagcaggaacatggatcagaggatgtcctatctcagcacagagatccggcgtctaaggagtgacctgggagaggtgatgaaggtatcggagagatacgcggagcattggataggatggagcgacaaaatccttgctaccgtccatgaacaaacgcaacaaaccctggagttagtgctcctagctgctacgtatttgcatttcatacttttctatattgtactgtaatgaataaaattatgcgctgctagcagcgtataatgttgtacgagtcttggtcggccgagttattgtagcaacaggtgcatgtctgtccgcagtttgttgatcttgtcaagtgtttgtaatgaataaaattatgtgcttcttgctacacgtcatgttgtccgagtcctcgtcgatcgagatattgtaggaaactggtacgtgtctgtctgaaattacctgtaacgtgtcatttatgtaaagtgtttgcattgaagagttatggatattt

SEQ ID NO: 60934 - protein, 191 aa, Triticum aestivum
  peptide (1)..(191): Ceres Seq. ID no. 12623129
  misc_feature (18)..(150): Homolog of NCBI NO: 665932 NR Description: ORF I
  misc_feature (17)..(150): Homolog of NCBI NO: 9627995 NR Description: coat protein/movement protein [Cassava vein
  misc_feature (1)..(144): Homolog of NCBI NO: 7460221 NR Description: abscisic acid-induced protein ABA7 - barley
MAYKLPLAGVRTSNFERRELPSNSYLDLGGPYGKFVPFVIAGEGGFGEHKQLNWTNLFLLNKLGSDIHSDHVEVINQIKVERDVEKVKELIRLLPREISEQLEGHETHEQVEILRYLSRNMDQRMSYLSTEIRRLRSDLGEVMKVSERYAEHWIGWSDKILATVHEQTQQTLELVLLAATYLHFILFYIVL

SEQ ID NO: 60935 - DNA, 815 bp, Triticum aestivum
  misc_feature (1)..(815): Ceres Seq. ID no. 13663373
aatcgaaaaaaaattcgaaccccccaaaccgctcgcgaaatccccaaatcaacgcctcctcacggcaatcaatcaagcaatcatccattcacgacgcgagcggggatcctcctccactccgatggcgtcggaggccaggtccgggggcgcgcggcgggtcccgctgcagccgcgggacggcaacgcggccgcctccccgtccttgggcggcggcggtgccgccaaatcgaaggcgaaggcgaaggcgcgggcggctgctgcgtcgccgccgtcggtgaggtcgtatgcgagccgggacgaggccgagaggagggcggcagcggcggtggtgagggagaaggaggtgtcgctggcggaggagctggagaaggcgcgggagcggcggggccgcctgcgggccgcgcggcaggtcacggagagggcgctggcggaggccgacgaggcgctgcggcgggagatgcgggagtgggagcgccgcgcggacgagcagcgccgggtcgtcgcggagctgatgcgcctcatcgggatgcccgaggtgtacgttccggtggaatcgctgagatccagggaggagaggaagaggaaacaggggacttcgtcttcagatcctccgggtccggtcacagtggcttcaacattactagaggaagaatctggaccatgcctctccgatcaggaactgctggcgacgccggcaagggaaacgaccgccgccgcagcagcgacggaaagcagcagcgcttgatccctttctttgcctgttccaaactgtttctgcacaaggcctcccaatgaaatcaaatggcttgtttggc

SEQ ID NO: 60936 - protein, 264 aa, Triticum aestivum
  peptide (1)..(264): Ceres Seq. ID no. 13663374
  misc_feature (101)..(198): Pfam Name: Dehydrin Pfam Description: Dehydrin
  misc_feature (42)..(234): Homolog of NCBI NO: 17063211 NR Description: dragline silk protein [Nephila clavipes]
  misc_feature (42)..(234): Homolog of NCBI NO: 2911274 NR Description: spidroin 1 [Nephila clavipes]
  misc_feature (42)..(246): Homolog of NCBI NO: 9625624 NR Description: nuclear antigen EBNA1 [Human herpesvirus 4]
  misc_feature (42)..(234): Homolog of NCBI NO: 2605798 NR Description: minor ampullate silk protein MiSp1 [Nephila
  misc_feature (42)..(234): Homolog of NCBI NO: 2914731 NR Description: dragline silk protein spidroin 1 [Nephila
  misc_feature (39)..(210): Homolog of NCBI NO: 121632 NR Description: GLYCINE-RICH CELL WALL STRUCTURAL PROTEIN 1.8
  misc_feature (78)..(247): Homolog of NCBI NO: 17221671 NR Description: circumsporozoite protein [Plasmodium vinckei
  misc_feature (40)..(232): Homolog of NCBI NO: 31792021 NR Description: PE-PGRS FAMILY PROTEIN
  misc_feature (42)..(234): Homolog of NCBI NO: 13561976 NR Description: major ampullate spidroin 1 [Argiope aurantia]
  misc_feature (42)..(241): Homolog of NCBI NO: 13561976 NR Description: major ampullate spidroin 1 [Argiope aurantia]
NRKKIRTPQTAREIPKSTPPHGNQSSNHPFTTRAGILLHSDGVGGQVRGRAAGPAAAAGRQRGRLPVLGRRRCRQIEGEGEGAGGCCVAAVGEVVCEPGRGREEGGSGGGEGEGGVAGGGAGEGAGAAGPPAGRAAGHGEGAGGGRRGAAAGDAGVGAPRGRAAPGRRGADAPHRDARGVRSGGIAEIQGGEEEETGDFVFRSSGSGHSGFNITRGRIWTMPLRSGTAGDAGKGNDRRRSSDGKQQRLIPFFACSKLFLHKASQ

SEQ ID NO: 60937 - protein, 247 aa, Triticum aestivum
  peptide (1)..(247): Ceres Seq. ID no. 13663375
  misc_feature (71)..(169): Pfam Name: Caldesmon Pfam Description: Caldesmon
IEKKFEPPKPLAKSPNQRLLTAINQAIIHSRRERGSSSTPMASEARSGGARRVPLQPRDGNAAASPSLGGGGAAKSKAKAKARAAAASPPSVRSYASRDEAERRAAAAVVREKEVSLAEELEKARERRGRLRAARQVTERALAEADEALRREMREWERRADEQRRVVAELMRLIGMPEVYVPVESLRSREERKRKQGTSSSDPPGPVTVASTLLEEESGPCLSDQELLATPARETTAAAAATESSSA

SEQ ID NO: 60938 - protein, 207 aa, Triticum aestivum
  peptide (1)..(207): Ceres Seq. ID no. 13663376
  misc_feature (31)..(129): Pfam Name: Caldesmon Pfam Description: Caldesmon
MASEARSGGARRVPLQPRDGNAAASPSLGGGGAAKSKAKAKARAAAASPPSVRSYASRDEAERRAAAAVVREKEVSLAEELEKARERRGRLRAARQVTERALAEADEALRREMREWERRADEQRRVVAELMRLIGMPEVYVPVESLRSREERKRKQGTSSSDPPGPVTVASTLLEEESGPCLSDQELLATPARETTAAAAATESSSA

SEQ ID NO: 60939 - DNA, 1259 bp, Triticum aestivum
  misc_feature (1)..(1259): Ceres Seq. ID no. 15169515
aaaaaaaagcagaagccatccccgttccccattccctcgccgccgccggccgccgccaaatctccccggcctttccgccgcggcgccatgctcctccggctccggtgctacatcctcacccagctcctatcgtctccctccgcctctcccgcctcccagctgcaccgcctcttctccgccgcagcgcccggcgcctccccgaaccctagcttcgccgtggaggagtacctcgtcgccacctgcggcctcacccgaccccaggccctcaaggcctccgccaagctctcccacctcaggtcccccgccaatcccgaagccgtgctcgccttcctcgccggcctcggtctctccgacgccgatgtcgccgccctcgtcgccagggacccgcagttcctctgcgccagcgtggagagaaccctgacgcccgtagccgcagggctctctggtctcggcttatcgcgttccgacatcgcgcgcctcgcatcgctcgccgcccacaaattccgccaaaaatctgtcctctccaagctgcagtactacctgcgcctcttcggcacctcccacaacttcctccgggtgatgaagttctccaatatcctctcacacagcatcgagagggtggtcaagcccaatgtcgcgtacctgcgagagtgtgggttgcaggattgtgatatcgccaagttttgcatccaaagaccgaggatgatcatcagcaacccggagcatgttcaggcaatggtggcgtgcgctgaaaacattggtgtgccccgtgcctctgggatgttcaggcacgcacttcaggctgttgcattcctcggtgaggaggagatcacagtcagggtggggtacttgaagagcacgttcaggtggacggatgctgaggtaggcatggctgtttctaagtttccaccgttgctgagggggtccgagaaatcgctgcagcgcagatttgagttcctcatctccgaggtgggtttggaatcggcgtacattgctcagcgacccgtaatgctaggtctcagcctagagggccggctcaggccccggcactacgctgtaaagtttatcaaggaaaatggattgctcaagtgtgacccaagctactatactgttttcaaggagtccgacatgacattcaagaagaagttcatacaccctcataaggaagctgcaccgcaccttgaaaaagactacgatgctgcttgtaaaggggaagtgcccactaatttcagattcacataagccaataacgggctctg

SEQ ID NO: 60940 - protein, 413 aa, Triticum aestivum
  peptide (1)..(413): Ceres Seq. ID no. 15169516
  misc_feature (108)..(379): Pfam Name: mTERF Pfam Description: mTERF
  misc_feature (108)..(399): Homolog of NCBI NO: 18412304 NR Description: expressed protein [Arabidopsis thaliana]
  misc_feature (297)..(394): Homolog of NCBI NO: 15232683 NR Description: expressed protein [Arabidopsis thaliana]
  misc_feature (59)..(326): Homolog of NCBI NO: 15232683 NR Description: expressed protein [Arabidopsis thaliana]
  misc_feature (70)..(398): Homolog of NCBI NO: 25511650 NR Description: T22I11.2 protein - Arabidopsis thaliana
  misc_feature (51)..(402): Homolog of NCBI NO: 21553423 NR Description: unknown [Arabidopsis thaliana]
  misc_feature (51)..(402): Homolog of NCBI NO: 15238313 NR Description: expressed protein [Arabidopsis thaliana]
  misc_feature (70)..(398): Homolog of NCBI NO: 15218140 NR Description: hypothetical protein [Arabidopsis thaliana]
  misc_feature (70)..(398): Homolog of NCBI NO: 18415647 NR Description: expressed protein [Arabidopsis thaliana]
  misc_feature (39)..(407): Homolog of NCBI NO: 34394750 NR Description: unknown protein [Oryza sativa (japonica
  misc_feature (47)..(384): Homolog of NCBI NO: 39545750 NR Description: OSJNBb0034I13.16 [Oryza sativa (japonica
KKKQKPSPFPIPSPPPAAAKSPRPFRRGAMLLRLRCYILTQLLSSPSASPASQLHRLFSAAAPGASPNPSFAVEEYLVATCGLTRPQALKASAKLSHLRSPANPEAVLAFLAGLGLSDADVAALVARDPQFLCASVERTLTPVAAGLSGLGLSRSDIARLASLAAHKFRQKSVLSKLQYYLRLFGTSHNFLRVMKFSNILSHSIERVVKPNVAYLRECGLQDCDIAKFCIQRPRMIISNPEHVQAMVACAENIGVPRASGMFRHALQAVAFLGEEEITVRVGYLKSTFRWTDAEVGMAVSKFPPLLRGSEKSLQRRFEFLISEVGLESAYIAQRPVMLGLSLEGRLRPRHYAVKFIKENGLLKCDPSYYTVFKESDMTFKKKFIHPHKEAAPHLEKDYDAACKGEVPTNFRFT

SEQ ID NO: 60941 - protein, 384 aa, Triticum aestivum
  peptide (1)..(384): Ceres Seq. ID no. 15169517
  misc_feature (79)..(350): Pfam Name: mTERF Pfam Description: mTERF
  misc_feature (79)..(370): Homolog of NCBI NO: 18412304 NR Description: expressed protein [Arabidopsis thaliana]
  misc_feature (268)..(365): Homolog of NCBI NO: 15232683 NR Description: expressed protein [Arabidopsis thaliana]
  misc_feature (30)..(297): Homolog of NCBI NO: 15232683 NR Description: expressed protein [Arabidopsis thaliana]
  misc_feature (41)..(369): Homolog of NCBI NO: 25511650 NR Description: T22I11.2 protein - Arabidopsis thaliana
  misc_feature (22)..(373): Homolog of NCBI NO: 21553423 NR Description: unknown [Arabidopsis thaliana]
  misc_feature (22)..(373): Homolog of NCBI NO: 15238313 NR Description: expressed protein [Arabidopsis thaliana]
  misc_feature (41)..(369): Homolog of NCBI NO: 15218140 NR Description: hypothetical protein [Arabidopsis thaliana]
  misc_feature (41)..(369): Homolog of NCBI NO: 18415647 NR Description: expressed protein [Arabidopsis thaliana]
  misc_feature (10)..(378): Homolog of NCBI NO: 34394750 NR Description: unknown protein [Oryza sativa (japonica
  misc_feature (18)..(355): Homolog of NCBI NO: 39545750 NR Description: OSJNBb0034I13.16 [Oryza sativa (japonica
MLLRLRCYILTQLLSSPSASPASQLHRLFSAAAPGASPNPSFAVEEYLVATCGLTRPQALKASAKLSHLRSPANPEAVLAFLAGLGLSDADVAALVARDPQFLCASVERTLTPVAAGLSGLGLSRSDIARLASLAAHKFRQKSVLSKLQYYLRLFGTSHNFLRVMKFSNILSHSIERVVKPNVAYLRECGLQDCDIAKFCIQRPRMIISNPEHVQAMVACAENIGVPRASGMFRHALQAVAFLGEEEITVRVGYLKSTFRWTDAEVGMAVSKFPPLLRGSEKSLQRRFEFLISEVGLESAYIAQRPVMLGLSLEGRLRPRHYAVKFIKENGLLKCDPSYYTVFKESDMTFKKKFIHPHKEAAPHLEKDYDAACKGEVPTNFRFT

SEQ ID NO: 60942 - protein, 220 aa, Triticum aestivum
  peptide (1)..(220): Ceres Seq. ID no. 15169518
  misc_feature (1)..(186): Pfam Name: mTERF Pfam Description: mTERF
  misc_feature (1)..(206): Homolog of NCBI NO: 18412304 NR Description: expressed protein [Arabidopsis thaliana]
  misc_feature (104)..(201): Homolog of NCBI NO: 15232683 NR Description: expressed protein [Arabidopsis thaliana]
  misc_feature (1)..(133): Homolog of NCBI NO: 15232683 NR Description: expressed protein [Arabidopsis thaliana]
  misc_feature (1)..(205): Homolog of NCBI NO: 25511650 NR Description: T22I11.2 protein - Arabidopsis thaliana
  misc_feature (1)..(209): Homolog of NCBI NO: 21553423 NR Description: unknown [Arabidopsis thaliana]
  misc_feature (1)..(209): Homolog of NCBI NO: 15238313 NR Description: expressed protein [Arabidopsis thaliana]
  misc_feature (1)..(205): Homolog of NCBI NO: 15218140 NR Description: hypothetical protein [Arabidopsis thaliana]
  misc_feature (1)..(205): Homolog of NCBI NO: 18415647 NR Description: expressed protein [Arabidopsis thaliana]
  misc_feature (1)..(214): Homolog of NCBI NO: 34394750 NR Description: unknown protein [Oryza sativa (japonica
  misc_feature (1)..(191): Homolog of NCBI NO: 39545750 NR Description: OSJNBb0034I13.16 [Oryza sativa (japonica
MKFSNILSHSIERVVKPNVAYLRECGLQDCDIAKFCIQRPRMIISNPEHVQAMVACAENIGVPRASGMFRHALQAVAFLGEEEITVRVGYLKSTFRWTDAEVGMAVSKFPPLLRGSEKSLQRRFEFLISEVGLESAYIAQRPVMLGLSLEGRLRPRHYAVKFIKENGLLKCDPSYYTVFKESDMTFKKKFIHPHKEAAPHLEKDYDAACKGEVPTNFRFT

SEQ ID NO: 60943 - DNA, 740 bp, Triticum aestivum
  misc_feature (1)..(740): Ceres Seq. ID no. 13664150
agagatgcagtattgcagttgagtgattgacctttctccgaggagcagtgaggactggttcgttctacttggcaacttgcgtcttggatcatctgcccagttgtgtacagcctttgctttaaactctactctcagcgaagatcagtttgcgcgtctgcatggcgcgaatggcggtctccgtgctcttcctcatcgccggcgtcgtgctcatgctcgcgctgcacgtcctcgtcatcgtctgggcggtccggcggggcgccgtgctgcggctgcggggtgcggcgcgggagcgggaccaggagcagggggaagcgacgggtctgacggccgacgagctgggcgagctgccgttccaggacttcaaggccgccgccgcggtcgggacgggcgccgccgagtgcgcggtgtgcctggaggcgttccaggggggcgaccggtgccgcgtgctgccggggtgccaccatgggttccacgcgcagtgcgtggactcgtggctgcgccagagccgccggtgcccggtgtgccgcgccgaggtggcctgccgcggcaaggcggccggcgcggcggttgtcgatgaggccgccacatcggagatcgtcgctgaaagactgggaggtgcagatcgctagcggattttgtttgaccgagactcgtgtgccgtcgttgattagcttgtgattttttttagtacgattagcttgtgattgtacataaagtaatccatctagcatttggagtcg

SEQ ID NO: 60944 - protein, 156 aa, Triticum aestivum
  peptide (1)..(156): Ceres Seq. ID no. 13664151
  misc_feature (81)..(122): Pfam Name: Zinc finger, C3HC4 type (RING finger) Pfam Description: Zinc finger, C3HC4 type (RING finger)
  misc_feature (9)..(126): Homolog of NCBI NO: 21617980 NR Description: putative RING zinc finger protein [Arabidopsis
  misc_feature (9)..(126): Homolog of NCBI NO: 15224210 NR Description: zinc finger (C3HC4-type RING finger) protein
  misc_feature (1)..(126): Homolog of NCBI NO: 34909640 NR Description: P0503C12.20 [Oryza sativa (japonica
  misc_feature (54)..(154): Homolog of NCBI NO: 37537088 NR Description: putative zinc finger protein
  misc_feature (31)..(154): Homolog of NCBI NO: 34894514 NR Description: P0551A11.21 [Oryza sativa (japonica
  misc_feature (1)..(145): Homolog of NCBI NO: 8698835 NR Description: RING finger 1 [Oryza sativa (japonica
  misc_feature (1)..(127): Homolog of NCBI NO: 21593762 NR Description: unknown [Arabidopsis thaliana]
  misc_feature (1)..(127): Homolog of NCBI NO: 15238323 NR Description: zinc finger (C3HC4-type RING finger) protein
  misc_feature (29)..(156): Homolog of NCBI NO: 40539017 NR Description: putative RING-H2 zinc finger protein
  misc_feature (1)..(143): Homolog of NCBI NO: 34903920 NR Description: OSJNBa0038J17.5 [Oryza sativa (japonica
MARMAVSVLFLIAGVVLMLALHVLVIVWAVRRGAVLRLRGAARERDQEQGEATGLTADELGELPFQDFKAAAAVGTGAAECAVCLEAFQGGDRCRVLPGCHHGFHAQCVDSWLRQSRRCPVCRAEVACRGKAAGAAVVDEAATSEIVAERLGGADR

SEQ ID NO: 60945 - protein, 153 aa, Triticum aestivum
  peptide (1)..(153): Ceres Seq. ID no. 13664152
  misc_feature (78)..(119): Pfam Name: Zinc finger, C3HC4 type (RING finger) Pfam Description: Zinc finger, C3HC4 type (RING finger)
  misc_feature (6)..(123): Homolog of NCBI NO: 21617980 NR Description: putative RING zinc finger protein [Arabidopsis
  misc_feature (6)..(123): Homolog of NCBI NO: 15224210 NR Description: zinc finger (C3HC4-type RING finger) protein
  misc_feature (1)..(123): Homolog of NCBI NO: 34909640 NR Description: P0503C12.20 [Oryza sativa (japonica
  misc_feature (51)..(151): Homolog of NCBI NO: 37537088 NR Description: putative zinc finger protein
  misc_feature (28)..(151): Homolog of NCBI NO: 34894514 NR Description: P0551A11.21 [Oryza sativa (japonica
  misc_feature (1)..(142): Homolog of NCBI NO: 8698835 NR Description: RING finger 1 [Oryza sativa (japonica
  misc_feature (1)..(124): Homolog of NCBI NO: 21593762 NR Description: unknown [Arabidopsis thaliana]
  misc_feature (1)..(124): Homolog of NCBI NO: 15238323 NR Description: zinc finger (C3HC4-type RING finger) protein
  misc_feature (26)..(153): Homolog of NCBI NO: 40539017 NR Description: putative RING-H2 zinc finger protein
  misc_feature (1)..(140): Homolog of NCBI NO: 34903920 NR Description: OSJNBa0038J17.5 [Oryza sativa (japonica
MAVSVLFLIAGVVLMLALHVLVIVWAVRRGAVLRLRGAARERDQEQGEATGLTADELGELPFQDFKAAAAVGTGAAECAVCLEAFQGGDRCRVLPGCHHGFHAQCVDSWLRQSRRCPVCRAEVACRGKAAGAAVVDEAATSEIVAERLGGADR

SEQ ID NO: 60946 - protein, 139 aa, Triticum aestivum
  peptide (1)..(139): Ceres Seq. ID no. 13664153
  misc_feature (64)..(105): Pfam Name: Zinc finger, C3HC4 type (RING finger) Pfam Description: Zinc finger, C3HC4 type (RING finger)
  misc_feature (1)..(109): Homolog of NCBI NO: 21617980 NR Description: putative RING zinc finger protein [Arabidopsis
  misc_feature (1)..(109): Homolog of NCBI NO: 15224210 NR Description: zinc finger (C3HC4-type RING finger) protein
  misc_feature (1)..(109): Homolog of NCBI NO: 34909640 NR Description: P0503C12.20 [Oryza sativa (japonica
  misc_feature (37)..(137): Homolog of NCBI NO: 37537088 NR Description: putative zinc finger protein
  misc_feature (14)..(137): Homolog of NCBI NO: 34894514 NR Description: P0551A11.21 [Oryza sativa (japonica
  misc_feature (1)..(128): Homolog of NCBI NO: 8698835 NR Description: RING finger 1 [Oryza sativa (japonica
  misc_feature (1)..(110): Homolog of NCBI NO: 21593762 NR Description: unknown [Arabidopsis thaliana]
  misc_feature (1)..(110): Homolog of NCBI NO: 15238323 NR Description: zinc finger (C3HC4-type RING finger) protein
  misc_feature (12)..(139): Homolog of NCBI NO: 40539017 NR Description: putative RING-H2 zinc finger protein
  misc_feature (1)..(126): Homolog of NCBI NO: 34903920 NR Description: OSJNBa0038J17.5 [Oryza sativa (japonica
MLALHVLVIVWAVRRGAVLRLRGAARERDQEQGEATGLTADELGELPFQDFKAAAAVGTGAAECAVCLEAFQGGDRCRVLPGCHHGFHAQCVDSWLRQSRRCPVCRAEVACRGKAAGAAVVDEAATSEIVAERLGGADR

SEQ ID NO: 60947 - DNA, 914 bp, Triticum aestivum
  misc_feature (1)..(914): Ceres Seq. ID no. 13661065
cctcaattattgctaagcgtctccccatccgcccctcatctcctccccatccgcccccatctcccttcctccacccctccacggcggctctccattggtaatggcgatggcggcgtcgtggtgggcgctgctggcggcggcggcggttgtggcggcggcggggtgcggcgaggcggcgcccacggcggcggcggaggcggcgcacgacgtgctgcagacccacggcctcccgcgcgggctgctccctgcggggatcgcggcgttctcgcacgacccggccaccggccggttcgaggcggtcctggagtccccctgcacgtcgcgcaccgaggtcggcctgcggtacaacatcaccgtggcggggcagatcagctatggccggatcgccgagctctccggggtggacgctcaggacctatttctctggttcgccgtgcgcagcatccgcgtggacgtgccctcctccggcgtcatctacttcgatgtgggcgtggtctacaagcacttcccgctgtcgttcttcgaggcgccgccgccgtgcgtgcccaccccgctcatcctcctgcaaccacatcagattaggggcgacggatcggtggtggaagacggcgccgcgttgcaacaatgatgggacggattccatgatttcatcgtggagacgcaaaccagaaatcgcagttttgagaggtgatcggccggccggcgggcggacggccggctagtgtgcagatagatagacgtggtcattcattgtgtttgctactcgtcacctcatcactctgttcctgtcgtcgttcttgtcctctgcggccaaagtcaatcggcggccggcgggagctgcctgcgtgtactcctccggcgtccggccgactgtcatatttttcacggtaatggatgatgtgtagtgtatatgc

SEQ ID NO: 60948 - protein, 193 aa, Triticum aestivum
  peptide (1)..(193): Ceres Seq. ID no. 13661066
  misc_feature (16)..(106): Pfam Name: Protein of unknown function, DUF584 Pfam Description: Protein of unknown function, DUF584
PQLLLSVSPSAPHLLPIRPHLPSSTPPRRLSIGNGDGGVVVGAAGGGGGCGGGGVRRGGAHGGGGGGARRAADPRPPARAAPCGDRGVLARPGHRPVRGGPGVPLHVAHRGRPAVQHHRGGADQLWPDRRALRGGRSGPISLVRRAQHPRGRALLRRHLLRCGRGLQALPAVVLRGAAAVRAHPAHPPATTSD

SEQ ID NO: 60949 - protein, 175 aa, Triticum aestivum
  peptide (1)..(175): Ceres Seq. ID no. 13661067
  misc_feature (16)..(152): Pfam Name: Protein of unknown function, DUF538 Pfam Description: Protein of unknown function, DUF538
  misc_feature (35)..(147): Homolog of NCBI NO: 21536941 NR Description: unknown [Arabidopsis thaliana]
  misc_feature (35)..(147): Homolog of NCBI NO: 18417957 NR Description: expressed protein [Arabidopsis thaliana]
  misc_feature (35)..(147): Homolog of NCBI NO: 9759120 NR Description: gb|AAF02163.1~gene_id:MQK4.11~similar to unknown
  misc_feature (1)..(150): Homolog of NCBI NO: 34898576 NR Description: P0534A03.14 [Oryza sativa (japonica
  misc_feature (17)..(148): Homolog of NCBI NO: 21592465 NR Description: unknown [Arabidopsis thaliana]
  misc_feature (17)..(148): Homolog of NCBI NO: 22330911 NR Description: expressed protein [Arabidopsis thaliana]
  misc_feature (17)..(148): Homolog of NCBI NO: 6041844 NR Description: unknown protein [Arabidopsis thaliana]
  misc_feature (11)..(149): Homolog of NCBI NO: 18397959 NR Description: expressed protein [Arabidopsis thaliana]
  misc_feature (11)..(149): Homolog of NCBI NO: 6041854 NR Description: unknown protein [Arabidopsis thaliana]
  misc_feature (16)..(174): Homolog of NCBI NO: 34906900 NR Description: P0470A12.30 [Oryza sativa (japonica
MAMAASWWALLAAAAVVAAAGCGEAAPTAAAEAAHDVLQTHGLPRGLLPAGIAAFSHDPATGRFEAVLESPCTSRTEVGLRYNITVAGQISYGRIAELSGVDAQDLFLWFAVRSIRVDVPSSGVIYFDVGVVYKHFPLSFFEAPPPCVPTPLILLQPHQIRGDGSVVEDGAALQQ

SEQ ID NO: 60950 - protein, 173 aa, Triticum aestivum
  peptide (1)..(173): Ceres Seq. ID no. 13661068
  misc_feature (14)..(150): Pfam Name: Protein of unknown function, DUF538 Pfam Description: Protein of unknown function, DUF538
  misc_feature (33)..(145): Homolog of NCBI NO: 18417957 NR Description: expressed protein [Arabidopsis thaliana]
  misc_feature (33)..(145): Homolog of NCBI NO: 21536941 NR Description: unknown [Arabidopsis thaliana]
  misc_feature (33)..(145): Homolog of NCBI NO: 9759120 NR Description: gb|AAF02163.1~gene_id:MQK4.11~similar to unknown
  misc_feature (1)..(148): Homolog of NCBI NO: 34898576 NR Description: P0534A03.14 [Oryza sativa (japonica
  misc_feature (15)..(146): Homolog of NCBI NO: 21592465 NR Description: unknown [Arabidopsis thaliana]
  misc_feature (15)..(146): Homolog of NCBI NO: 22330911 NR Description: expressed protein [Arabidopsis thaliana]
  misc_feature (15)..(146): Homolog of NCBI NO: 6041844 NR Description: unknown protein [Arabidopsis thaliana]
  misc_feature (9)..(147): Homolog of NCBI NO: 18397959 NR Description: expressed protein [Arabidopsis thaliana]
  misc_feature (9)..(147): Homolog of NCBI NO: 6041854 NR Description: unknown protein [Arabidopsis thaliana]
  misc_feature (14)..(172): Homolog of NCBI NO: 34906900 NR Description: P0470A12.30 [Oryza sativa (japonica
MAASWWALLAAAAVVAAAGCGEAAPTAAAEAAHDVLQTHGLPRGLLPAGIAAFSHDPATGRFEAVLESPCTSRTEVGLRYNITVAGQISYGRIAELSGVDAQDLFLWFAVRSIRVDVPSSGVIYFDVGVVYKHFPLSFFEAPPPCVPTPLILLQPHQIRGDGSVVEDGAALQQ

SEQ ID NO: 60951 - DNA, 683 bp, Triticum aestivum
  misc_feature (1)..(683): Ceres Seq. ID no. 12623467
ctttgatggatgtttcttgaaaagaagagcagccaagtaaaatttggaaatgtttttgtccttcttcttcaaaattccaggttgtgaaagcaattgagaaggcaatacccataccgcgaggaccatctattgctgagaatcaccctgcaagggaggagctgaaggccatggagtcccagaaggtagacatcgaccgcatggcgacgctccaggtgcggcgggagctgtggggagggctggctgccctagccctccaaacggccggcttcatgaggctcacattctgggagctctcctgggacgtcatggagcccatctgcttcttcgtgacgtcgacatacttcatggcgggctacgccttcttcctccggaccaagagggagccctcgttcgagggcttcttccagagccgttttgcggtgaagcagaagcgccttatgcaggcccgggaatttgatgtccgccggtacagtgagctccggcaagcctgtggcctcccggcgctacatcctcagagcccctgtgcgtcctcgcaggagaaccaccattgccattgtcattgatgtgttgcttggaattttttatgcccatttgatgcggctgctgctgctgcttcatgtaccgttgtggaatgtggatgcgaagcatactcattgacgtgatcagattcagattttaaactc

SEQ ID NO: 60952 - protein, 131 aa, Triticum aestivum
  peptide (1)..(131): Ceres Seq. ID no. 12623468
  misc_feature (1)..(111): Pfam Name: Protein of unknown function, DUF607 Pfam Description: Protein of unknown function, DUF607
  misc_feature (1)..(104): Homolog of NCBI NO: 22330290 NR Description: hypothetical protein
  misc_feature (1)..(123): Homolog of NCBI NO: 34909244 NR Description: B1148D12.10 [Oryza sativa (japonica
  misc_feature (1)..(104): Homolog of NCBI NO: 15239011 NR Description: unknown protein; protein id: At5g42610.1
  misc_feature (1)..(119): Homolog of NCBI NO: 15240047 NR Description: putative protein
  misc_feature (1)..(119): Homolog of NCBI NO: 14596231 NR Description: Unknown protein [Arabidopsis thaliana]
  misc_feature (1)..(109): Homolog of NCBI NO: 20330769 NR Description: Hypothetical protein [Oryza sativa (japonica
  misc_feature (1)..(106): Homolog of NCBI NO: 15234535 NR Description: putative protein; protein id: At4g36820.1
  misc_feature (1)..(114): Homolog of NCBI NO: 24496456 NR Description: hypothetical protein [Arabidopsis thaliana]
  misc_feature (1)..(114): Homolog of NCBI NO: 15224063 NR Description: hypothetical protein; protein id: At2g23790.1
  misc_feature (1)..(131): Homolog of NCBI NO: 37535778 NR Description: unknown protein [Oryza sativa (japonica
MESQKVDIDRMATLQVRRELWGGLAALALQTAGFMRLTFWELSWDVMEPICFFVTSTYFMAGYAFFLRTKREPSFEGFFQSRFAVKQKRLMQAREFDVRRYSELRQACGLPALHPQSPCASSQENHHCHCH

SEQ ID NO: 60953 - protein, 121 aa, Triticum aestivum
  peptide (1)..(121): Ceres Seq. ID no. 12623469
  misc_feature (1)..(101): Pfam Name: Protein of unknown function, DUF607 Pfam Description: Protein of unknown function, DUF607
  misc_feature (1)..(94): Homolog of NCBI NO: 22330290 NR Description: hypothetical protein
  misc_feature (1)..(113): Homolog of NCBI NO: 34909244 NR Description: B1148D12.10 [Oryza sativa (japonica
  misc_feature (1)..(94): Homolog of NCBI NO: 15239011 NR Description: unknown protein; protein id: At5g42610.1
  misc_feature (1)..(109): Homolog of NCBI NO: 15240047 NR Description: putative protein
  misc_feature (1)..(109): Homolog of NCBI NO: 14596231 NR Description: Unknown protein [Arabidopsis thaliana]
  misc_feature (1)..(99): Homolog of NCBI NO: 20330769 NR Description: Hypothetical protein [Oryza sativa (japonica
  misc_feature (1)..(96): Homolog of NCBI NO: 15234535 NR Description: putative protein; protein id: At4g36820.1
  misc_feature (1)..(104): Homolog of NCBI NO: 24496456 NR Description: hypothetical protein [Arabidopsis thaliana]
  misc_feature (1)..(104): Homolog of NCBI NO: 15224063 NR Description: hypothetical protein; protein id: At2g23790.1
  misc_feature (1)..(121): Homolog of NCBI NO: 37535778 NR Description: unknown protein [Oryza sativa (japonica
MATLQVRRELWGGLAALALQTAGFMRLTFWELSWDVMEPICFFVTSTYFMAGYAFFLRTKREPSFEGFFQSRFAVKQKRLMQAREFDVRRYSELRQACGLPALHPQSPCASSQENHHCHCH

SEQ ID NO: 60954 - protein, 97 aa, Triticum aestivum
  peptide (1)..(97): Ceres Seq. ID no. 12623470
  misc_feature (1)..(77): Pfam Name: Protein of unknown function, DUF607 Pfam Description: Protein of unknown function, DUF607
  misc_feature (1)..(70): Homolog of NCBI NO: 22330290 NR Description: hypothetical protein
  misc_feature (1)..(89): Homolog of NCBI NO: 34909244 NR Description: B1148D12.10 [Oryza sativa (japonica
  misc_feature (1)..(70): Homolog of NCBI NO: 15239011 NR Description: unknown protein; protein id: At5g42610.1
  misc_feature (1)..(85): Homolog of NCBI NO: 15240047 NR Description: putative protein
  misc_feature (1)..(85): Homolog of NCBI NO: 14596231 NR Description: Unknown protein [Arabidopsis thaliana]
  misc_feature (1)..(75): Homolog of NCBI NO: 20330769 NR Description: Hypothetical protein [Oryza sativa (japonica
  misc_feature (1)..(72): Homolog of NCBI NO: 15234535 NR Description: putative protein; protein id: At4g36820.1
  misc_feature (1)..(80): Homolog of NCBI NO: 24496456 NR Description: hypothetical protein [Arabidopsis thaliana]
  misc_feature (1)..(80): Homolog of NCBI NO: 15224063 NR Description: hypothetical protein; protein id: At2g23790.1
  misc_feature (1)..(97): Homolog of NCBI NO: 37535778 NR Description: unknown protein [Oryza sativa (japonica
MRLTFWELSWDVMEPICFFVTSTYFMAGYAFFLRTKREPSFEGFFQSRFAVKQKRLMQAREFDVRRYSELRQACGLPALHPQSPCASSQENHHCHCH

SEQ ID NO: 60955 - DNA, 1976 bp, Triticum aestivum
  misc_feature (1)..(1976): Ceres Seq. ID no. 14301866
ctctctccacaccacaagccgccgccgaccgctcgctgggaggggaatagaaatcgtgtatcgtagggttgcgcaaaccgccgccaagaggggagccaagtccagcgccgctgcctcgtcctcgtcggcgtcgtcggcggccgataaggccgccaatggcatagcggcccttaacttatccgatcggacatgtaccggggtcctggcttcgcatccgctctcccgtgatatccacattgagtccctttcattaacatttcatggacatgaccttattgtggattcagaattggagcttaactacgggaggcggtatggtttgctcggcttaaatggttgtgggaaatctacccttctcaccgcaataggctgcagggaactccccattcctgaacacatggacatacatcatcttacgcgtgagattgaggcttctgacatgtctgcgctgcaagctgttatctgttgtgatgaagaaagagtgaagttggaaaaggaagctgaaattctggctgcacaggatgatggtggcggtgaagctttggatcttgtatatgagcggttagaagcaatggatgcatcaactgctgaaaagcgtgctgctgagatattgtttggtctaggttttgacaagcaaatgcaagcaaagccaacacgagatttttctgggggttggcgtatgaggattgcattggcaagggcgctgttcatgaacccgaccatccttttgcttgatgagccaaccaaccatcttgatctcgaggcttgtgtctggctggaagagaaattaaagaattttgagcgtatacttgttgttatctcgcattcccaagattttctaaatggagtgtgcactaacatcatccacatgcagaacaagaccctcaagttatatactggaaattatgaccagtatgttcaaactcgctctgagcttgaagagaatcaaatgaagcagtacaaatgggaacaggaacagatagctaatatgaaggagtacattgcccgatttggtcatggatctgcgaagcttgctcgtcaggctcagagcaaagagaagactcttgcaaagatggagcgtggtggtcttgctgagaaggttgtcaatgacaggattcttgttttccgctttacagatgttggcaaactcccaccaccagtgctgcagtttgctgatgtgacatttggttacactccggataatctcatctacaagaaccttgacttcggtgttgaccttgactcgagagttgcactggtcggtcccaatggggcaggtaagagcacacttctgaagctcatgacaggtgacctatctccgttggatggcatggtcagacgccacaaccacctacgcattgcacaattccatcaacatctcactgagaagctggacctggacatgccggccctgcagtacatgatgagggagtaccctgggaatgaagaggagaagatgagagctgcgattggcaagtttggcctgtcaggaaaggcacaggtgatgccaatgaaaaacctgtctgatgggcagaaggcccgtgtcatttttgcttggctagcatttaggcagccacagatgctgttgcttgatgagccgacaaatcatcttgacattgagaccattgactcacttgctgaggcactgaaggaatgggacggggggttggtcctggtgagccatgacttcaggctgatcaatcaggttgctcaagagatctgggtctgtgagaaccaggcggtgactaggtgggaaggcgatatcatggatttcaagcaacacttgaagaaaagggctggtctctagatttcctgtcttttccttctcggctctttggagatctagacaacccaaagtttttgcctgtatcagaaaagtttccatcatttagcgtgacaagtatgagtattattgtatcacttaaaacatatcttctccacactattttataaccagacgatccgtgtttaattcc

SEQ ID NO: 60956 - protein, 601 aa, Triticum aestivum
  peptide (1)..(601): Ceres Seq. ID no. 14301867
  misc_feature (102)..(293): Pfam Name: ABC transporter Pfam Description: ABC transporter
  misc_feature (62)..(598): Homolog of NCBI NO: 23956078 NR Description: ATP-binding cassette, sub-family F (GCN20),
  misc_feature (62)..(598): Homolog of NCBI NO: 27881506 NR Description: ATP-binding cassette, sub-family F, member 2
  misc_feature (62)..(598): Homolog of NCBI NO: 10947137 NR Description: ATP-binding cassette, sub-family F, member 2
  misc_feature (62)..(598): Homolog of NCBI NO: 27707592 NR Description: similar to ATP-binding cassette, sub-family F,
  misc_feature (26)..(598): Homolog of NCBI NO: 10179834 NR Description: iron inhibited ABC transporter 2 [Homo sapiens]
  misc_feature (27)..(598): Homolog of NCBI NO: 28502799 NR Description: Similar to ATP-binding cassette, sub-family F
  misc_feature (26)..(600): Homolog of NCBI NO: 28436765 NR Description: Similar to ATP-binding cassette, sub-family F
  misc_feature (21)..(554): Homolog of NCBI NO: 7573600 NR Description: ABC transporter homolog [Populus nigra]
  misc_feature (21)..(601): Homolog of NCBI NO: 15239436 NR Description: ABC transporter family protein [Arabidopsis
  misc_feature (21)..(601): Homolog of NCBI NO: 28071305 NR Description: putative ABC transporter [Oryza sativa (japonica
SLHTTSRRRPLAGRGIEIVYRRVAQTAAKRGAKSSAAASSSSASSAADKAANGIAALNLSDRTCTGVLASHPLSRDIHIESLSLTFHGHDLIVDSELELNYGRRYGLLGLNGCGKSTLLTAIGCRELPIPEHMDIHHLTREIEASDMSALQAVICCDEERVKLEKEAEILAAQDDGGGEALDLVYERLEAMDASTAEKRAAEILFGLGFDKQMQAKPTRDFSGGWRMRIALARALFMNPTILLLDEPTNHLDLEACVWLEEKLKNFERILVVISHSQDFLNGVCTNIIHMQNKTLKLYTGNYDQYVQTRSELEENQMKQYKWEQEQIANMKEYIARFGHGSAKLARQAQSKEKTLAKMERGGLAEKVVNDRILVFRFTDVGKLPPPVLQFADVTFGYTPDNLIYKNLDFGVDLDSRVALVGPNGAGKSTLLKLMTGDLSPLDGMVRRHNHLRIAQFHQHLTEKLDLDMPALQYMMREYPGNEEEKMRAAIGKFGLSGKAQVMPMKNLSDGQKARVIFAWLAFRQPQMLLLDEPTNHLDIETIDSLAEALKEWDGGLVLVSHDFRLINQVAQEIWVCENQAVTRWEGDIMDFKQHLKKRAGL

SEQ ID NO: 60957 - protein, 469 aa, Triticum aestivum
  peptide (1)..(469): Ceres Seq. ID no. 14301868
  misc_feature (1)..(161): Pfam Name: ABC transporter Pfam Description: ABC transporter
  misc_feature (1)..(466): Homolog of NCBI NO: 23956078 NR Description: ATP-binding cassette, sub-family F (GCN20),
  misc_feature (1)..(466): Homolog of NCBI NO: 27881506 NR Description: ATP-binding cassette, sub-family F, member 2
  misc_feature (1)..(466): Homolog of NCBI NO: 10947137 NR Description: ATP-binding cassette, sub-family F, member 2
  misc_feature (1)..(466): Homolog of NCBI NO: 27707592 NR Description: similar to ATP-binding cassette, sub-family F,
  misc_feature (1)..(466): Homolog of NCBI NO: 10179834 NR Description: iron inhibited ABC transporter 2 [Homo sapiens]
  misc_feature (1)..(466): Homolog of NCBI NO: 28502799 NR Description: Similar to ATP-binding cassette, sub-family F
  misc_feature (1)..(468): Homolog of NCBI NO: 28436765 NR Description: Similar to ATP-binding cassette, sub-family F
  misc_feature (1)..(422): Homolog of NCBI NO: 7573600 NR Description: ABC transporter homolog [Populus nigra]
  misc_feature (1)..(469): Homolog of NCBI NO: 15239436 NR Description: ABC transporter family protein [Arabidopsis
  misc_feature (1)..(469): Homolog of NCBI NO: 28071305 NR Description: putative ABC transporter [Oryza sativa (japonica
MDIHHLTREIEASDMSALQAVICCDEERVKLEKEAEILAAQDDGGGEALDLVYERLEAMDASTAEKRAAEILFGLGFDKQMQAKPTRDFSGGWRMRIALARALFMNPTILLLDEPTNHLDLEACVWLEEKLKNFERILVVISHSQDFLNGVCTNIIHMQNKTLKLYTGNYDQYVQTRSELEENQMKQYKWEQEQIANMKEYIARFGHGSAKLARQAQSKEKTLAKMERGGLAEKVVNDRILVFRFTDVGKLPPPVLQFADVTFGYTPDNLIYKNLDFGVDLDSRVALVGPNGAGKSTLLKLMTGDLSPLDGMVRRHNHLRIAQFHQHLTEKLDLDMPALQYMMREYPGNEEEKMRAAIGKFGLSGKAQVMPMKNLSDGQKARVIFAWLAFRQPQMLLLDEPTNHLDIETIDSLAEALKEWDGGLVLVSHDFRLINQVAQEIWVCENQAVTRWEGDIMDFKQHLKKRAGL

SEQ ID NO: 60958 - protein, 455 aa, Triticum aestivum
  peptide (1)..(455): Ceres Seq. ID no. 14301869
  misc_feature (1)..(147): Pfam Name: ABC transporter Pfam Description: ABC transporter
  misc_feature (1)..(452): Homolog of NCBI NO: 23956078 NR Description: ATP-binding cassette, sub-family F (GCN20),
  misc_feature (1)..(452): Homolog of NCBI NO: 27881506 NR Description: ATP-binding cassette, sub-family F, member 2
  misc_feature (1)..(452): Homolog of NCBI NO: 10947137 NR Description: ATP-binding cassette, sub-family F, member 2
  misc_feature (1)..(452): Homolog of NCBI NO: 27707592 NR Description: similar to ATP-binding cassette, sub-family F,
  misc_feature (1)..(452): Homolog of NCBI NO: 10179834 NR Description: iron inhibited ABC transporter 2 [Homo sapiens]
  misc_feature (1)..(452): Homolog of NCBI NO: 28502799 NR Description: Similar to ATP-binding cassette, sub-family F
  misc_feature (1)..(454): Homolog of NCBI NO: 28436765 NR Description: Similar to ATP-binding cassette, sub-family F
  misc_feature (1)..(408): Homolog of NCBI NO: 7573600 NR Description: ABC transporter homolog [Populus nigra]
  misc_feature (1)..(455): Homolog of NCBI NO: 15239436 NR Description: ABC transporter family protein [Arabidopsis
  misc_feature (1)..(455): Homolog of NCBI NO: 28071305 NR Description: putative ABC transporter [Oryza sativa (japonica
MSALQAVICCDEERVKLEKEAEILAAQDDGGGEALDLVYERLEAMDASTAEKRAAEILFGLGFDKQMQAKPTRDFSGGWRMRIALARALFMNPTILLLDEPTNHLDLEACVWLEEKLKNFERILVVISHSQDFLNGVCTNIIHMQNKTLKLYTGNYDQYVQTRSELEENQMKQYKWEQEQIANMKEYIARFGHGSAKLARQAQSKEKTLAKMERGGLAEKVVNDRILVFRFTDVGKLPPPVLQFADVTFGYTPDNLIYKNLDFGVDLDSRVALVGPNGAGKSTLLKLMTGDLSPLDGMVRRHNHLRIAQFHQHLTEKLDLDMPALQYMMREYPGNEEEKMRAAIGKFGLSGKAQVMPMKNLSDGQKARVIFAWLAFRQPQMLLLDEPTNHLDIETIDSLAEALKEWDGGLVLVSHDFRLINQVAQEIWVCENQAVTRWEGDIMDFKQHLKKRAGL

SEQ ID NO: 60959 - DNA, 1747 bp, Triticum aestivum
  misc_feature (1)..(1747): Ceres Seq. ID no. 13661082
ttttttctacactaggactagactgatcgccctcctcctgaagtctaaaccctcactccccttcaccactgctccsgcagccktcgttcrgccttgcccctcycgccgaaccaaggagtaccgggcgcggcggcggcggctrccgcccgcagggccagcatggcgtttctcttcaacaaattccaggaggcaatcaaaacacttgctaagagtccaagctttgctcgagacccacggcatcttcagtttgaygctgacgtgaatcgtttatttctctataccagctataatcgtttgggaragcattctgaagaaaaggacgccgaggagattattgamytggctagcaaagcatctgttactgaccagcagaarcaagtkcagsraaatgttcattatcaacttaagcatatatgcaaatcaatggataacattcttcgtcctgatacaaaagatccatcacaatcttcttctgatgcttataataattctcgacgaagtggcttgagtttggccgttggcacaggagttgcagctgcaaacaagccagctgttcctgctacgcgacctttaactcaagctgaattgtcaaacaaattcagggatcagtttggctacacccttgacatcaagccgtcactaatacctcacaaagatgcagggcaaggtctgttcttatctggagaagctaatattggtgctgtcctagccatctaccctggagttatatactcacctgcgtattatcgatatatccctggatacccaagaatcgatgcgtgcaacagctatcttatcacaagatatgacggaacaataatcaacgcgaaaccatggcatttaggtggtgaaacaagagaaatatgggatggttcagatccagtggattacaatacaacgccacccaaaagcccagagagcaactctgaccgggcgtggaggatgcttaacaagcccctgcagaagagtggcactgaaaacttcggggatgtgcttgaacggcgaaatccactagcctttggtcatttcgcgaaccacccaccgggagggtcgactcctaatgtcatgatctgcccatatgattttccactgacagagaaggacatgagagtatacatcccgaacattgcatttggtggtgaagagcccgttacaatgaagaggtttggctccttctggttcaagtccagagcccctggtaaagagactggggagtcaccggttctgaggacgctagtaagtacgaggtccgtatgtgacgaagagctctacctgaactaccggtacagctcaaaggggcggccagactggtataccccagtggatgaagaagaggataagaggagatggagctaggtctgaaccgacctgcctgtaatgttttgttccaatgtttctttcatcagtaactggtgaactccagaagccgattcggccattctttctatgtttcagtcaaccgcataggtagtgtctctgctgaactcttctcgcaggtcttttgtggcaataaaaagaacaccagttacgtctcatgttatttgaggtagtatctgtattatccatcccgttgttgtaaggggatatttacgagcttatcactcaatctgtgtcagcagtgccatacttatttgctttcggaatagtaacaagctatgccatattgccagcgaactgcttctcatctaaataaatactacctcagtaacttaatataagacatttttttgacactattacagtgtcc

SEQ ID NO: 60960 - protein, 398 aa, Triticum aestivum
  peptide (1)..(398): Ceres Seq. ID no. 15220069
  misc_feature (1)..(326): Homolog of NCBI NO: 11358190 NR Description: hypothetical protein T22D6.210 - Arabidopsis
  misc_feature (1)..(390): Homolog of NCBI NO: 26453064 NR Description: unknown protein [Arabidopsis thaliana]
  misc_feature (1)..(390): Homolog of NCBI NO: 15241572 NR Description: hypothetical protein (fragment at BAC end)
  misc_feature (1)..(398): Homolog of NCBI NO: 22327005 NR Description: expressed protein [Arabidopsis thaliana]
  misc_feature (1)..(398): Homolog of NCBI NO: 10177809 NR Description: gene_id:MKD15.6~unknown protein [Arabidopsis
  misc_feature (31)..(31): Xaa is any aa, unknown or other
  misc_feature (48)..(48): Xaa is any aa, unknown or other
  misc_feature (60)..(60): Xaa is any aa, unknown or other
  misc_feature (61)..(61): Xaa is any aa, unknown or other
  misc_feature (72)..(72): Xaa is any aa, unknown or other
  misc_feature (74)..(74): Xaa is any aa, unknown or other
  misc_feature (76)..(76): Xaa is any aa, unknown or other
MAFLFNKFQEAIKTLAKSPSFARDPRHLQFXADVNRLFLYTSYNRLGXHSEEKDAEEIIXXASKASVTDQQXQXQXNVHYQLKHICKSMDNILRPDTKDPSQSSSDAYNNSRRSGLSLAVGTGVAAANKPAVPATRPLTQAELSNKFRDQFGYTLDIKPSLIPHKDAGQGLFLSGEANIGAVLAIYPGVIYSPAYYRYIPGYPRIDACNSYLITRYDGTIINAKPWHLGGETREIWDGSDPVDYNTTPPKSPESNSDRAWRMLNKPLQKSGTENFGDVLERRNPLAFGHFANHPPGGSTPNVMICPYDFPLTEKDMRVYIPNIAFGGEEPVTMKRFGSFWFKSRAPGKETGESPVLRTLVSTRSVCDEELYLNYRYSSKGRPDWYTPVDEEEDKRRWS

SEQ ID NO: 60961 - protein, 310 aa, Triticum aestivum
  peptide (1)..(310): Ceres Seq. ID no. 15220070
  misc_feature (1)..(238): Homolog of NCBI NO: 11358190 NR Description: hypothetical protein T22D6.210 - Arabidopsis
  misc_feature (1)..(302): Homolog of NCBI NO: 26453064 NR Description: unknown protein [Arabidopsis thaliana]
  misc_feature (1)..(302): Homolog of NCBI NO: 15241572 NR Description: hypothetical protein (fragment at BAC end)
  misc_feature (1)..(310): Homolog of NCBI NO: 22327005 NR Description: expressed protein [Arabidopsis thaliana]
  misc_feature (1)..(310): Homolog of NCBI NO: 10177809 NR Description: gene_id:MKD15.6~unknown protein [Arabidopsis
MDNILRPDTKDPSQSSSDAYNNSRRSGLSLAVGTGVAAANKPAVPATRPLTQAELSNKFRDQFGYTLDIKPSLIPHKDAGQGLFLSGEANIGAVLAIYPGVIYSPAYYRYIPGYPRIDACNSYLITRYDGTIINAKPWHLGGETREIWDGSDPVDYNTTPPKSPESNSDRAWRMLNKPLQKSGTENFGDVLERRNPLAFGHFANHPPGGSTPNVMICPYDFPLTEKDMRVYIPNIAFGGEEPVTMKRFGSFWFKSRAPGKETGESPVLRTLVSTRSVCDEELYLNYRYSSKGRPDWYTPVDEEEDKRRWS

SEQ ID NO: 60962 - DNA, 1246 bp, Triticum aestivum
  misc_feature (1)..(1246): Ceres Seq. ID no. 15178266
agtcccacgcactcgagagtcgagggggtctgtcccatccttatctccgctagctagctcgctataggcccctggtctttactcttcaggccaaacagaagcagctactaggcgaaggacacatccgcattatccatcgatcggccttgtcctgtccgcgggtggcgccggacgccggtgacaaccgacagggcagcaagcgtggatcatccgagcggaagcggaagcgctcctcctccggctccggggcaccgtcgcgacagcagaggcccgccgccatcacctcgtccgccgccgccgccgccgccgccgccggcgcaacaacgaggtgaccaccatgggcatggagagccggaggtcgtcggggaggaggctgctggcgttggcgttgcgacgacgagctaccagcaccagcagtacgagctcgccgtcatggtggcggcgctcacccacgtcatcagctccactcgaccgggaccggcggccgccgccggtgcaaccgcgcccgggcagcaagctgtgacccgccaacacagcgctcctctggccgtggcggcgacgtcgtcgtcatcaacggcgtcggagcagcagcagcagcgtccgcggtaccgtggcgtacggcagcggccgtggggcaagtgggcggcggagatccgcgaccccgtgaaggcggcgcgcgtatggctgggcaccttcgacacggccgaggacgccgcacgcgcctacgacgccgccgcgctccgcttcaagggcgccaaggccaagctcaacttccctggcgccggcggtgcgcctgcgccaccccgccatgccgtcggccagctcctggcgcccggaggcggggcatcgccgtcgatgcggcagcagcagcgacccgtggtggtggccttccgtccgcagattaactccctggcagccgttgctcgggaggagttcccggacctccaccggtatgcgcacatactgcagagcggtgacgtggacctgcgggctgttgcagccggcgggaacacaccggggcagtcgtcttcgtcgacgccggcgcacgactcgaggtcgccgccccggccggatgatcgcggatatggcgagagaagtgcaggccctggctgctaactgagtagtactcttactgaatacgtactgatcgacgtgtacatgagaaaaacaagttctgtttcttttcatctttttgtttgcgtatttccttatttatttttggtaaaatgaatagacacaacactac

SEQ ID NO: 60963 - protein, 227 aa, Triticum aestivum
  peptide (1)..(227): Ceres Seq. ID no. 15178267
  misc_feature (56)..(115): Pfam Name: AP2 domain Pfam Description: AP2 domain
  misc_feature (37)..(115): Homolog of NCBI NO: 15226153 NR Description: AP2 domain transcription factor family
  misc_feature (37)..(127): Homolog of NCBI NO: 2281637 NR Description: AP2 domain containing protein RAP2.6 [Arabidopsis
  misc_feature (1)..(115): Homolog of NCBI NO: 15240379 NR Description: AP2 domain transcription factor family
  misc_feature (1)..(124): Homolog of NCBI NO: 34221731 NR Description: putative AP2 domain transcription factor
  misc_feature (1)..(124): Homolog of NCBI NO: 15240610 NR Description: putative protein; protein id: At5g50080.1
  misc_feature (10)..(115): Homolog of NCBI NO: 15238232 NR Description: AP2 domain transcription factor, putative
  misc_feature (1)..(152): Homolog of NCBI NO: 34897546 NR Description: OSJNBa0042L16.10 [Oryza sativa (japonica
  misc_feature (1)..(127): Homolog of NCBI NO: 15218275 NR Description: AP2 domain transcription factor RAP2.6
  misc_feature (1)..(203): Homolog of NCBI NO: 38347164 NR Description: OSJNBa0039C07.10 [Oryza sativa (japonica
  misc_feature (1)..(214): Homolog of NCBI NO: 33519168 NR Description: AP2 domain-containing protein AP29
MVAALTHVISSTRPGPAAAAGATAPGQQAVTRQHSAPLAVAATSSSSTASEQQQQRPRYRGVRQRPWGKWAAEIRDPVKAARVWLGTFDTAEDAARAYDAAALRFKGAKAKLNFPGAGGAPAPPRHAVGQLLAPGGGASPSMRQQQRPVVVAFRPQINSLAAVAREEFPDLHRYAHILQSGDVDLRAVAAGGNTPGQSSSSTPAHDSRSPPRPDDRGYGERSAGPGC

SEQ ID NO: 60964 - DNA, 1687 bp, Triticum aestivum
  misc_feature (1)..(1687): Ceres Seq. ID no. 13663060
agaacatcataatcgaaaatcgcctccgctcgctcccatcctcattccccagtcgccgcccaagtcaaaaagagggggaagcttctccaccagagtccccaagcccatgaacgactagtcgctgcgaagcaccaaccctagaacccaaccctactctctcccctcctcggctcctcccctcgcgagcggcgacgaagaggccatggatacctccggcggcggcaccgccgcgggcggggccgcgcagatccaggggatggcgacacacggcggccgctacgtgctctacaacgtctacggcaacctcttcgaggtcgcctccaagtacgcccctcccatccgccccatcggccgaggcgcctacggcattgtctgcgcggcggttagttcggatacaggagaggaggttgcgatcaagaagattggaaatgcgtttgacaaccacatcgatgccaagcggacgctgagagaaataaagcttcttcgccacatggaccatgagaatattcttgccataaaggatttaatacgccccccaagaagagatgattttaaggatgtgtacattgttactgagttgatggacaccgacctccatcagatcattcgctcaaatcaatcattgactgatgaccattgccagtacttcttgtatcagttgcttcgagggctaaaatatgtgcactcagcaaatgtcttgcaccgtgatctgaagccaagcaatttgttcctaaacgcaaattgcgatctcaagattgcagactttgggcttgcaaggaccacttcagaaaccgatctcatgacagagtatgtggtcactcgttggtaccgagcaccagagttgctgttgaactgttcacaatatactgctgctattgatgtctggtcagttgggtgtatacttggtgaaattattactcgtcaacccctatttcctggaagagattacatccaacagttaaaattgatcactgagctgataggatcaccagatgattcgagcctgggatttcttcggagtgacaatgcacgaagatacatgaagcaattaccacagtacccaaggcaggacttccgcctgcgcttccgcaacatgtctgatggtgcagttgatctgttagaaagaatgctggtgtttgacccaagcagacgcatcactgttgacgaggctctgcaccacccatacttggcttctcttcatgacatcaatgaagaacccacttgcccggcacctttcagctttgattttgagcaaccatcttttacagaagaacatatgaaagagctcatctggagggaaactttagcatttaaccctgatcctccctactaagagccaagaccaaattaccagctgagggcattgaagatctacctctagctctagtgaagccgatatttccatgtcttgtgcatctatttattttatgctcgcttattgggcgaatgggcatggattatttgttgctgtaactatttcttttggggcctttctgaagaaacgacatttgtatgagatggcttgcgcctgggcttgtattataccggttgattgaataaattcttcttgtgtatctaaggcttgtaattttgtgtacacttatttaaacatccaaaaaaaaaaaaaaaaaagcttatcgataccgtcgacctgtttaaacacaataaagttggaactggagggggg

SEQ ID NO: 60965 - protein, 376 aa, Triticum aestivum
  peptide (1)..(376): Ceres Seq. ID no. 13663061
  misc_feature (44)..(329): Pfam Name: Protein kinase domain Pfam Description: Protein kinase domain
  misc_feature (1)..(373): Homolog of NCBI NO: 29500879 NR Description: mitogen-activated protein kinase
  misc_feature (12)..(374): Homolog of NCBI NO: 21431796 NR Description: Mitogen-activated protein kinase homolog 5 (MAP
  misc_feature (17)..(372): Homolog of NCBI NO: 18378855 NR Description: mitogen-activated protein kinase (MAPK), putative
  misc_feature (1)..(373): Homolog of NCBI NO: 21165527 NR Description: mitogen-activated protein kinase [Solanum
  misc_feature (9)..(372): Homolog of NCBI NO: 2129645 NR Description: mitogen-activated protein kinase 4 (EC 2.7.1.-) -
  misc_feature (1)..(373): Homolog of NCBI NO: 27312014 NR Description: mitogen-activated protein kinase [Malus
  misc_feature (9)..(372): Homolog of NCBI NO: 15234152 NR Description: mitogen-activated protein kinase (MAPK), putative
  misc_feature (16)..(375): Homolog of NCBI NO: 2499613 NR Description: MITOGEN-ACTIVATED PROTEIN KINASE HOMOLOG MMK2
  misc_feature (16)..(375): Homolog of NCBI NO: 2129855 NR Description: mitogen-activated protein kinase MMK2 (EC
  misc_feature (1)..(374): Homolog of NCBI NO: 25052804 NR Description: mitogen-activated protein kinase 4 [Petroselinum
MDTSGGGTAAGGAAQIQGMATHGGRYVLYNVYGNLFEVASKYAPPIRPIGRGAYGIVCAAVSSDTGEEVAIKKIGNAFDNHIDAKRTLREIKLLRHMDHENILAIKDLIRPPRRDDFKDVYIVTELMDTDLHQIIRSNQSLTDDHCQYFLYQLLRGLKYVHSANVLHRDLKPSNLFLNANCDLKIADFGLARTTSETDLMTEYVVTRWYRAPELLLNCSQYTAAIDVWSVGCILGEIITRQPLFPGRDYIQQLKLITELIGSPDDSSLGFLRSDNARRYMKQLPQYPRQDFRLRFRNMSDGAVDLLERMLVFDPSRRITVDEALHHPYLASLHDINEEPTCPAPFSFDFEQPSFTEEHMKELIWRETLAFNPDPPY

SEQ ID NO: 60966 - protein, 358 aa, Triticum aestivum
  peptide (1)..(358): Ceres Seq. ID no. 13663062
  misc_feature (26)..(311): Pfam Name: Protein kinase domain Pfam Description: Protein kinase domain
  misc_feature (1)..(355): Homolog of NCBI NO: 29500879 NR Description: mitogen-activated protein kinase
  misc_feature (1)..(356): Homolog of NCBI NO: 21431796 NR Description: Mitogen-activated protein kinase homolog 5 (MAP
  misc_feature (1)..(354): Homolog of NCBI NO: 18378855 NR Description: mitogen-activated protein kinase (MAPK), putative
  misc_feature (1)..(355): Homolog of NCBI NO: 21165527 NR Description: mitogen-activated protein kinase [Solanum
  misc_feature (1)..(354): Homolog of NCBI NO: 2129645 NR Description: mitogen-activated protein kinase 4 (EC 2.7.1.-) -
  misc_feature (1)..(355): Homolog of NCBI NO: 27312014 NR Description: mitogen-activated protein kinase [Malus
  misc_feature (1)..(354): Homolog of NCBI NO: 15234152 NR Description: mitogen-activated protein kinase (MAPK), putative
  misc_feature (1)..(357): Homolog of NCBI NO: 2499613 NR Description: MITOGEN-ACTIVATED PROTEIN KINASE HOMOLOG MMK2
  misc_feature (1)..(357): Homolog of NCBI NO: 2129855 NR Description: mitogen-activated protein kinase MMK2 (EC
  misc_feature (1)..(356): Homolog of NCBI NO: 25052804 NR Description: mitogen-activated protein kinase 4 [Petroselinum
MATHGGRYVLYNVYGNLFEVASKYAPPIRPIGRGAYGIVCAAVSSDTGEEVAIKKIGNAFDNHIDAKRTLREIKLLRHMDHENILAIKDLIRPPRRDDFKDVYIVTELMDTDLHQIIRSNQSLTDDHCQYFLYQLLRGLKYVHSANVLHRDLKPSNLFLNANCDLKIADFGLARTTSETDLMTEYVVTRWYRAPELLLNCSQYTAAIDVWSVGCILGEIITRQPLFPGRDYIQQLKLITELIGSPDDSSLGFLRSDNARRYMKQLPQYPRQDFRLRFRNMSDGAVDLLERMLVFDPSRRITVDEALHHPYLASLHDINEEPTCPAPFSFDFEQPSFTEEHMKELIWRETLAFNPDPPY

SEQ ID NO: 60967 - protein, 280 aa, Triticum aestivum
  peptide (1)..(280): Ceres Seq. ID no. 13663063
  misc_feature (1)..(233): Pfam Name: Protein kinase domain Pfam Description: Protein kinase domain
  misc_feature (1)..(277): Homolog of NCBI NO: 29500879 NR Description: mitogen-activated protein kinase
  misc_feature (1)..(278): Homolog of NCBI NO: 21431796 NR Description: Mitogen-activated protein kinase homolog 5 (MAP
  misc_feature (1)..(276): Homolog of NCBI NO: 18378855 NR Description: mitogen-activated protein kinase (MAPK), putative
  misc_feature (1)..(277): Homolog of NCBI NO: 21165527 NR Description: mitogen-activated protein kinase [Solanum
  misc_feature (1)..(276): Homolog of NCBI NO: 2129645 NR Description: mitogen-activated protein kinase 4 (EC 2.7.1.-) -
  misc_feature (1)..(277): Homolog of NCBI NO: 27312014 NR Description: mitogen-activated protein kinase [Malus
  misc_feature (1)..(276): Homolog of NCBI NO: 15234152 NR Description: mitogen-activated protein kinase (MAPK), putative
  misc_feature (1)..(279): Homolog of NCBI NO: 2499613 NR Description: MITOGEN-ACTIVATED PROTEIN KINASE HOMOLOG MMK2
  misc_feature (1)..(279): Homolog of NCBI NO: 2129855 NR Description: mitogen-activated protein kinase MMK2 (EC
  misc_feature (1)..(278): Homolog of NCBI NO: 25052804 NR Description: mitogen-activated protein kinase 4 [Petroselinum
MDHENILAIKDLIRPPRRDDFKDVYIVTELMDTDLHQIIRSNQSLTDDHCQYFLYQLLRGLKYVHSANVLHRDLKPSNLFLNANCDLKIADFGLARTTSETDLMTEYVVTRWYRAPELLLNCSQYTAAIDVWSVGCILGEIITRQPLFPGRDYIQQLKLITELIGSPDDSSLGFLRSDNARRYMKQLPQYPRQDFRLRFRNMSDGAVDLLERMLVFDPSRRITVDEALHHPYLASLHDINEEPTCPAPFSFDFEQPSFTEEHMKELIWRETLAFNPDPPY

SEQ ID NO: 60968 - DNA, 1121 bp, Triticum aestivum
  misc_feature (1)..(1121): Ceres Seq. ID no. 12784351
aacagacggccggccggaacatgcccgctcgtcgggactcgggagtaccgaccaatgctcgccgcctgccgatcagaagtcgcgacgagctcacctaatattccacctctccctgaccgccacccaacaacctaaccacatggccgtataatactccactgcagaagcgaggtgctcgtgaagtcggcgtgatatccggagtagccagcaagcccagcccagtggccgatccgtgatccgtgttggagagagcgagggagagaagatgcggccgcggctggtgctcttcggcgactcaatcaccgagcagtcctttgcccccggcggctggggcgccgccctcgcggagcacttcgcgaggcaggcggatgtggtgctgcgcgggctcagcgggtacaacacgcgctgggcgctgaaggtgctggatagagccatggagggggcggccgacggcggcgcggacccggcggcagtgacggtgttcttcggcgccaacgacgccaccctgcccgacgagatgcaggcgcaccagcacgtgccgctcggggagtacaaggacaacctgcgcgcgatctgtgcctacttcaagaataagtggccctccgctgccatcatactcatcacccctccaccgatccacgagccggcgaggattcgagacatatatggagataatgacccttcaagacagcctgaaagaacaaatgaagctgctggcacttatgcacaagcatgcataactgttgctaaagaattgggtcatccagttatagacatctggacacagatgcagcaatgtcctgattggcaaacatctgcattaagtgacgggctacatttcaccccgtccgggaacaaaattttgttcgacgaggtgctgaagacactggaaagtgttggtttcagccagcacagtctccggtccgatctccctctcttccatgaaattgaccccaaggacccactgaaagcctttgagatttgaagaaggtatctgccgcatggttggattcccagaaggaaggcactatgactcagctttatgttctgaaaacaaactatgttggtttggtgactgatgtgttctgtaacatggatatattgtgcctatgttctatgtc

SEQ ID NO: 60969 - protein, 239 aa, Triticum aestivum
  peptide (1)..(239): Ceres Seq. ID no. 12784352
  misc_feature (5)..(202): Pfam Name: GDSL-like Lipase/Acylhydrolase Pfam Description: GDSL-like Lipase/Acylhydrolase
  misc_feature (1)..(229): Homolog of NCBI NO: 18404664 NR Description: expressed protein
  misc_feature (1)..(229): Homolog of NCBI NO: 16974631 NR Description: At2g38180/F16M14.11 [Arabidopsis thaliana]
  misc_feature (2)..(236): Homolog of NCBI NO: 21554235 NR Description: CPRD49 [Arabidopsis thaliana]
  misc_feature (3)..(233): Homolog of NCBI NO: 27478045 NR Description: hypothetical protein XP_209490 [Homo sapiens]
  misc_feature (3)..(233): Homolog of NCBI NO: 27754071 NR Description: hypothetical protein 4833421E05Rik; RIKEN cDNA
  misc_feature (1)..(238): Homolog of NCBI NO: 15242002 NR Description: putative protein
  misc_feature (1)..(238): Homolog of NCBI NO: 37535366 NR Description: putative esterase [Oryza sativa (japonica
  misc_feature (1)..(238): Homolog of NCBI NO: 38454102 NR Description: At5g45920 [Arabidopsis thaliana]
  misc_feature (1)..(238): Homolog of NCBI NO: 15242539 NR Description: putative protein; protein id: At5g45920.1
  misc_feature (1)..(239): Homolog of NCBI NO: 34903948 NR Description: OSJNBa0038J17.19 [Oryza sativa (japonica
MRPRLVLFGDSITEQSFAPGGWGAALAEHFARQADVVLRGLSGYNTRWALKVLDRAMEGAADGGADPAAVTVFFGANDATLPDEMQAHQHVPLGEYKDNLRAICAYFKNKWPSAAIILITPPPIHEPARIRDIYGDNDPSRQPERTNEAAGTYAQACITVAKELGHPVIDIWTQMQQCPDWQTSALSDGLHFTPSGNKILFDEVLKTLESVGFSQHSLRSDLPLFHEIDPKDPLKAFEI

SEQ ID NO: 60970 - protein, 183 aa, Triticum aestivum
  peptide (1)..(183): Ceres Seq. ID no. 12784353
  misc_feature (1)..(146): Pfam Name: GDSL-like Lipase/Acylhydrolase Pfam Description: GDSL-like Lipase/Acylhydrolase
  misc_feature (1)..(173): Homolog of NCBI NO: 18404664 NR Description: expressed protein
  misc_feature (1)..(173): Homolog of NCBI NO: 16974631 NR Description: At2g38180/F16M14.11 [Arabidopsis thaliana]
  misc_feature (1)..(180): Homolog of NCBI NO: 21554235 NR Description: CPRD49 [Arabidopsis thaliana]
  misc_feature (1)..(177): Homolog of NCBI NO: 27478045 NR Description: hypothetical protein XP_209490 [Homo sapiens]
  misc_feature (1)..(177): Homolog of NCBI NO: 27754071 NR Description: hypothetical protein 4833421E05Rik; RIKEN cDNA
  misc_feature (1)..(182): Homolog of NCBI NO: 15242002 NR Description: putative protein
  misc_feature (1)..(182): Homolog of NCBI NO: 37535366 NR Description: putative esterase [Oryza sativa (japonica
  misc_feature (1)..(182): Homolog of NCBI NO: 38454102 NR Description: At5g45920 [Arabidopsis thaliana]
  misc_feature (1)..(182): Homolog of NCBI NO: 15242539 NR Description: putative protein; protein id: At5g45920.1
  misc_feature (1)..(183): Homolog of NCBI NO: 34903948 NR Description: OSJNBa0038J17.19 [Oryza sativa (japonica
MEGAADGGADPAAVTVFFGANDATLPDEMQAHQHVPLGEYKDNLRAICAYFKNKWPSAAIILITPPPIHEPARIRDIYGDNDPSRQPERTNEAAGTYAQACITVAKELGHPVIDIWTQMQQCPDWQTSALSDGLHFTPSGNKILFDEVLKTLESVGFSQHSLRSDLPLFHEIDPKDPLKAFEI

SEQ ID NO: 60971 - protein, 155 aa, Triticum aestivum
  peptide (1)..(155): Ceres Seq. ID no. 12784354
  misc_feature (1)..(118): Pfam Name: GDSL-like Lipase/Acylhydrolase Pfam Description: GDSL-like Lipase/Acylhydrolase
  misc_feature (1)..(145): Homolog of NCBI NO: 18404664 NR Description: expressed protein
  misc_feature (1)..(145): Homolog of NCBI NO: 16974631 NR Description: At2g38180/F16M14.11 [Arabidopsis thaliana]
  misc_feature (1)..(152): Homolog of NCBI NO: 21554235 NR Description: CPRD49 [Arabidopsis thaliana]
  misc_feature (1)..(149): Homolog of NCBI NO: 27478045 NR Description: hypothetical protein XP_209490 [Homo sapiens]
  misc_feature (1)..(149): Homolog of NCBI NO: 27754071 NR Description: hypothetical protein 4833421E05Rik; RIKEN cDNA
  misc_feature (1)..(154): Homolog of NCBI NO: 15242002 NR Description: putative protein
  misc_feature (1)..(154): Homolog of NCBI NO: 37535366 NR Description: putative esterase [Oryza sativa (japonica
  misc_feature (1)..(154): Homolog of NCBI NO: 38454102 NR Description: At5g45920 [Arabidopsis thaliana]
  misc_feature (1)..(154): Homolog of NCBI NO: 15242539 NR Description: putative protein; protein id: At5g45920.1
  misc_feature (1)..(155): Homolog of NCBI NO: 34903948 NR Description: OSJNBa0038J17.19 [Oryza sativa (japonica
MQAHQHVPLGEYKDNLRAICAYFKNKWPSAAIILITPPPIHEPARIRDIYGDNDPSRQPERTNEAAGTYAQACITVAKELGHPVIDIWTQMQQCPDWQTSALSDGLHFTPSGNKILFDEVLKTLESVGFSQHSLRSDLPLFHEIDPKDPLKAFEI

SEQ ID NO: 60972 - DNA, 1275 bp, Triticum aestivum
  misc_feature (1)..(1275): Ceres Seq. ID no. 15225252
attcaaacatttttgtctcagacaaaagcatctgaacacactcaagaacatatatacatccccaccaaacaaacaaaaataaccatggaagtaaatcaagaagcttcatcaatgccagtagttcccatagatagtttctcttacagttgggtagttaactgtccttctttagaagattccattgatgattatcatcaaacctacgaagattcttcttcttccttcatagagatggatccaagattgcctccttcgagaagattcttcatcaacaaatcccatgaaagtagcttcaagttcgataacttcgtctctttctccgacgaagatcactctttagttcacgccgacgagcttttccgcgacggctacgtcatgccttatctatcaaaagccacgtcagcagctacggaagaagaatatgagccgttggacaagaaaacggagaagaagatggagacacgtgacattaagagcaagtctccttcttcttgtagaaagttgagaagagtttcgaaatgggttttgttgttattgacgccactgtgtaagagattaaggagatgtagaaccgctggatcatccggaggtatcggtatcgactctaggatccgtgtaacgacgttgtctagaagcagagttcattctgatgaaatgacttcgtcgccaagaataagtgttgcagatgattattattggagaaggtcttgtgactcagagagctccatttacgaagccgttcttcattgcaagaaatctttcgagaaatgagacttaagaatccatggaaaaggagcgggtagagtagagatggagaatattaagaagaataagcaaattacattacacgttactcatggagtgggaaagagagagcaacttgtgttgtgtctttttgttgtttctctctcttgaattaaagagattgatgtgatgattccatgtgaatgtgtcatctgatttgaatctagaacttttttttacatgagtgggcacatatatagggcagctagcagaatcaagaaaatattttcagattttcttggctattatggtttcttttcatatatgtaatcctatatgtatcttatatgtgcctacccatgttttactttctggtccaattgtgttttgaatattcttactttttgtgaaaattttgtcttttattgtctttataaatcatatgtggatgtcatcatatatatgcatatgattgaactccttttcttatcataattgtaattcaaatcaattaaatctaacaaagagaag

SEQ ID NO: 60973 - protein, 256 aa, Triticum aestivum
  peptide (1)..(256): Ceres Seq. ID no. 15225253
  misc_feature (29)..(254): Homolog of NCBI NO: 10177104 NR Description: gene_id:MXC20.13~unknown protein [Arabidopsis
  misc_feature (29)..(256): Homolog of NCBI NO: 21553508 NR Description: unknown [Arabidopsis thaliana]
  misc_feature (29)..(256): Homolog of NCBI NO: 18423445 NR Description: expressed protein [Arabidopsis thaliana]
IQTFLSQTKASEHTQEHIYIPTKQTKITMEVNQEASSMPVVPIDSFSYSWVVNCPSLEDSIDDYHQTYEDSSSSFIEMDPRLPPSRRFFINKSHESSFKFDNFVSFSDEDHSLVHADELFRDGYVMPYLSKATSAATEEEYEPLDKKTEKKMETRDIKSKSPSSCRKLRRVSKWVLLLLTPLCKRLRRCRTAGSSGGIGIDSRIRVTTLSRSRVHSDEMTSSPRISVADDYYWRRSCDSESSIYEAVLHCKKSFEK

SEQ ID NO: 60974 - protein, 228 aa, Triticum aestivum
  peptide (1)..(228): Ceres Seq. ID no. 15225254
  misc_feature (1)..(226): Homolog of NCBI NO: 10177104 NR Description: gene_id:MXC20.13~unknown protein [Arabidopsis
  misc_feature (1)..(228): Homolog of NCBI NO: 21553508 NR Description: unknown [Arabidopsis thaliana]
  misc_feature (1)..(228): Homolog of NCBI NO: 18423445 NR Description: expressed protein [Arabidopsis thaliana]
MEVNQEASSMPVVPIDSFSYSWVVNCPSLEDSIDDYHQTYEDSSSSFIEMDPRLPPSRRFFINKSHESSFKFDNFVSFSDEDHSLVHADELFRDGYVMPYLSKATSAATEEEYEPLDKKTEKKMETRDIKSKSPSSCRKLRRVSKWVLLLLTPLCKRLRRCRTAGSSGGIGIDSRIRVTTLSRSRVHSDEMTSSPRISVADDYYWRRSCDSESSIYEAVLHCKKSFEK

SEQ ID NO: 60975 - protein, 219 aa, Triticum aestivum
  peptide (1)..(219): Ceres Seq. ID no. 15225255
  misc_feature (1)..(217): Homolog of NCBI NO: 10177104 NR Description: gene_id:MXC20.13~unknown protein [Arabidopsis
  misc_feature (1)..(219): Homolog of NCBI NO: 21553508 NR Description: unknown [Arabidopsis thaliana]
  misc_feature (1)..(219): Homolog of NCBI NO: 18423445 NR Description: expressed protein [Arabidopsis thaliana]
MPVVPIDSFSYSWVVNCPSLEDSIDDYHQTYEDSSSSFIEMDPRLPPSRRFFINKSHESSFKFDNFVSFSDEDHSLVHADELFRDGYVMPYLSKATSAATEEEYEPLDKKTEKKMETRDIKSKSPSSCRKLRRVSKWVLLLLTPLCKRLRRCRTAGSSGGIGIDSRIRVTTLSRSRVHSDEMTSSPRISVADDYYWRRSCDSESSIYEAVLHCKKSFEK

SEQ ID NO: 60976 - DNA, 955 bp, Triticum aestivum
  misc_feature (1)..(955): Ceres Seq. ID no. 12627215
gtcaaagcaaaagctaaatcatcttcctctcgtcaccaatcaaatggcgtctttgtcttcaatgcagatggttcacacttctcagattggtgttaagtcgcagttagtttcttctgcaaaccgaacatctccatcagtttcctctggntctgcattgtcttcgagactacactatgcagcaagtttccctctcaagaagcaattctcaggagcttatgcgaccatcaagaaccagagaacagcttgtgttaaatcaatggcagctgaggaagaggaagtgatagaacctcaggctaaagtgacgaacaaggtttactttgatgttgagattggtggtgaagtcgctggaaggattgtgatgggtctgttcggtgacgtcgtgcccaaaaccgttgagaacttccgtgtcttgtgtactggtgagaagaagtatggttacaaaggttcttccttccatcgtattattaaagatttcatgatccaaggaggtgacttcaccgagggaaatggtactggaggtattagtatctacggtgccaagtttgaagatgaaaacttcaccttgaagcatactggacctggaatcttgagtatggccaacgctggtcccaatactaatggaagccagttcttcatttgcactgtcaagactccatggttagacaacaagcatgttgtgtttggacaagtcattgaaggtatgaagcttgttaggacacttgaatctcaggagacacgcgccttcgatgttcccaagaaaggttgcagaatctatgcctgtggagagctccctctggatgcttgataaccacactattgagatcagtccatggtcattgccatctttgttttgttattatgagagtttcaagttatggtctttatgtttatttctttatgattacatgagttgaaagtacaatgtaagagtcttattaaagtttatttatctttt

SEQ ID NO: 60977 - protein, 267 aa, Triticum aestivum
  peptide (1)..(267): Ceres Seq. ID no. 12627216
  misc_feature (93)..(265): Homolog of NCBI NO: 9955556 NR Description: peptidylprolyl isomerase-like protein
  misc_feature (69)..(265): Homolog of NCBI NO: 37788312 NR Description: cyclophilin-like protein [Triticum aestivum]
  misc_feature (74)..(265): Homolog of NCBI NO: 37788308 NR Description: cyclophilin-like protein [Triticum aestivum]
  misc_feature (15)..(265): Homolog of NCBI NO: 21593963 NR Description: peptidylprolyl isomerase-like protein
  misc_feature (15)..(265): Homolog of NCBI NO: 15240008 NR Description: peptidyl-prolyl isomerase protein
  misc_feature (44)..(266): Homolog of NCBI NO: 34902534 NR Description: putative peptidyl-prolyl cis-trans isomerase,
  misc_feature (15)..(266): Homolog of NCBI NO: 6014889 NR Description: Peptidyl-prolyl cis-trans isomerase, chloroplast (PPIase) (Rotamase) (Cyclophilin) (Cyclosporin A-binding protein)
  misc_feature (15)..(267): Homolog of NCBI NO: 21555831 NR Description: peptidylprolyl isomerase ROC4 [Arabidopsis
  misc_feature (15)..(267): Homolog of NCBI NO: 11762200 NR Description: AT3g62030 [Arabidopsis thaliana]
  misc_feature (15)..(267): Homolog of NCBI NO: 15228674 NR Description: peptidylprolyl isomerase ROC4
  misc_feature (49)..(49): Xaa is any aa, unknown or other
SKQKLNHLPLVTNQMASLSSMQMVHTSQIGVKSQLVSSANRTSPSVSSXSALSSRLHYAASFPLKKQFSGAYATIKNQRTACVKSMAAEEEEVIEPQAKVTNKVYFDVEIGGEVAGRIVMGLFGDVVPKTVENFRVLCTGEKKYGYKGSSFHRIIKDFMIQGGDFTEGNGTGGISIYGAKFEDENFTLKHTGPGILSMANAGPNTNGSQFFICTVKTPWLDNKHVVFGQVIEGMKLVRTLESQETRAFDVPKKGCRIYACGELPLDA

SEQ ID NO: 60978 - protein, 253 aa, Triticum aestivum
  peptide (1)..(253): Ceres Seq. ID no. 12627217
  misc_feature (79)..(251): Homolog of NCBI NO: 9955556 NR Description: peptidylprolyl isomerase-like protein
  misc_feature (55)..(251): Homolog of NCBI NO: 37788312 NR Description: cyclophilin-like protein [Triticum aestivum]
  misc_feature (60)..(251): Homolog of NCBI NO: 37788308 NR Description: cyclophilin-like protein [Triticum aestivum]
  misc_feature (1)..(251): Homolog of NCBI NO: 21593963 NR Description: peptidylprolyl isomerase-like protein
  misc_feature (1)..(251): Homolog of NCBI NO: 15240008 NR Description: peptidyl-prolyl isomerase protein
  misc_feature (30)..(252): Homolog of NCBI NO: 34902534 NR Description: putative peptidyl-prolyl cis-trans isomerase,
  misc_feature (1)..(252): Homolog of NCBI NO: 6014889 NR Description: Peptidyl-prolyl cis-trans isomerase, chloroplast (PPIase) (Rotamase) (Cyclophilin) (Cyclosporin A-binding protein)
  misc_feature (1)..(253): Homolog of NCBI NO: 21555831 NR Description: peptidylprolyl isomerase ROC4 [Arabidopsis
  misc_feature (1)..(253): Homolog of NCBI NO: 11762200 NR Description: AT3g62030 [Arabidopsis thaliana]
  misc_feature (1)..(253): Homolog of NCBI NO: 15228674 NR Description: peptidylprolyl isomerase ROC4
  misc_feature (35)..(35): Xaa is any aa, unknown or other
MASLSSMQMVHTSQIGVKSQLVSSANRTSPSVSSXSALSSRLHYAASFPLKKQFSGAYATIKNQRTACVKSMAAEEEEVIEPQAKVTNKVYFDVEIGGEVAGRIVMGLFGDVVPKTVENFRVLCTGEKKYGYKGSSFHRIIKDFMIQGGDFTEGNGTGGISIYGAKFEDENFTLKHTGPGILSMANAGPNTNGSQFFICTVKTPWLDNKHVVFGQVIEGMKLVRTLESQETRAFDVPKKGCRIYACGELPLDA

SEQ ID NO: 60979 - protein, 247 aa, Triticum aestivum
  peptide (1)..(247): Ceres Seq. ID no. 12627218
  misc_feature (73)..(245): Homolog of NCBI NO: 9955556 NR Description: peptidylprolyl isomerase-like protein
  misc_feature (49)..(245): Homolog of NCBI NO: 37788312 NR Description: cyclophilin-like protein [Triticum aestivum]
  misc_feature (54)..(245): Homolog of NCBI NO: 37788308 NR Description: cyclophilin-like protein [Triticum aestivum]
  misc_feature (1)..(245): Homolog of NCBI NO: 21593963 NR Description: peptidylprolyl isomerase-like protein
  misc_feature (1)..(245): Homolog of NCBI NO: 15240008 NR Description: peptidyl-prolyl isomerase protein
  misc_feature (24)..(246): Homolog of NCBI NO: 34902534 NR Description: putative peptidyl-prolyl cis-trans isomerase,
  misc_feature (1)..(246): Homolog of NCBI NO: 6014889 NR Description: Peptidyl-prolyl cis-trans isomerase, chloroplast (PPIase) (Rotamase) (Cyclophilin) (Cyclosporin A-binding protein)
  misc_feature (1)..(247): Homolog of NCBI NO: 21555831 NR Description: peptidylprolyl isomerase ROC4 [Arabidopsis
  misc_feature (1)..(247): Homolog of NCBI NO: 11762200 NR Description: AT3g62030 [Arabidopsis thaliana]
  misc_feature (1)..(247): Homolog of NCBI NO: 15228674 NR Description: peptidylprolyl isomerase ROC4
  misc_feature (29)..(29): Xaa is any aa, unknown or other
MQMVHTSQIGVKSQLVSSANRTSPSVSSXSALSSRLHYAASFPLKKQFSGAYATIKNQRTACVKSMAAEEEEVIEPQAKVTNKVYFDVEIGGEVAGRIVMGLFGDVVPKTVENFRVLCTGEKKYGYKGSSFHRIIKDFMIQGGDFTEGNGTGGISIYGAKFEDENFTLKHTGPGILSMANAGPNTNGSQFFICTVKTPWLDNKHVVFGQVIEGMKLVRTLESQETRAFDVPKKGCRIYACGELPLDA

SEQ ID NO: 60980 - DNA, 776 bp, Triticum aestivum
  misc_feature (1)..(776): Ceres Seq. ID no. 13661280
acaagaagcaagtgaaaagaaagaagaaacaacacaacaagccaccacgtacgtaagctttatcaccttcaaaaatgtcgggttggttcggggggaagacggacgccaaggacgaggaggccgccaagacggggccgtccgtccaggaccgcgccatcgaggcgaaggaccagaccatcagcttcatcggcgagaaaagcgaggccgtcaccaaggcggcctcggacaccgccgacgcggccatgaagatgggcggcgacgccatggggaaggcctccgagacggggcaggccatcacggaccgcgccatcgagagcaaggaccagacgttcggcttcttcggagagaagacggaggctgccaagaagatggccgtcgacaccggcgacgctgccaagcagaagtccgccgaggccgcaaagtgtgtcgaggagaccgcggcgaagttcaccggggaacccgccgcccccaaggagcccaccggcaacatgttccagcaggccggcgggcaggtgatgggtgccgctactggcgccagggacgccgtcatgaacacgctcgggatgggaggagacaaagccgacaccggcaccgccaaatgaagaccgcaaagcgcaaaggacggctagcccacttttcgtttcgttattccctccgtgttgctttattttccgttccaagaaactgatttctacgcatgcgtcggttgtttaaacttcgtccggtgtattcaaagatgctttgaatatacagatttgctwaaaaaaaaaaaaaaa

SEQ ID NO: 60981 - protein, 228 aa, Triticum aestivum
  peptide (1)..(228): Ceres Seq. ID no. 15220097
  misc_feature (46)..(143): Pfam Name: Sperm histone P2 Pfam Description: Sperm histone P2
  misc_feature (2)..(197): Homolog of NCBI NO: 17542802 NR Description: Putative nuclear protein, nematode specific
QEASEKKEETTQQATTYVSFITFKNVGLVRGEDGRQGRGGRQDGAVRPGPRHRGEGPDHQLHRREKRGRHQGGLGHRRRGHEDGRRRHGEGLRDGAGHHGPRHREQGPDVRLLRREDGGCQEDGRRHRRRCQAEVRRGRKVCRGDRGEVHRGTRRPQGAHRQHVPAGRRAGDGCRYWRQGRRHEHARDGRRQSRHRHRQMKTAKRKGRLAHFSFRYSLRVALFSVPRN

SEQ ID NO: 60982 - protein, 175 aa, Triticum aestivum
  peptide (1)..(175): Ceres Seq. ID no. 15220098
  misc_feature (87)..(156): Pfam Name: Late embryogenesis abundant protein Pfam Description: Late embryogenesis abundant protein
  misc_feature (6)..(167): Homolog of NCBI NO: 126081 NR Description: ABA-inducible protein PHV A1
  misc_feature (6)..(173): Homolog of NCBI NO: 25989707 NR Description: LEA3 protein [Triticum aestivum]
  misc_feature (6)..(171): Homolog of NCBI NO: 25989705 NR Description: LEA1 protein [Triticum aestivum]
  misc_feature (22)..(175): Homolog of NCBI NO: 33342178 NR Description: ABA inducible protein [Triticum aestivum]
  misc_feature (1)..(175): Homolog of NCBI NO: 25989709 NR Description: LEA2 protein [Triticum aestivum]
  misc_feature (1)..(171): Homolog of NCBI NO: 4929080 NR Description: ABA-inducible protein WRAB1 [Triticum aestivum]
  misc_feature (46)..(168): Homolog of NCBI NO: 2370234 NR Description: cold-regulated protein [Hordeum vulgare subsp.
  misc_feature (16)..(168): Homolog of NCBI NO: 1362163 NR Description: hypothetical protein (clone ES2A) - barley
  misc_feature (1)..(168): Homolog of NCBI NO: 7716956 NR Description: cold-responsive LEA/RAB-related COR protein
  misc_feature (1)..(175): Homolog of NCBI NO: 7445545 NR Description: cold acclimation protein WCOR615 - wheat
MSGWFGGKTDAKDEEAAKTGPSVQDRAIEAKDQTISFIGEKSEAVTKAASDTADAAMKMGGDAMGKASETGQAITDRAIESKDQTFGFFGEKTEAAKKMAVDTGDAAKQKSAEAAKCVEETAAKFTGEPAAPKEPTGNMFQQAGGQVMGAATGARDAVMNTLGMGGDKADTGTAK

SEQ ID NO: 60983 - protein, 119 aa, Triticum aestivum
  peptide (1)..(119): Ceres Seq. ID no. 15220099
  misc_feature (31)..(100): Pfam Name: Late embryogenesis abundant protein Pfam Description: Late embryogenesis abundant protein
  misc_feature (1)..(111): Homolog of NCBI NO: 126081 NR Description: ABA-inducible protein PHV A1
  misc_feature (1)..(117): Homolog of NCBI NO: 25989707 NR Description: LEA3 protein [Triticum aestivum]
  misc_feature (1)..(115): Homolog of NCBI NO: 25989705 NR Description: LEA1 protein [Triticum aestivum]
  misc_feature (1)..(119): Homolog of NCBI NO: 33342178 NR Description: ABA inducible protein [Triticum aestivum]
  misc_feature (1)..(119): Homolog of NCBI NO: 25989709 NR Description: LEA2 protein [Triticum aestivum]
  misc_feature (1)..(115): Homolog of NCBI NO: 4929080 NR Description: ABA-inducible protein WRAB1 [Triticum aestivum]
  misc_feature (1)..(112): Homolog of NCBI NO: 2370234 NR Description: cold-regulated protein [Hordeum vulgare subsp.
  misc_feature (1)..(112): Homolog of NCBI NO: 1362163 NR Description: hypothetical protein (clone ES2A) - barley
  misc_feature (1)..(112): Homolog of NCBI NO: 7716956 NR Description: cold-responsive LEA/RAB-related COR protein
  misc_feature (1)..(119): Homolog of NCBI NO: 7445545 NR Description: cold acclimation protein WCOR615 - wheat
MKMGGDAMGKASETGQAITDRAIESKDQTFGFFGEKTEAAKKMAVDTGDAAKQKSAEAAKCVEETAAKFTGEPAAPKEPTGNMFQQAGGQVMGAATGARDAVMNTLGMGGDKADTGTAK

SEQ ID NO: 60984 - DNA, 959 bp, Triticum aestivum
  misc_feature (1)..(959): Ceres Seq. ID no. 14301452
ataggtaatcataccacaacccgagcattctacaaccactttcatcaacgccatacacgtctcctaccctcacagttcgttgctccgcacatcagcaggacttgcaatggcgggagacggcgagctgaagctgctgggcgtgtggacgggcccgttcgtcatcagggtgcgcgtggtgctcaacctcaagtctctgccgtacgagtacgtggaggagaacctgggcagcaagagcgcgctcctcctgggctccaacccggtgcaccagagcgtgcccgtcctcctccacggcggccgccccgtgaacgagtcccaggtcatcgtgcagtacatcgacgaggtctgggcgggggccggcccgtccgtgctcccggccgacccctacgagcgcgccacggcgcgcttctgggcggcgtacgtcgacgacaaggtcgggtcggcgtggacggggatgctcttctcgtgcaagacggaggaggagagggcggaggccgtgtcccgggccgtggcggcgctggagacgctggagggcgcgttcgcggagtgctccaaggggaaggcgttcttcggcggcgacgccatcgggttcgttgacgtcgtgctcggcggctacctcgggtggttcggggcgatcgacaagatcatcgggcgccggctgatcgacccggcgaggacgccgctgctggccaggtgggaggagcagttccgcgcggcggacgcggccaagggcgtcgtgccggacgacgccgacaagatgctcgagttcttcccaccgtgctcgcttgggtcgccgccaaagcgaagtgaactgtgagcccgtgacatcgccagctcgtgacatgtgtgtttgtgtgtgtgcgtgtctgagtccgtccagtgtgtgctgaataaatgcaccgcatgtcgtgtgttgtaccaagggcaaacgatgctgaataattttgatgtttgttgatttc

SEQ ID NO: 60985 - protein, 235 aa, Triticum aestivum
  peptide (1)..(235): Ceres Seq. ID no. 14301453
  misc_feature (88)..(204): Pfam Name: Glutathione S-transferase, C-terminal domain Pfam Description: Glutathione S-transferase, C-terminal domain
  misc_feature (1)..(212): Homolog of NCBI NO: 37536280 NR Description: putative glutathione S-transferase
  misc_feature (6)..(232): Homolog of NCBI NO: 11385495 NR Description: glutathione S-transferase GST 22 [Zea mays]
  misc_feature (1)..(220): Homolog of NCBI NO: 11385535 NR Description: glutathione S-transferase GST 42 [Zea mays]
  misc_feature (2)..(220): Homolog of NCBI NO: 37536358 NR Description: putative glutathione S-transferase
  misc_feature (1)..(220): Homolog of NCBI NO: 11385527 NR Description: glutathione S-transferase GST 38 [Zea mays]
  misc_feature (3)..(220): Homolog of NCBI NO: 11385501 NR Description: glutathione S-transferase GST 25 [Zea mays]
  misc_feature (1)..(231): Homolog of NCBI NO: 37536368 NR Description: putative glutathione S-transferase
  misc_feature (1)..(220): Homolog of NCBI NO: 11385511 NR Description: glutathione S-transferase GST 30 [Zea mays]
  misc_feature (1)..(220): Homolog of NCBI NO: 37536360 NR Description: putative glutathione S-transferase
  misc_feature (1)..(222): Homolog of NCBI NO: 20067421 NR Description: glutathione transferase [Triticum aestivum]
MAGDGELKLLGVWTGPFVIRVRVVLNLKSLPYEYVEENLGSKSALLLGSNPVHQSVPVLLHGGRPVNESQVIVQYIDEVWAGAGPSVLPADPYERATARFWAAYVDDKVGSAWTGMLFSCKTEEERAEAVSRAVAALETLEGAFAECSKGKAFFGGDAIGFVDVVLGGYLGWFGAIDKIIGRRLIDPARTPLLARWEEQFRAADAAKGVVPDDADKMLEFFPPCSLGSPPKRSEL

SEQ ID NO: 60986 - protein, 197 aa, Triticum aestivum
  peptide (1)..(197): Ceres Seq. ID no. 14301454
  misc_feature (26)..(160): Pfam Name: Protein of unknown function (DUF810) Pfam Description: Protein of unknown function (DUF810)
  misc_feature (37)..(181): Homolog of NCBI NO: 2388805 NR Description: attachment region binding protein [Gallus gallus]
  misc_feature (101)..(197): Homolog of NCBI NO: 729206 NR Description: PROBABLE GLUTATHIONE S-TRANSFERASE (28 KD
IGNHTTTRAFYNHFHQRHTRLLPSQFVAPHISRTCNGGRRRAEAAGRVDGPVRHQGARGAQPQVSAVRVRGGEPGQQERAPPGLQPGAPERARPPPRRPPRERVPGHRAVHRRGLGGGRPVRAPGRPLRARHGALLGGVRRRQGRVGVDGDALLVQDGGGEGGGRVPGRGGAGDAGGRVRGVLQGEGVLRRRRHRVR

SEQ ID NO: 60987 - protein, 120 aa, Triticum aestivum
  peptide (1)..(120): Ceres Seq. ID no. 14301455
  misc_feature (1)..(89): Pfam Name: Glutathione S-transferase, C-terminal domain Pfam Description: Glutathione S-transferase, C-terminal domain
  misc_feature (1)..(97): Homolog of NCBI NO: 37536280 NR Description: putative glutathione S-transferase
  misc_feature (1)..(117): Homolog of NCBI NO: 11385495 NR Description: glutathione S-transferase GST 22 [Zea mays]
  misc_feature (1)..(105): Homolog of NCBI NO: 11385535 NR Description: glutathione S-transferase GST 42 [Zea mays]
  misc_feature (1)..(105): Homolog of NCBI NO: 37536358 NR Description: putative glutathione S-transferase
  misc_feature (1)..(105): Homolog of NCBI NO: 11385527 NR Description: glutathione S-transferase GST 38 [Zea mays]
  misc_feature (1)..(105): Homolog of NCBI NO: 11385501 NR Description: glutathione S-transferase GST 25 [Zea mays]
  misc_feature (1)..(116): Homolog of NCBI NO: 37536368 NR Description: putative glutathione S-transferase
  misc_feature (1)..(105): Homolog of NCBI NO: 11385511 NR Description: glutathione S-transferase GST 30 [Zea mays]
  misc_feature (1)..(105): Homolog of NCBI NO: 37536360 NR Description: putative glutathione S-transferase
  misc_feature (1)..(107): Homolog of NCBI NO: 20067421 NR Description: glutathione transferase [Triticum aestivum]
MLFSCKTEEERAEAVSRAVAALETLEGAFAECSKGKAFFGGDAIGFVDVVLGGYLGWFGAIDKIIGRRLIDPARTPLLARWEEQFRAADAAKGVVPDDADKMLEFFPPCSLGSPPKRSEL

SEQ ID NO: 60988 - DNA, 662 bp, Triticum aestivum
  misc_feature (1)..(662): Ceres Seq. ID no. 12623263
ataacccacagagaacccaagaaaccttctcaaatcctctaaagaaaagaaatggcctccacagctatctcaagcgtcatcgtcggaacatccttcctccgccgtcaaacatctcccatcagcctccgttccctccccttagccaacactcagaccctcttcggcctcaagtcaggaaccgcacgtggtggacgcgtcacagccatggctacatacaaggtcaagttcatcactcccgaaggagagcaagaggttgagtgcgacgacgacgtttacgtcctcgacgctgctgaggaagccgggatcgacttgccttactcttgccgtgccggttcttgctcgagctgtgcaggtaaagttgtgtctggttttgttgaccagtctgaccagagtttcctcgatgatgaccagattgctgcagggtttgttctcacctgtgcggcttatcctacttctgatgttaccattgagacccacagagaagatgacattgtttaagacaaaagctccattaacatgctgcttttgatggtttcataatcattcatgtctttacattttgggttgagtttgttgttactttagtataatctatattgttgtctgttgtaattgttcttggtttggaccatcttttggttagatcaatggataactgtttc

SEQ ID NO: 60989 - protein, 148 aa, Triticum aestivum
  peptide (1)..(148): Ceres Seq. ID no. 12623264
  misc_feature (60)..(135): Pfam Name: 2Fe-2S iron-sulfur cluster binding domain Pfam Description: 2Fe-2S iron-sulfur cluster binding domain
  misc_feature (1)..(147): Homolog of NCBI NO: 119931 NR Description: Ferredoxin I, chloroplast precursor
  misc_feature (53)..(147): Homolog of NCBI NO: 364015 NR Description: ferredoxin LFdA
  misc_feature (1)..(147): Homolog of NCBI NO: 3023743 NR Description: Ferredoxin I, chloroplast precursor
  misc_feature (53)..(148): Homolog of NCBI NO: 119980 NR Description: FERREDOXIN
  misc_feature (53)..(148): Homolog of NCBI NO: 119959 NR Description: FERREDOXIN, LEAF L-A
  misc_feature (53)..(148): Homolog of NCBI NO: 947124 NR Description: ferredoxin component a1
  misc_feature (53)..(148): Homolog of NCBI NO: 81707 NR Description: ferredoxin [2Fe-2S] A, leaf - radish
  misc_feature (1)..(118): Homolog of NCBI NO: 16604416 NR Description: At1g10960/T19D16_12 [Arabidopsis thaliana]
  misc_feature (1)..(148): Homolog of NCBI NO: 15220256 NR Description: ferredoxin precusor isolog
  misc_feature (1)..(148): Homolog of NCBI NO: 15219837 NR Description: ferrodoxin precursor
MASTAISSVIVGTSFLRRQTSPISLRSLPLANTQTLFGLKSGTARGGRVTAMATYKVKFITPEGEQEVECDDDVYVLDAAEEAGIDLPYSCRAGSCSSCAGKVVSGFVDQSDQSFLDDDQIAAGFVLTCAAYPTSDVTIETHREDDIV

SEQ ID NO: 60990 - protein, 97 aa, Triticum aestivum
  peptide (1)..(97): Ceres Seq. ID no. 12623265
  misc_feature (9)..(84): Pfam Name: 2Fe-2S iron-sulfur cluster binding domain Pfam Description: 2Fe-2S iron-sulfur cluster binding domain
  misc_feature (1)..(96): Homolog of NCBI NO: 119931 NR Description: Ferredoxin I, chloroplast precursor
  misc_feature (2)..(96): Homolog of NCBI NO: 364015 NR Description: ferredoxin LFdA
  misc_feature (1)..(96): Homolog of NCBI NO: 3023743 NR Description: Ferredoxin I, chloroplast precursor
  misc_feature (2)..(97): Homolog of NCBI NO: 119980 NR Description: FERREDOXIN
  misc_feature (2)..(97): Homolog of NCBI NO: 119959 NR Description: FERREDOXIN, LEAF L-A
  misc_feature (2)..(97): Homolog of NCBI NO: 947124 NR Description: ferredoxin component a1
  misc_feature (2)..(97): Homolog of NCBI NO: 81707 NR Description: ferredoxin [2Fe-2S] A, leaf - radish
  misc_feature (1)..(67): Homolog of NCBI NO: 16604416 NR Description: At1g10960/T19D16_12 [Arabidopsis thaliana]
  misc_feature (1)..(97): Homolog of NCBI NO: 15220256 NR Description: ferredoxin precusor isolog
  misc_feature (1)..(97): Homolog of NCBI NO: 15219837 NR Description: ferrodoxin precursor
MATYKVKFITPEGEQEVECDDDVYVLDAAEEAGIDLPYSCRAGSCSSCAGKVVSGFVDQSDQSFLDDDQIAAGFVLTCAAYPTSDVTIETHREDDIV

SEQ ID NO: 60991 - protein, 84 aa, Triticum aestivum
  peptide (1)..(84): Ceres Seq. ID no. 12623266
NPQRTQETFSNPLKKRNGLHSYLKRHRRNILPPPSNISHQPPFPPLSQHSDPLRPQVRNRTWWTRHSHGYIQGQVHHSRRRARG

SEQ ID NO: 60992 - DNA, 665 bp, Triticum aestivum
  misc_feature (1)..(665): Ceres Seq. ID no. 12623585
aaccttgtcttgttcttcctctcactctctgcgccgcggttcgtcttagatcttttcctcccccaagcaaaagcttcttcgatcttcctcgtgtctctaaaaaagcaatggcgagcttgagagaaccgccgaacgagcaagccatcctcaacatctacgagtccatgagatcagagctgagccaaatctactccaacataaccgacctcgagatgcaagtcagcgagcactccctcgtcgtcaacgccatccagcctctcgaccagtcaagaaaatgcttccgcatgatcggaggcgttcttgtcgagagaaccatcaaagaggtgctcccagctgttcaccgcaacaaggaagggctagaagaggtcgtcaggaagctgtacgagacgttggagaagaagaagaaggatatgacggagtttgaaggtaagtataagatcaggctaaggaaacaggacgagtccaaggaagaaggtggtagtaataataaaaaggaaggtaatgctcaaggtgttctcgttggagctgctagtacgagccagtaaacactctttcttctcctatcgttgtgctttgcatctttttttttgctggtgatggtgtttacaatattagtagattggagaaccaaaacgttatctttatattcaacatgagagtcttac

SEQ ID NO: 60993 - protein, 180 aa, Triticum aestivum
  peptide (1)..(180): Ceres Seq. ID no. 12623586
  misc_feature (45)..(152): Pfam Name: KE2 family protein Pfam Description: KE2 family protein
  misc_feature (37)..(156): Homolog of NCBI NO: 39595088 NR Description: Hypothetical protein CBG03668 [Caenorhabditis
  misc_feature (44)..(173): Homolog of NCBI NO: 24662461 NR Description: CG6302-PA [Drosophila melanogaster]
  misc_feature (71)..(173): Homolog of NCBI NO: 7106852 NR Description: HSPC231 [Homo sapiens]
  misc_feature (45)..(173): Homolog of NCBI NO: 28189659 NR Description: similar to prefoldin subunit 2 [Bos taurus]
  misc_feature (45)..(173): Homolog of NCBI NO: 12408675 NR Description: prefoldin 2 [Homo sapiens]
  misc_feature (43)..(173): Homolog of NCBI NO: 5690431 NR Description: prefoldin subunit 2 [Homo sapiens]
  misc_feature (32)..(180): Homolog of NCBI NO: 15228766 NR Description: prefoldin-like protein
PCLVLPLTLCAAVRLRSFPPPSKSFFDLPRVSKKAMASLREPPNEQAILNIYESMRSELSQIYSNITDLEMQVSEHSLVVNAIQPLDQSRKCFRMIGGVLVERTIKEVLPAVHRNKEGLEEVVRKLYETLEKKKKDMTEFEGKYKIRLRKQDESKEEGGSNNKKEGNAQGVLVGAASTSQ

SEQ ID NO: 60994 - protein, 145 aa, Triticum aestivum
  peptide (1)..(145): Ceres Seq. ID no. 12623587
  misc_feature (10)..(117): Pfam Name: KE2 family protein Pfam Description: KE2 family protein
  misc_feature (2)..(121): Homolog of NCBI NO: 39595088 NR Description: Hypothetical protein CBG03668 [Caenorhabditis
  misc_feature (9)..(138): Homolog of NCBI NO: 24662461 NR Description: CG6302-PA [Drosophila melanogaster]
  misc_feature (36)..(138): Homolog of NCBI NO: 7106852 NR Description: HSPC231 [Homo sapiens]
  misc_feature (10)..(138): Homolog of NCBI NO: 28189659 NR Description: similar to prefoldin subunit 2 [Bos taurus]
  misc_feature (10)..(138): Homolog of NCBI NO: 12408675 NR Description: prefoldin 2 [Homo sapiens]
  misc_feature (8)..(138): Homolog of NCBI NO: 5690431 NR Description: prefoldin subunit 2 [Homo sapiens]
  misc_feature (1)..(145): Homolog of NCBI NO: 15228766 NR Description: prefoldin-like protein
MASLREPPNEQAILNIYESMRSELSQIYSNITDLEMQVSEHSLVVNAIQPLDQSRKCFRMIGGVLVERTIKEVLPAVHRNKEGLEEVVRKLYETLEKKKKDMTEFEGKYKIRLRKQDESKEEGGSNNKKEGNAQGVLVGAASTSQ

SEQ ID NO: 60995 - protein, 126 aa, Triticum aestivum
  peptide (1)..(126): Ceres Seq. ID no. 12623588
  misc_feature (1)..(98): Pfam Name: KE2 family protein Pfam Description: KE2 family protein
  misc_feature (1)..(102): Homolog of NCBI NO: 39595088 NR Description: Hypothetical protein CBG03668 [Caenorhabditis
  misc_feature (1)..(119): Homolog of NCBI NO: 24662461 NR Description: CG6302-PA [Drosophila melanogaster]
  misc_feature (17)..(119): Homolog of NCBI NO: 7106852 NR Description: HSPC231 [Homo sapiens]
  misc_feature (1)..(119): Homolog of NCBI NO: 28189659 NR Description: similar to prefoldin subunit 2 [Bos taurus]
  misc_feature (1)..(119): Homolog of NCBI NO: 12408675 NR Description: prefoldin 2 [Homo sapiens]
  misc_feature (1)..(119): Homolog of NCBI NO: 5690431 NR Description: prefoldin subunit 2 [Homo sapiens]
  misc_feature (1)..(126): Homolog of NCBI NO: 15228766 NR Description: prefoldin-like protein
MRSELSQIYSNITDLEMQVSEHSLVVNAIQPLDQSRKCFRMIGGVLVERTIKEVLPAVHRNKEGLEEVVRKLYETLEKKKKDMTEFEGKYKIRLRKQDESKEEGGSNNKKEGNAQGVLVGAASTSQ

SEQ ID NO: 60996 - DNA, 448 bp, Triticum aestivum
  misc_feature (1)..(448): Ceres Seq. ID no. 13661162
aagaaaaccctacattacgtagagcttcgtctctccatcgaatccagcaacgacgacnatgatgatctctcgtcgattagcttccagattccttaaaccctcgtcttcctcatccctaagcatctcccttcaccatctccactcttcttcttccataagaaaccatttgatccacagatcagaacagcttcaagagctgggtctctttagatccttctctgctttcatcaccaatcccaacaccgagaagcttcgatctcagacacgatcaacgaggtacttctcaacaccgagccaagaggtcwatccgaatccagaggaggagccaaagatgaagcaccaggagatcgaaggcccgacggtggagcgcgacgtgtcagctttaggtnacgagacgagaaaagtgtkcgaagggatgatgaagaacatgtacagtctaagtggagcc

SEQ ID NO: 60997 - protein, 130 aa, Triticum aestivum
  peptide (1)..(130): Ceres Seq. ID no. 13661163
  misc_feature (1)..(129): Homolog of NCBI NO: 18399699 NR Description: expressed protein [Arabidopsis thaliana]
  misc_feature (83)..(83): Xaa is any aa, unknown or other
  misc_feature (111)..(111): Xaa is any aa, unknown or other
  misc_feature (117)..(117): Xaa is any aa, unknown or other
MMISRRLASRFLKPSSSSSLSISLHHLHSSSSIRNHLIHRSEQLQELGLFRSFSAFITNPNTEKLRSQTRSTRYFSTPSQEVXPNPEEEPKMKHQEIEGPTVERDVSALGXETRKVXEGMMKNMYSLSGA

SEQ ID NO: 60998 - protein, 129 aa, Triticum aestivum
  peptide (1)..(129): Ceres Seq. ID no. 13661164
  misc_feature (1)..(128): Homolog of NCBI NO: 18399699 NR Description: expressed protein [Arabidopsis thaliana]
  misc_feature (82)..(82): Xaa is any aa, unknown or other
  misc_feature (110)..(110): Xaa is any aa, unknown or other
  misc_feature (116)..(116): Xaa is any aa, unknown or other
MISRRLASRFLKPSSSSSLSISLHHLHSSSSIRNHLIHRSEQLQELGLFRSFSAFITNPNTEKLRSQTRSTRYFSTPSQEVXPNPEEEPKMKHQEIEGPTVERDVSALGXETRKVXEGMMKNMYSLSGA

SEQ ID NO: 60999 - DNA, 611 bp, Triticum aestivum
  misc_feature (1)..(611): Ceres Seq. ID no. 13661557
aggtcttttagatcgatcggatctgaatcatggacgaggaggcagcaaaacctagagacaccaccataaaccagcaacaacaatactattacggaacgtttcaaggcgttgcaaattatcctcctcccgctccgccaccgcttccgcatcaacctattgtcacgagtcccttgcttcctcctgtacatggttatcagactctccaagaatatacagtggttgaggtgagaccggtgagagagcatgacgttccttgctgtggctttggcatgggctggttcttgtttattatgggcttcttgttcggtgggatcccttggtatctcggtgctgttattattcttttcacctcagttgatcatcgcgagaaggctggttacgttgcttgttctgtcgcatccgttgtctatttgattgccgtcatgctcgggatggctgggaatattaacatcatctggtgacagatactcccttacatatcacatttcaataacgtatatgcatcatcataaccatagtgatttacaaaagcaaatgttgttattctgtgttgtatttatttgtttacaacaatgatcaatatgttcttgattcctttgatggcatcttcc

SEQ ID NO: 61000 - protein, 143 aa, Triticum aestivum
  peptide (1)..(143): Ceres Seq. ID no. 13661558
  misc_feature (12)..(134): Homolog of NCBI NO: 21554784 NR Description: unknown [Arabidopsis thaliana]
  misc_feature (12)..(134): Homolog of NCBI NO: 18400450 NR Description: expressed protein [Arabidopsis thaliana]
  misc_feature (21)..(143): Homolog of NCBI NO: 18404524 NR Description: expressed protein [Arabidopsis thaliana]
  misc_feature (17)..(136): Homolog of NCBI NO: 18394436 NR Description: expressed protein [Arabidopsis thaliana]
  misc_feature (21)..(143): Homolog of NCBI NO: 21554011 NR Description: unknown [Arabidopsis thaliana]
  misc_feature (1)..(129): Homolog of NCBI NO: 25518134 NR Description: probable 60S ribosomal protein L18A - Arabidopsis
  misc_feature (1)..(143): Homolog of NCBI NO: 18397305 NR Description: expressed protein [Arabidopsis thaliana]
  misc_feature (1)..(143): Homolog of NCBI NO: 21593837 NR Description: 60S ribosomal protein L18A, putative [Arabidopsis
MDEEAAKPRDTTINQQQQYYYGTFQGVANYPPPAPPPLPHQPIVTSPLLPPVHGYQTLQEYTVVEVRPVREHDVPCCGFGMGWFLFIMGFLFGGIPWYLGAVIILFTSVDHREKAGYVACSVASVVYLIAVMLGMAGNINIIW

SEQ ID NO: 61001 - DNA, 907 bp, Triticum aestivum
  misc_feature (1)..(907): Ceres Seq. ID no. 13598102
aacctctctgcttcacttaatctgtgtgttgcctcttgaaaaaacccatcataaacccttctttacctttgtgctcatcttccttcctcgttatcaacagtctcaatcgaaaccgattcattgagaatgacggagatggtaacgcctggagacgtgctcggtaatgcggctgagttaaaacccgggaaaggagcttacgtcaacgacaacaccatctacgcttccctcacaggatctcgccggattgtttctcctcttcccgaatctcttgaccagagagctactgtggaagttactggtcacaaggcgcatggacttatccccgagcctggctctcttgtcttagctagggttactaaagttatggctcgtatggcttctgttgatatcttgtgtgttggttcaaaggccgttcgtgaaaaatttgctggcgtaatcaggcaacaagatgttagagaaacagagattgacaaagttgagattcatcagtctttccgtcctggtgacattgttagagctgtggttctgtctcttggtgactcacgggcttactatctgtcaactgctaagaatgagcttggtgtggtctctgctgagagcgctgcaggtgaaacaatggttccgattagttggacagagatgcaatgtcctttgtctggccaaaccgagcagaggaaagttgccaaggtggcctaatttgaatgacactacagataatctggcttctatcatagatgtgtgtctctacaacaagaaaagacatgtttgattattacagttttgagctcttttgacatgctttaacttaaaagaccatgttttgtcaagtgcaaaagcaacttgcctttattcctaaactcagaagacatttcaatgaaagggttaagagagaatgaatttgaatgtg

SEQ ID NO: 61002 - protein, 189 aa, Triticum aestivum
  peptide (1)..(189): Ceres Seq. ID no. 13598103
  misc_feature (2)..(188): Homolog of NCBI NO: 24583644 NR Description: CG6249-PA [Drosophila melanogaster]
  misc_feature (40)..(94): Homolog of NCBI NO: 6324097 NR Description: Represses the replication of double-stranded RNA protecting the host from the otherwise lethal effects of the
  misc_feature (93)..(187): Homolog of NCBI NO: 6324097 NR Description: Represses the replication of double-stranded RNA protecting the host from the otherwise lethal effects of the
  misc_feature (39)..(187): Homolog of NCBI NO: 38104559 NR Description: hypothetical protein MG08628.4 [Magnaporthe
  misc_feature (4)..(187): Homolog of NCBI NO: 19076010 NR Description: hypothetical protein [Schizosaccharomyces pombe]
  misc_feature (4)..(187): Homolog of NCBI NO: 7491999 NR Description: hypothetical protein SPCC965.01 - fission yeast
  misc_feature (7)..(188): Homolog of NCBI NO: 22267446 NR Description: RIKEN cDNA 2610104C07 [Mus musculus]
  misc_feature (7)..(188): Homolog of NCBI NO: 7705612 NR Description: exosomal core protein CSL4
  misc_feature (2)..(136): Homolog of NCBI NO: 9758066 NR Description: gene_id:K15E6.10~ref|NP_057130.1~similar to
  misc_feature (2)..(188): Homolog of NCBI NO: 18421805 NR Description: expressed protein [Arabidopsis thaliana]
MTEMVTPGDVLGNAAELKPGKGAYVNDNTIYASLTGSRRIVSPLPESLDQRATVEVTGHKAHGLIPEPGSLVLARVTKVMARMASVDILCVGSKAVREKFAGVIRQQDVRETEIDKVEIHQSFRPGDIVRAVVLSLGDSRAYYLSTAKNELGVVSAESAAGETMVPISWTEMQCPLSGQTEQRKVAKVA

SEQ ID NO: 61003 - protein, 186 aa, Triticum aestivum
  peptide (1)..(186): Ceres Seq. ID no. 13598104
  misc_feature (1)..(185): Homolog of NCBI NO: 24583644 NR Description: CG6249-PA [Drosophila melanogaster]
  misc_feature (37)..(91): Homolog of NCBI NO: 6324097 NR Description: Represses the replication of double-stranded RNA protecting the host from the otherwise lethal effects of the
  misc_feature (90)..(184): Homolog of NCBI NO: 6324097 NR Description: Represses the replication of double-stranded RNA protecting the host from the otherwise lethal effects of the
  misc_feature (36)..(184): Homolog of NCBI NO: 38104559 NR Description: hypothetical protein MG08628.4 [Magnaporthe
  misc_feature (1)..(184): Homolog of NCBI NO: 19076010 NR Description: hypothetical protein [Schizosaccharomyces pombe]
  misc_feature (1)..(184): Homolog of NCBI NO: 7491999 NR Description: hypothetical protein SPCC965.01 - fission yeast
  misc_feature (4)..(185): Homolog of NCBI NO: 22267446 NR Description: RIKEN cDNA 2610104C07 [Mus musculus]
  misc_feature (4)..(185): Homolog of NCBI NO: 7705612 NR Description: exosomal core protein CSL4
  misc_feature (1)..(133): Homolog of NCBI NO: 9758066 NR Description: gene_id:K15E6.10~ref|NP_057130.1~similar to
  misc_feature (1)..(185): Homolog of NCBI NO: 18421805 NR Description: expressed protein [Arabidopsis thaliana]
MVTPGDVLGNAAELKPGKGAYVNDNTIYASLTGSRRIVSPLPESLDQRATVEVTGHKAHGLIPEPGSLVLARVTKVMARMASVDILCVGSKAVREKFAGVIRQQDVRETEIDKVEIHQSFRPGDIVRAVVLSLGDSRAYYLSTAKNELGVVSAESAAGETMVPISWTEMQCPLSGQTEQRKVAKVA

SEQ ID NO: 61004 - protein, 110 aa, Triticum aestivum
  peptide (1)..(110): Ceres Seq. ID no. 13598105
  misc_feature (1)..(109): Homolog of NCBI NO: 24583644 NR Description: CG6249-PA [Drosophila melanogaster]
  misc_feature (1)..(15): Homolog of NCBI NO: 6324097 NR Description: Represses the replication of double-stranded RNA protecting the host from the otherwise lethal effects of the
  misc_feature (14)..(108): Homolog of NCBI NO: 6324097 NR Description: Represses the replication of double-stranded RNA protecting the host from the otherwise lethal effects of the
  misc_feature (1)..(108): Homolog of NCBI NO: 38104559 NR Description: hypothetical protein MG08628.4 [Magnaporthe
  misc_feature (1)..(108): Homolog of NCBI NO: 19076010 NR Description: hypothetical protein [Schizosaccharomyces pombe]
  misc_feature (1)..(108): Homolog of NCBI NO: 7491999 NR Description: hypothetical protein SPCC965.01 - fission yeast
  misc_feature (1)..(109): Homolog of NCBI NO: 22267446 NR Description: RIKEN cDNA 2610104C07 [Mus musculus]
  misc_feature (1)..(109): Homolog of NCBI NO: 7705612 NR Description: exosomal core protein CSL4
  misc_feature (1)..(57): Homolog of NCBI NO: 9758066 NR Description: gene_id:K15E6.10~ref|NP_057130.1~similar to
  misc_feature (1)..(109): Homolog of NCBI NO: 18421805 NR Description: expressed protein [Arabidopsis thaliana]
MARMASVDILCVGSKAVREKFAGVIRQQDVRETEIDKVEIHQSFRPGDIVRAVVLSLGDSRAYYLSTAKNELGVVSAESAAGETMVPISWTEMQCPLSGQTEQRKVAKVA

SEQ ID NO: 61005 - DNA, 730 bp, Triticum aestivum
  misc_feature (1)..(730): Ceres Seq. ID no. 13664090
ataccgtctcctctcaacgaaagcttacaaaaaattcaccctaaatactttagtttataaataaagctcccaaaatctaagagaggagaagacaaagacttacaagaaaaaaggcatcataatggccaaattcttcatcgtgttcccttgcctctgcccctatgttttcaccaccctccttcacttggtggccgctgatgccgacgactttgacccgtttcaacatcacgggcttccgtctactgcgacacaatgccgcgtccaattcgttacccgcctcagtaaattcctcgaaggggcaaaggtaaagcttgagtgcaagagtcgtgtgaaccagacagtgacactgaccaaagaagctgtgactgacaaagacggaaaataccagatggaagttatgggagaccacgaagaggaactgtgcgagatcatcctcgtccaatcaccggacgcagagtgtggcgaagtgaacaacgaagagttcctaagaaacgcagcaaggatcagtctcacggctaacgatggcattgtctctaatgagattcgaaccattaacccacttgggttcatgaggaagactcctctcgccgattgtcctcaagttttcaaggagcttggaatcgtccctgacgtcatcttctaagcttaataccgatatacatcgatctctgaacaattttaatttttgttgtaactctttacatttcgtatataacaacatttatatttg

SEQ ID NO: 61006 - protein, 173 aa, Triticum aestivum
  peptide (1)..(173): Ceres Seq. ID no. 13664091
  misc_feature (45)..(160): Pfam Name: Pollen proteins Ole e I family Pfam Description: Pollen proteins Ole e I family
  misc_feature (1)..(169): Homolog of NCBI NO: 125887 NR Description: Anther specific LAT52 protein precursor
  misc_feature (33)..(167): Homolog of NCBI NO: 22074346 NR Description: Che a 1 allergen precursor [Chenopodium album]
  misc_feature (1)..(170): Homolog of NCBI NO: 28380096 NR Description: Olee1-like protein precursor
  misc_feature (59)..(173): Homolog of NCBI NO: 28393099 NR Description: unknown protein [Arabidopsis thaliana]
  misc_feature (1)..(170): Homolog of NCBI NO: 7486300 NR Description: hypothetical protein F28J12.250 - Arabidopsis
  misc_feature (2)..(173): Homolog of NCBI NO: 18415132 NR Description: Ole e I (main olive allergen)-related protein
  misc_feature (17)..(173): Homolog of NCBI NO: 9758935 NR Description: Ole e I (main olive allergen)-like protein
  misc_feature (1)..(173): Homolog of NCBI NO: 21593871 NR Description: Ole e I (main olive allergen)-like protein
  misc_feature (1)..(173): Homolog of NCBI NO: 18422603 NR Description: Ole e I (main olive allergen)-related protein
  misc_feature (1)..(173): Homolog of NCBI NO: 15218844 NR Description: expressed protein [Arabidopsis thaliana]
MAKFFIVFPCLCPYVFTTLLHLVAADADDFDPFQHHGLPSTATQCRVQFVTRLSKFLEGAKVKLECKSRVNQTVTLTKEAVTDKDGKYQMEVMGDHEEELCEIILVQSPDAECGEVNNEEFLRNAARISLTANDGIVSNEIRTINPLGFMRKTPLADCPQVFKELGIVPDVIF

SEQ ID NO: 61007 - DNA, 1310 bp, Triticum aestivum
  misc_feature (1)..(1310): Ceres Seq. ID no. 13661195
asaacatcctaatcgaaaacatcaacgaggggatgcttcattgcgcgaaaagcttttgggacatagggacgaggcgttcaaaaataatattcagtcaggtccgattattcctatcccgagctcacctatccaggtgaacacagaagtattccggcaacttcatggttcagtcagccccggctcagattactactatgcgtcagcaagatctctatcgaggagcccagtgcctacaggtacatggttggggaataatcgccaggcaacaaaagttcctccacaaatgaacgacgaaggtgcatctttatttggcgagtttgttccagcacagtctgcaccagctgctattacaaaagattccctctcagtggtaccatggatttctgttgtcttgggcatgtgtgtgttgcatattttggttggaaccgcgcatagggacgcttccaatgaaattatcatccctgtcggcagaaagctcttagttgtagcggatgaccatgcaggttcatctctgaaccatggcagtggaagtggaattggaagctttcttggttgggccatggcagttatctatatgggcggacgacttccccagatcttcttaaatatgcaaagaggccatgccgaggggctcagtccgctaatgtttacctttgctttagtggggaatacgacatatgttgggagtatccttgtgaatagtttggactgggcacgacttagaccaaatctgccgtggcttgtagatgctggaggatgcgttttgcttgattctttcattattcttcagttcctttattttcattaccggaagcaaagtgggcgtgatgaacttgacaatttggataaagcctaatgcacagcaaacaaagtatttcatttcttttcttcaatggaaaagacatggagctaccacctgcgtggggattgtgcatttttcttggaaagctgcgcaatagccactccccgtgcagaactgcagagacaaggttcacacgcttaatttgcggtgaatgagctgcggcgccgcatggttaagggatgaaatctgttaagggatagatgcagcagtctgccgtgttagaataccaaaaatgtatgtgtcatgtactcagggtcatgctatatctgtacatcgtatggtgatttgcagttcttcatgctatctctatttttgtagtggtgtcgtcttgtgtaggccattgttgtcggatgctcagattcaaatacgcgtcgaggccccatcctttgactctaaatatggttatgcattacaaaaaaaaaaaaaaaaaagcttatcgataccgtcg

SEQ ID NO: 61008 - protein, 284 aa, Triticum aestivum
  peptide (1)..(284): Ceres Seq. ID no. 15220083
  misc_feature (117)..(281): Homolog of NCBI NO: 34526924 NR Description: unnamed protein product [Homo sapiens]
  misc_feature (179)..(273): Homolog of NCBI NO: 32564589 NR Description: Cystinosin/ERS1p repeat (35.0 kD) (2A514C)
  misc_feature (179)..(276): Homolog of NCBI NO: 39586914 NR Description: Hypothetical protein CBG07028 [Caenorhabditis
  misc_feature (117)..(281): Homolog of NCBI NO: 8923301 NR Description: hypothetical protein FLJ20320 [Homo sapiens]
  misc_feature (67)..(209): Homolog of NCBI NO: 7487622 NR Description: hypothetical protein At2g41050 [imported] -
  misc_feature (179)..(272): Homolog of NCBI NO: 6324480 NR Description: Hypothetical ORF; Yol092wp [Saccharomyces
  misc_feature (153)..(269): Homolog of NCBI NO: 25407768 NR Description: hypothetical protein AT4g36850 [imported] -
  misc_feature (153)..(269): Homolog of NCBI NO: 15028159 NR Description: unknown protein [Arabidopsis thaliana]
  misc_feature (110)..(271): Homolog of NCBI NO: 15235292 NR Description: hypothetical protein [Arabidopsis thaliana]
  misc_feature (60)..(277): Homolog of NCBI NO: 30688510 NR Description: expressed protein [Arabidopsis thaliana]
  misc_feature (1)..(1): Xaa is any aa, unknown or other
XHPNRKHQRGDASLREKLLGHRDEAFKNNIQSGPIIPIPSSPIQVNTEVFRQLHGSVSPGSDYYYASARSLSRSPVPTGTWLGNNRQATKVPPQMNDEGASLFGEFVPAQSAPAAITKDSLSVVPWISVVLGMCVLHILVGTAHRDASNEIIIPVGRKLLVVADDHAGSSLNHGSGSGIGSFLGWAMAVIYMGGRLPQIFLNMQRGHAEGLSPLMFTFALVGNTTYVGSILVNSLDWARLRPNLPWLVDAGGCVLLDSFIILQFLYFHYRKQSGRDELDNLDKA

SEQ ID NO: 61009 - protein, 190 aa, Triticum aestivum
  peptide (1)..(190): Ceres Seq. ID no. 15220084
  misc_feature (23)..(187): Homolog of NCBI NO: 34526924 NR Description: unnamed protein product [Homo sapiens]
  misc_feature (85)..(179): Homolog of NCBI NO: 32564589 NR Description: Cystinosin/ERS1p repeat (35.0 kD) (2A514C)
  misc_feature (85)..(182): Homolog of NCBI NO: 39586914 NR Description: Hypothetical protein CBG07028 [Caenorhabditis
  misc_feature (23)..(187): Homolog of NCBI NO: 8923301 NR Description: hypothetical protein FLJ20320 [Homo sapiens]
  misc_feature (1)..(115): Homolog of NCBI NO: 7487622 NR Description: hypothetical protein At2g41050 [imported] -
  misc_feature (85)..(178): Homolog of NCBI NO: 6324480 NR Description: Hypothetical ORF; Yol092wp [Saccharomyces
  misc_feature (59)..(175): Homolog of NCBI NO: 25407768 NR Description: hypothetical protein AT4g36850 [imported] -
  misc_feature (59)..(175): Homolog of NCBI NO: 15028159 NR Description: unknown protein [Arabidopsis thaliana]
  misc_feature (16)..(177): Homolog of NCBI NO: 15235292 NR Description: hypothetical protein [Arabidopsis thaliana]
  misc_feature (1)..(183): Homolog of NCBI NO: 30688510 NR Description: expressed protein [Arabidopsis thaliana]
MNDEGASLFGEFVPAQSAPAAITKDSLSVVPWISVVLGMCVLHILVGTAHRDASNEIIIPVGRKLLVVADDHAGSSLNHGSGSGIGSFLGWAMAVIYMGGRLPQIFLNMQRGHAEGLSPLMFTFALVGNTTYVGSILVNSLDWARLRPNLPWLVDAGGCVLLDSFIILQFLYFHYRKQSGRDELDNLDKA

SEQ ID NO: 61010 - protein, 152 aa, Triticum aestivum
  peptide (1)..(152): Ceres Seq. ID no. 15220085
  misc_feature (1)..(149): Homolog of NCBI NO: 34526924 NR Description: unnamed protein product [Homo sapiens]
  misc_feature (47)..(141): Homolog of NCBI NO: 32564589 NR Description: Cystinosin/ERS1p repeat (35.0 kD) (2A514C)
  misc_feature (47)..(144): Homolog of NCBI NO: 39586914 NR Description: Hypothetical protein CBG07028 [Caenorhabditis
  misc_feature (1)..(149): Homolog of NCBI NO: 8923301 NR Description: hypothetical protein FLJ20320 [Homo sapiens]
  misc_feature (1)..(77): Homolog of NCBI NO: 7487622 NR Description: hypothetical protein At2g41050 [imported] -
  misc_feature (47)..(140): Homolog of NCBI NO: 6324480 NR Description: Hypothetical ORF; Yol092wp [Saccharomyces
  misc_feature (21)..(137): Homolog of NCBI NO: 25407768 NR Description: hypothetical protein AT4g36850 [imported] -
  misc_feature (21)..(137): Homolog of NCBI NO: 15028159 NR Description: unknown protein [Arabidopsis thaliana]
  misc_feature (1)..(139): Homolog of NCBI NO: 15235292 NR Description: hypothetical protein [Arabidopsis thaliana]
  misc_feature (1)..(145): Homolog of NCBI NO: 30688510 NR Description: expressed protein [Arabidopsis thaliana]
MCVLHILVGTAHRDASNEIIIPVGRKLLVVADDHAGSSLNHGSGSGIGSFLGWAMAVIYMGGRLPQIFLNMQRGHAEGLSPLMFTFALVGNTTYVGSILVNSLDWARLRPNLPWLVDAGGCVLLDSFIILQFLYFHYRKQSGRDELDNLDKA

SEQ ID NO: 61011 - DNA, 1328 bp, Triticum aestivum
  misc_feature (1)..(1328): Ceres Seq. ID no. 15169505
accatcacaaacagatgatgaagctgctgctctcccagcatcttcccaatcaccagatggacctatgagagccagcacaagcaactgttggctgttgctggctaccaccaccaccgaactctcaagccaacctccatcaccatttggctttgccctgtaattccaagagcgccaaaccaagatctcagctgccaacaccaccaaagctgatccatggacctgtcggcgaacccggacagccctctgtctggagggggcaacggtggcggctcctcgagcagcatcacctcctcgctttccgtggcctcagggggcactccgcagtcgccgagcaggtacgaggcgcagaagcggcgcgactggaacacgttcgggcagtacctgcggaaccaccggccgccgctgagcctggctcagtgcagcggggcgcacgtcctggagttcctgcgctaccttgaccagttcggcaagaccaaggtgcacgcctcggcctgccccttcttcggccacccgagcccgccggcaccctgcccgtgcccgctccgtcaggcctggggcagcctggacgccctcgtcggccgcctccgcgccgcctacgaggagaacggcggcagccccgagtccaaccccttcgctgcgcgcgccgtccgcctctaccttcgcgaggtccgcgagcaccaggcccgcgcccgcggcgtcagctacgagaagaagaagcgcaagaagccgcagcagctggccggcgacagcagcagcggcagcttccatggcaaccagcaccagccccctcccggcccgcctcccgccgccggttgctgagctgatcgaggcgacgacgacgacccgcccccagccggtggtcgatcgaacgatctcctatttggccggtatgccagatatattttatgtgcgctcgcgtatgcatgcatgcgcacgcatggttatggctttgcacttctcatttgtgcgtgtgtgtatcagctagtactgtcagttgtcgtcgtcgaacactgctgcattgctcgtgtttcgacctagttggctttgattagcttgggttaagttctagtcgagtttatcactagtttaatttccttccatgtaggatcgagtcaagtaaaatgatttgctgtagtgtgaagtgaagtgagggggacatgcatgcagggagagagagagataaatgtatggagatctctcttgctacagctagctgcatgtgtgtgtgtgtgtgtgtggttcgtgcaagattgtaagtctgtagtgcagtgtccgttctgcggtctgcgcatcatgtgtcaactcgatctagcatcgcttattgtttc

SEQ ID NO: 61012 - protein, 201 aa, Triticum aestivum
  peptide (1)..(201): Ceres Seq. ID no. 15169506
  misc_feature (18)..(155): Pfam Name: Protein of unknown function (DUF640) Pfam Description: Protein of unknown function (DUF640)
  misc_feature (113)..(149): Homolog of NCBI NO: 37536084 NR Description: hypothetical protein [Oryza sativa (japonica
  misc_feature (99)..(195): Homolog of NCBI NO: 38637158 NR Description: hypothetical protein [Oryza sativa (japonica
  misc_feature (93)..(201): Homolog of NCBI NO: 34909440 NR Description: OSJNBa0014K08.14 [Oryza sativa (japonica
  misc_feature (31)..(186): Homolog of NCBI NO: 15237680 NR Description: hypothetical protein [Arabidopsis thaliana]
  misc_feature (35)..(194): Homolog of NCBI NO: 15241821 NR Description: expressed protein [Arabidopsis thaliana]
  misc_feature (36)..(172): Homolog of NCBI NO: 18390725 NR Description: expressed protein [Arabidopsis thaliana]
  misc_feature (16)..(183): Homolog of NCBI NO: 34907938 NR Description: B1088C09.17 [Oryza sativa (japonica
  misc_feature (1)..(194): Homolog of NCBI NO: 18402578 NR Description: expressed protein [Arabidopsis thaliana]
  misc_feature (4)..(199): Homolog of NCBI NO: 37535384 NR Description: hypothetical protein [Oryza sativa (japonica
  misc_feature (1)..(201): Homolog of NCBI NO: 38344650 NR Description: OSJNBb0072M01.12 [Oryza sativa (japonica
MDLSANPDSPLSGGGNGGGSSSSITSSLSVASGGTPQSPSRYEAQKRRDWNTFGQYLRNHRPPLSLAQCSGAHVLEFLRYLDQFGKTKVHASACPFFGHPSPPAPCPCPLRQAWGSLDALVGRLRAAYEENGGSPESNPFAARAVRLYLREVREHQARARGVSYEKKKRKKPQQLAGDSSSGSFHGNQHQPPPGPPPAAGC

SEQ ID NO: 61013 - DNA, 984 bp, Triticum aestivum
  misc_feature (1)..(984): Ceres Seq. ID no. 12623915
aatcaaaaaaaaaactttcaaatccctagaaagatgtcgacggaggaagaaaccaaggtggttgtcgagtcaggagacgccgaagcgacggtgacggagaagaagcctgctgcgaaaggcggcgctaaagctaagaagacgccggcgaagaagaagcctgctgctgctccgaggaagagaaccacttcgtctcaccctccttacgaagagatgatcaaagacgcgatcgtgacgctgaaggagagaaccggatctagccaatacgcgattcagaagttcatcgaggagaagcagaagtcgcttcctccaactttcaggaagcttctcctcgtcaatctcaggagactcgtcgcttccgggaagctagtcaaagtcaaagcctctttcaagattccgtctgcggctaaaccggcggctacgactaaaccggttaacaagaaaccagctgctgctgttactaaaccgaagggtaaagctcctgctaaggccaaaccggctgctaaaggagccaagaaacctgctgctgctgctaagcctaaggcaaagacaacagcaacaactaaagccgctgcgaagcccaaacctaagacgaagagtgtagctgctgtttcgaagaccaaggcggttgctgcgaagcctaaggcgaaggagagacctgctaaagcgtcgaggacttcgactaggacgtctccagggaagaaggcagcagctccggctaagaaagctgctgctgctgcgactaagaaggctccggctaagagtgtgaaggttaaatctccagcgaagagggcttcgacgaggaagaagtgattggttttagcttctcttagggttaaagtctttgtataattgaatcgtctatgaagggggcttgttttttcttcttccaaagtttatctttgtcttggtttcttctcgaaacccttttatcttgtaatttttggtttgtttgaaaattcaatagctatatgtgatggggtttgc

SEQ ID NO: 61014 - protein, 269 aa, Triticum aestivum
  peptide (1)..(269): Ceres Seq. ID no. 12623916
  misc_feature (64)..(133): Pfam Name: linker histone H1 and H5 family Pfam Description: linker histone H1 and H5 family
  misc_feature (12)..(268): Homolog of NCBI NO: 121953 NR Description: HISTONE H1
  misc_feature (14)..(269): Homolog of NCBI NO: 13540401 NR Description: histone H1 [Lens culinaris]
  misc_feature (12)..(269): Homolog of NCBI NO: 28301619 NR Description: histone H1 [Pisum sativum]
  misc_feature (12)..(269): Homolog of NCBI NO: 29469895 NR Description: histone H1 subtype 5 [Pisum sativum]
  misc_feature (12)..(268): Homolog of NCBI NO: 1084419 NR Description: histone H1 - common tobacco
  misc_feature (12)..(268): Homolog of NCBI NO: 6681423 NR Description: histone H1 [Nicotiana tabacum]
  misc_feature (12)..(268): Homolog of NCBI NO: 585241 NR Description: HISTONE H1
  misc_feature (38)..(269): Homolog of NCBI NO: 16314 NR Description: histone H1-1 [Arabidopsis thaliana]
  misc_feature (15)..(269): Homolog of NCBI NO: 15222199 NR Description: histone H1, putative
  misc_feature (12)..(268): Homolog of NCBI NO: 15224536 NR Description: histone H1
NQKKNFQIPRKMSTEEETKVVVESGDAEATVTEKKPAAKGGAKAKKTPAKKKPAAAPRKRTTSSHPPYEEMIKDAIVTLKERTGSSQYAIQKFIEEKQKSLPPTFRKLLLVNLRRLVASGKLVKVKASFKIPSAAKPAATTKPVNKKPAAAVTKPKGKAPAKAKPAAKGAKKPAAAAKPKAKTTATTKAAAKPKPKTKSVAAVSKTKAVAAKPKAKERPAKASRTSTRTSPGKKAAAPAKKAAAAATKKAPAKSVKVKSPAKRASTRKK

SEQ ID NO: 61015 - protein, 258 aa, Triticum aestivum
  peptide (1)..(258): Ceres Seq. ID no. 12623917
  misc_feature (53)..(122): Pfam Name: linker histone H1 and H5 family Pfam Description: linker histone H1 and H5 family
  misc_feature (1)..(257): Homolog of NCBI NO: 121953 NR Description: HISTONE H1
  misc_feature (3)..(258): Homolog of NCBI NO: 13540401 NR Description: histone H1 [Lens culinaris]
  misc_feature (1)..(258): Homolog of NCBI NO: 28301619 NR Description: histone H1 [Pisum sativum]
  misc_feature (1)..(258): Homolog of NCBI NO: 29469895 NR Description: histone H1 subtype 5 [Pisum sativum]
  misc_feature (1)..(257): Homolog of NCBI NO: 1084419 NR Description: histone H1 - common tobacco
  misc_feature (1)..(257): Homolog of NCBI NO: 6681423 NR Description: histone H1 [Nicotiana tabacum]
  misc_feature (1)..(257): Homolog of NCBI NO: 585241 NR Description: HISTONE H1
  misc_feature (27)..(258): Homolog of NCBI NO: 16314 NR Description: histone H1-1 [Arabidopsis thaliana]
  misc_feature (4)..(258): Homolog of NCBI NO: 15222199 NR Description: histone H1, putative
  misc_feature (1)..(257): Homolog of NCBI NO: 15224536 NR Description: histone H1
MSTEEETKVVVESGDAEATVTEKKPAAKGGAKAKKTPAKKKPAAAPRKRTTSSHPPYEEMIKDAIVTLKERTGSSQYAIQKFIEEKQKSLPPTFRKLLLVNLRRLVASGKLVKVKASFKIPSAAKPAATTKPVNKKPAAAVTKPKGKAPAKAKPAAKGAKKPAAAAKPKAKTTATTKAAAKPKPKTKSVAAVSKTKAVAAKPKAKERPAKASRTSTRTSPGKKAAAPAKKAAAAATKKAPAKSVKVKSPAKRASTRKK

SEQ ID NO: 61016 - protein, 199 aa, Triticum aestivum
  peptide (1)..(199): Ceres Seq. ID no. 12623918
  misc_feature (1)..(63): Pfam Name: linker histone H1 and H5 family Pfam Description: linker histone H1 and H5 family
  misc_feature (1)..(198): Homolog of NCBI NO: 121953 NR Description: HISTONE H1
  misc_feature (1)..(199): Homolog of NCBI NO: 13540401 NR Description: histone H1 [Lens culinaris]
  misc_feature (1)..(199): Homolog of NCBI NO: 28301619 NR Description: histone H1 [Pisum sativum]
  misc_feature (1)..(199): Homolog of NCBI NO: 29469895 NR Description: histone H1 subtype 5 [Pisum sativum]
  misc_feature (1)..(198): Homolog of NCBI NO: 1084419 NR Description: histone H1 - common tobacco
  misc_feature (1)..(198): Homolog of NCBI NO: 6681423 NR Description: histone H1 [Nicotiana tabacum]
  misc_feature (1)..(198): Homolog of NCBI NO: 585241 NR Description: HISTONE H1
  misc_feature (1)..(199): Homolog of NCBI NO: 16314 NR Description: histone H1-1 [Arabidopsis thaliana]
  misc_feature (1)..(199): Homolog of NCBI NO: 15222199 NR Description: histone H1, putative
  misc_feature (1)..(198): Homolog of NCBI NO: 15224536 NR Description: histone H1
MIKDAIVTLKERTGSSQYAIQKFIEEKQKSLPPTFRKLLLVNLRRLVASGKLVKVKASFKIPSAAKPAATTKPVNKKPAAAVTKPKGKAPAKAKPAAKGAKKPAAAAKPKAKTTATTKAAAKPKPKTKSVAAVSKTKAVAAKPKAKERPAKASRTSTRTSPGKKAAAPAKKAAAAATKKAPAKSVKVKSPAKRASTRKK

SEQ ID NO: 61017 - DNA, 1192 bp, Triticum aestivum
  misc_feature (1)..(1192): Ceres Seq. ID no. 15225038
cttcgctttccctctggccgccctctcccccgcggaagaaacccaaccctagcctccgccgtgcgtctccggcgacccttcagcagcaccgccgggcggcctcgcgggctctcctggagcggttccgctgcaaatctgaagcgcgagcgttgaggaggaggaggtgttggtcggcgatttactgatttggggggcggaggaggatggggtcgtcgtcgaaggtggtgcggccggaggaggtgctggagtcgctgaagaacgacggcaccgtcgacgcgctccgcatgaagatcatggcccagctcaaggccgacgaggacatgaagaaaaatactatgatgatggtggaacaaagcaaagttctgaagactcctggagctgagaaaaagaccaagagggagctgtttgatgctcttagacaagaattggaaactccggttcttgagaaagtctcaaaggcagtttgggagctgatactcgacaatggtggactagggaaagagatcaccgagacagttgagaaagtcttctgccggctcagcggaattgatgtgatgccacctccagcttcaacatccggtgctcctcaagagaaacagacaaacatggctgtagaggaggatcagaaggatatggaaatggatgcctctgaaccatcgtcttcctcaaggaagaggcctttcagtgacatcagtgtgaaaggagcaggtgctataccaaacggtggcgctacataccagcatgacgatcatgaggacgggaactaggagatctgggcgtgtcgtggacaagcattcgggtgatcctggggagagcgtgtgctcaattgcatcagtggaaaaccttatgcgtcggggatcaatcagtgctactgcggcgctgtctcctgcacattgcatgggaggaggcaccaaggctggtgcgaataagggactagatggactcatgctcaaggcgcacactggatgatctctccctcctgcgtgaggatgtcattctgtaataggatagaccttacttagatcccttgctgcgcgctggatgtgttgccgaaccaattgctcttagtagttgtagtttgcatatagtctggcctgctactttggtgaggctcgagtgctaccattatatttcggtttgctgttctccgttttatgcaataaaatggagagggggaaaccccttttgttac

SEQ ID NO: 61018 - protein, 187 aa, Triticum aestivum
  peptide (1)..(187): Ceres Seq. ID no. 15225039
  misc_feature (5)..(35): Homolog of NCBI NO: 9502392 NR Description: T12C24.7 [Arabidopsis thaliana]
  misc_feature (25)..(185): Homolog of NCBI NO: 9502392 NR Description: T12C24.7 [Arabidopsis thaliana]
  misc_feature (1)..(185): Homolog of NCBI NO: 15222011 NR Description: hypothetical protein [Arabidopsis thaliana]
  misc_feature (3)..(164): Homolog of NCBI NO: 15223534 NR Description: hypothetical protein [Arabidopsis thaliana]
MGSSSKVVRPEEVLESLKNDGTVDALRMKIMAQLKADEDMKKNTMMMVEQSKVLKTPGAEKKTKRELFDALRQELETPVLEKVSKAVWELILDNGGLGKEITETVEKVFCRLSGIDVMPPPASTSGAPQEKQTNMAVEEDQKDMEMDASEPSSSSRKRPFSDISVKGAGAIPNGGATYQHDDHEDGN

SEQ ID NO: 61019 - protein, 160 aa, Triticum aestivum
  peptide (1)..(160): Ceres Seq. ID no. 15225040
  misc_feature (1)..(158): Homolog of NCBI NO: 9502392 NR Description: T12C24.7 [Arabidopsis thaliana]
  misc_feature (1)..(158): Homolog of NCBI NO: 15222011 NR Description: hypothetical protein [Arabidopsis thaliana]
  misc_feature (1)..(137): Homolog of NCBI NO: 15223534 NR Description: hypothetical protein [Arabidopsis thaliana]
MKIMAQLKADEDMKKNTMMMVEQSKVLKTPGAEKKTKRELFDALRQELETPVLEKVSKAVWELILDNGGLGKEITETVEKVFCRLSGIDVMPPPASTSGAPQEKQTNMAVEEDQKDMEMDASEPSSSSRKRPFSDISVKGAGAIPNGGATYQHDDHEDGN

SEQ ID NO: 61020 - protein, 157 aa, Triticum aestivum
  peptide (1)..(157): Ceres Seq. ID no. 15225041
  misc_feature (1)..(155): Homolog of NCBI NO: 9502392 NR Description: T12C24.7 [Arabidopsis thaliana]
  misc_feature (1)..(155): Homolog of NCBI NO: 15222011 NR Description: hypothetical protein [Arabidopsis thaliana]
  misc_feature (1)..(134): Homolog of NCBI NO: 15223534 NR Description: hypothetical protein [Arabidopsis thaliana]
MAQLKADEDMKKNTMMMVEQSKVLKTPGAEKKTKRELFDALRQELETPVLEKVSKAVWELILDNGGLGKEITETVEKVFCRLSGIDVMPPPASTSGAPQEKQTNMAVEEDQKDMEMDASEPSSSSRKRPFSDISVKGAGAIPNGGATYQHDDHEDGN

SEQ ID NO: 61021 - DNA, 765 bp, Triticum aestivum
  misc_feature (1)..(765): Ceres Seq. ID no. 13661569
caacgccacatacgtgacttgactcaagttgagcacactttgtgatggaggcatggagccaaccagatcaccactagttttgctcgtggcgcaagccgtactcgctgcggcgatgctgcaacaaccatcagaagggagggtgcaggcagtggcgccatcagcgccacatctcgccggaggcaaagaagctgaagtagcagccgctacctcctcgccggcttcaccattcaccggcgacacgccattagttttgctcgtggcgtacgccgtactcgcggaggcgatgctgcaaccatcagagacgagggtacaggcggctacctcctcgccttcttcacagttcaccggtgacccgccacggccctccctcccgggcttgccgcctctacctggcttgcccgcgttaccgccgtcgccgggcttcccgggcatggcaggcgcgcagtcgtctccttcgccttcgcagcagccggccaaaacatgcttggagccgctgatacttgcggaaccgtgcgtcagttacctgacgaactccagcgtgccggcgccgccgagaacgtgctgcgacggcttcaggtcgctcgtcggcggcggcgacaggatttgcctgtgccacgccatcatgggcgacctgggtacatttgcaggcgggacgatagaccagcacgtcgccggagcttcttctgatgtgcatcggcaagtctgaatcgttgtttgttttgttttattaactgtatgaacttacgagatgaactgtcatgtgtt

SEQ ID NO: 61022 - protein, 217 aa, Triticum aestivum
  peptide (1)..(217): Ceres Seq. ID no. 13661570
  misc_feature (144)..(203): Pfam Name: Protease inhibitor/seed storage/LTP family Pfam Description: Protease inhibitor/seed storage/LTP family
  misc_feature (16)..(168): Homolog of NCBI NO: 34899598 NR Description: early nodulin 75 precursor-like protein
  misc_feature (19)..(169): Homolog of NCBI NO: 29245305 NR Description: GLP_333_15386_14190 [Giardia lamblia ATCC 50803]
  misc_feature (93)..(203): Homolog of NCBI NO: 38347146 NR Description: OSJNBa0039G19.6 [Oryza sativa (japonica
  misc_feature (104)..(203): Homolog of NCBI NO: 34901578 NR Description: P0571D04.3 [Oryza sativa (japonica
  misc_feature (83)..(203): Homolog of NCBI NO: 34901090 NR Description: hypothetical protein~predicted by GlimmerM etc.
MEPTRSPLVLLVAQAVLAAAMLQQPSEGRVQAVAPSAPHLAGGKEAEVAAATSSPASPFTGDTPLVLLVAYAVLAEAMLQPSETRVQAATSSPSSQFTGDPPRPSLPGLPPLPGLPALPPSPGFPGMAGAQSSPSPSQQPAKTCLEPLILAEPCVSYLTNSSVPAPPRTCCDGFRSLVGGGDRICLCHAIMGDLGTFAGGTIDQHVAGASSDVHRQV

SEQ ID NO: 61023 - protein, 197 aa, Triticum aestivum
  peptide (1)..(197): Ceres Seq. ID no. 13661571
  misc_feature (124)..(183): Pfam Name: Protease inhibitor/seed storage/LTP family Pfam Description: Protease inhibitor/seed storage/LTP family
  misc_feature (1)..(148): Homolog of NCBI NO: 34899598 NR Description: early nodulin 75 precursor-like protein
  misc_feature (1)..(149): Homolog of NCBI NO: 29245305 NR Description: GLP_333_15386_14190 [Giardia lamblia ATCC 50803]
  misc_feature (73)..(183): Homolog of NCBI NO: 38347146 NR Description: OSJNBa0039G19.6 [Oryza sativa (japonica
  misc_feature (84)..(183): Homolog of NCBI NO: 34901578 NR Description: P0571D04.3 [Oryza sativa (japonica
  misc_feature (63)..(183): Homolog of NCBI NO: 34901090 NR Description: hypothetical protein~predicted by GlimmerM etc.
MLQQPSEGRVQAVAPSAPHLAGGKEAEVAAATSSPASPFTGDTPLVLLVAYAVLAEAMLQPSETRVQAATSSPSSQFTGDPPRPSLPGLPPLPGLPALPPSPGFPGMAGAQSSPSPSQQPAKTCLEPLILAEPCVSYLTNSSVPAPPRTCCDGFRSLVGGGDRICLCHAIMGDLGTFAGGTIDQHVAGASSDVHRQV

SEQ ID NO: 61024 - protein, 140 aa, Triticum aestivum
  peptide (1)..(140): Ceres Seq. ID no. 13661572
  misc_feature (67)..(126): Pfam Name: Protease inhibitor/seed storage/LTP family Pfam Description: Protease inhibitor/seed storage/LTP family
  misc_feature (1)..(91): Homolog of NCBI NO: 34899598 NR Description: early nodulin 75 precursor-like protein
  misc_feature (1)..(92): Homolog of NCBI NO: 29245305 NR Description: GLP_333_15386_14190 [Giardia lamblia ATCC 50803]
  misc_feature (16)..(126): Homolog of NCBI NO: 38347146 NR Description: OSJNBa0039G19.6 [Oryza sativa (japonica
  misc_feature (27)..(126): Homolog of NCBI NO: 34901578 NR Description: P0571D04.3 [Oryza sativa (japonica
  misc_feature (6)..(126): Homolog of NCBI NO: 34901090 NR Description: hypothetical protein~predicted by GlimmerM etc.
MLQPSETRVQAATSSPSSQFTGDPPRPSLPGLPPLPGLPALPPSPGFPGMAGAQSSPSPSQQPAKTCLEPLILAEPCVSYLTNSSVPAPPRTCCDGFRSLVGGGDRICLCHAIMGDLGTFAGGTIDQHVAGASSDVHRQV

SEQ ID NO: 61025 - DNA, 677 bp, Triticum aestivum
  misc_feature (1)..(677): Ceres Seq. ID no. 12598241
atatacaaaaacccactacagaatactaccagcagttcttcgttgcagcatcatcacacagatttaaggttcaatctccagacagaaaatggcgaacgcggtgtcgggcgtggcggtgagcgaggagtgcgtgagggcgttccaggagctgcgcgcggggcgcgcgcaccggttcgtggtgtacaagatggacgacgccgtgcagcaggtggtggtggacaaggtgggcggccgcgacgccggcttcgacgacctggccgcggcactccccgccgacgactgccgctacgccgtctacgacctcgacttcaccgtcggcgacgccaccgccaaaggcgcggacggggaggcgccgcgcagcaagatcttcttcatctcctggtcgccggcgagtgcggaggtgaagagcaagatgatctacgccagctccaacgaggggttcaanaaggagctggacggcacgcagatcgacgtgcaggccaccgaccccagcgagctcacgctngacatcctcacgaccacgccacctaaccaatcaatcaagcccctatgtatgattgacggttcacgcgtgcacgttacgtgcgtgtgctagctttgtgctgtgcatgtatctttgccctcttcgattgtgttgtgtgcttccaattggatcgtgtcgtcgaccccnanagaat

SEQ ID NO: 61026 - protein, 176 aa, Triticum aestivum
  peptide (1)..(176): Ceres Seq. ID no. 12598242
  misc_feature (149)..(149): Xaa is any aa, unknown or other
  misc_feature (169)..(169): Xaa is any aa, unknown or other
IYKNPLQNTTSSSSLQHHHTDLRFNLQTENGERGVGRGGERGVREGVPGAARGARAPVRGVQDGRRRAAGGGGQGGRPRRRLRRPGRGTPRRRLPLRRLRPRLHRRRRHRQRRGRGGAAQQDLLHLLVAGECGGEEQDDLRQLQRGVQXGAGRHADRRAGHRPQRAHAXHPHDHAT

SEQ ID NO: 61027 - protein, 168 aa, Triticum aestivum
  peptide (1)..(168): Ceres Seq. ID no. 12598243
  misc_feature (12)..(142): Pfam Name: Cofilin/tropomyosin-type actin-binding protein Pfam Description: Cofilin/tropomyosin-type actin-binding protein
  misc_feature (1)..(140): Homolog of NCBI NO: 17366520 NR Description: Actin-depolymerizing factor 3 (ADF 3) (ZmABP3)
  misc_feature (1)..(142): Homolog of NCBI NO: 38345587 NR Description: OSJNBb0012E24.5 [Oryza sativa (japonica
  misc_feature (1)..(141): Homolog of NCBI NO: 4185511 NR Description: actin depolymerizing factor 4 [Arabidopsis
  misc_feature (1)..(142): Homolog of NCBI NO: 30697300 NR Description: actin depolymerizing factor 4 - like protein
  misc_feature (1)..(142): Homolog of NCBI NO: 22831338 NR Description: putative actin-depolymerizing factor 2
  misc_feature (1)..(141): Homolog of NCBI NO: 30697295 NR Description: actin depolymerizing factor 3 - like protein
  misc_feature (1)..(142): Homolog of NCBI NO: 7441447 NR Description: actin-binding protein WCOR719 - wheat
  misc_feature (1)..(142): Homolog of NCBI NO: 11066101 NR Description: actin depolymerization factor-like protein
  misc_feature (1)..(142): Homolog of NCBI NO: 1381154 NR Description: WCOR719
  misc_feature (1)..(142): Homolog of NCBI NO: 29124120 NR Description: putative actin-binding protein
  misc_feature (119)..(119): Xaa is any aa, unknown or other
  misc_feature (139)..(139): Xaa is any aa, unknown or other
MANAVSGVAVSEECVRAFQELRAGRAHRFVVYKMDDAVQQVVVDKVGGRDAGFDDLAAALPADDCRYAVYDLDFTVGDATAKGADGEAPRSKIFFISWSPASAEVKSKMIYASSNEGFXKELDGTQIDVQATDPSELTXDILTTTPPNQSIKPLCMIDGSRVHVTCVC

SEQ ID NO: 61028 - protein, 135 aa, Triticum aestivum
  peptide (1)..(135): Ceres Seq. ID no. 12598244
  misc_feature (1)..(109): Pfam Name: Cofilin/tropomyosin-type actin-binding protein Pfam Description: Cofilin/tropomyosin-type actin-binding protein
  misc_feature (1)..(107): Homolog of NCBI NO: 17366520 NR Description: Actin-depolymerizing factor 3 (ADF 3) (ZmABP3)
  misc_feature (1)..(109): Homolog of NCBI NO: 38345587 NR Description: OSJNBb0012E24.5 [Oryza sativa (japonica
  misc_feature (1)..(108): Homolog of NCBI NO: 4185511 NR Description: actin depolymerizing factor 4 [Arabidopsis
  misc_feature (1)..(109): Homolog of NCBI NO: 30697300 NR Description: actin depolymerizing factor 4 - like protein
  misc_feature (1)..(109): Homolog of NCBI NO: 22831338 NR Description: putative actin-depolymerizing factor 2
  misc_feature (1)..(108): Homolog of NCBI NO: 30697295 NR Description: actin depolymerizing factor 3 - like protein
  misc_feature (1)..(109): Homolog of NCBI NO: 7441447 NR Description: actin-binding protein WCOR719 - wheat
  misc_feature (1)..(109): Homolog of NCBI NO: 11066101 NR Description: actin depolymerization factor-like protein
  misc_feature (1)..(109): Homolog of NCBI NO: 1381154 NR Description: WCOR719
  misc_feature (1)..(109): Homolog of NCBI NO: 29124120 NR Description: putative actin-binding protein
  misc_feature (86)..(86): Xaa is any aa, unknown or other
  misc_feature (106)..(106): Xaa is any aa, unknown or other
MDDAVQQVVVDKVGGRDAGFDDLAAALPADDCRYAVYDLDFTVGDATAKGADGEAPRSKIFFISWSPASAEVKSKMIYASSNEGFXKELDGTQIDVQATDPSELTXDILTTTPPNQSIKPLCMIDGSRVHVTCVC

SEQ ID NO: 61029 - DNA, 935 bp, Triticum aestivum
  misc_feature (1)..(935): Ceres Seq. ID no. 12598102
cgctgctctgctctgctctgctcatcttccttgtaggctaggctagggtttatcttcggattacgagcgaaatcctcgggcaatggcgtcggtgcagctctgcggtgccgcggccgttggcgcggcggggttctccgggaaggtagcggccaacgcgccggcggcggtcggggtacgcccggcccggcggggggcgctccgcgggctcgtcgccagggccgccaccgtcgtcgcccccatgtacacgacggtcaagcccttggctgacagagtgcttctgaagaccaagactgccgagcagaagacgaccggtgggattctgctcccttcaactgcgcagtctaaacctcagagtggtgaggtggttgctgttggagagggaagaaccattggggatagcaaagtagaagtcggcattaaggttggggctcaggttgtatattcgaagtatgctggaatggaggtggagttgaatgattccaaccatctgatcctaaaagaggacgatatcataggtattctggagacagaggatgtgaaagacatgaagcctcttagcgaccgtgttcttatcaaggtagctgtagctgaagataaaactgcgggggggctgctgctgactaacagtgtccaggagaagccatctgttggaacggtggtcgctgtcggcccgggccatntggacgaggaaggcaagaggatcccgttgccggtatccacaggcaattccgttctgtactccaagtatgctggcgccgagttcaagggtgccgatggcacaaactacatcgtgctgagggtatctgacctgatggctatcctctcttgagctggattgtagcgcaaggcgcggttttcctgatcctaaatgttccaaaggcagcttaaactagatgaagagaaatgagaatccccttcaatgtttgtggctctgc

SEQ ID NO: 61030 - protein, 248 aa, Triticum aestivum
  peptide (1)..(248): Ceres Seq. ID no. 12598103
  misc_feature (153)..(248): Pfam Name: Chaperonin 10 Kd subunit Pfam Description: Chaperonin 10 Kd subunit
  misc_feature (154)..(248): Homolog of NCBI NO: 3599923 NR Description: GroES/HSP10 homolog [Lawsonia intracellularis]
  misc_feature (57)..(148): Homolog of NCBI NO: 20807075 NR Description: Co-chaperonin GroES (HSP10) [Thermoanaerobacter
  misc_feature (57)..(150): Homolog of NCBI NO: 22973795 NR Description: hypothetical protein [Chloroflexus aurantiacus]
  misc_feature (57)..(148): Homolog of NCBI NO: 2493659 NR Description: 10 kDa chaperonin (Protein Cpn10) (groES protein)
  misc_feature (152)..(247): Homolog of NCBI NO: 22297730 NR Description: 10kD chaperonin [Thermosynechococcus elongatus
  misc_feature (38)..(248): Homolog of NCBI NO: 399241 NR Description: 20 kDa chaperonin, chloroplast precursor (Protein (Chloroplast protein Cpn10) (Chloroplast chaperonin 10)
  misc_feature (1)..(248): Homolog of NCBI NO: 21780187 NR Description: cp10-like protein [Gossypium hirsutum]
  misc_feature (1)..(248): Homolog of NCBI NO: 25453528 NR Description: chaperonin 10 [imported] - Arabidopsis thaliana
  misc_feature (1)..(248): Homolog of NCBI NO: 7331143 NR Description: chaperonin 21 precursor [Lycopersicon esculentum]
  misc_feature (1)..(248): Homolog of NCBI NO: 15242045 NR Description: chloroplast Cpn21 protein
  misc_feature (200)..(200): Xaa is any aa, unknown or other
MASVQLCGAAAVGAAGFSGKVAANAPAAVGVRPARRGALRGLVARAATVVAPMYTTVKPLADRVLLKTKTAEQKTTGGILLPSTAQSKPQSGEVVAVGEGRTIGDSKVEVGIKVGAQVVYSKYAGMEVELNDSNHLILKEDDIIGILETEDVKDMKPLSDRVLIKVAVAEDKTAGGLLLTNSVQEKPSVGTVVAVGPGHXDEEGKRIPLPVSTGNSVLYSKYAGAEFKGADGTNYIVLRVSDLMAILS

SEQ ID NO: 61031 - protein, 196 aa, Triticum aestivum
  peptide (1)..(196): Ceres Seq. ID no. 12598104
  misc_feature (101)..(196): Pfam Name: Chaperonin 10 Kd subunit Pfam Description: Chaperonin 10 Kd subunit
  misc_feature (102)..(196): Homolog of NCBI NO: 3599923 NR Description: GroES/HSP10 homolog [Lawsonia intracellularis]
  misc_feature (5)..(96): Homolog of NCBI NO: 20807075 NR Description: Co-chaperonin GroES (HSP10) [Thermoanaerobacter
  misc_feature (5)..(98): Homolog of NCBI NO: 22973795 NR Description: hypothetical protein [Chloroflexus aurantiacus]
  misc_feature (5)..(96): Homolog of NCBI NO: 2493659 NR Description: 10 kDa chaperonin (Protein Cpn10) (groES protein)
  misc_feature (100)..(195): Homolog of NCBI NO: 22297730 NR Description: 10kD chaperonin [Thermosynechococcus elongatus
  misc_feature (1)..(196): Homolog of NCBI NO: 399241 NR Description: 20 kDa chaperonin, chloroplast precursor (Protein (Chloroplast protein Cpn10) (Chloroplast chaperonin 10)
  misc_feature (1)..(196): Homolog of NCBI NO: 21780187 NR Description: cp10-like protein [Gossypium hirsutum]
  misc_feature (1)..(196): Homolog of NCBI NO: 25453528 NR Description: chaperonin 10 [imported] - Arabidopsis thaliana
  misc_feature (1)..(196): Homolog of NCBI NO: 7331143 NR Description: chaperonin 21 precursor [Lycopersicon esculentum]
  misc_feature (1)..(196): Homolog of NCBI NO: 15242045 NR Description: chloroplast Cpn21 protein
  misc_feature (148)..(148): Xaa is any aa, unknown or other
MYTTVKPLADRVLLKTKTAEQKTTGGILLPSTAQSKPQSGEVVAVGEGRTIGDSKVEVGIKVGAQVVYSKYAGMEVELNDSNHLILKEDDIIGILETEDVKDMKPLSDRVLIKVAVAEDKTAGGLLLTNSVQEKPSVGTVVAVGPGHXDEEGKRIPLPVSTGNSVLYSKYAGAEFKGADGTNYIVLRVSDLMAILS

SEQ ID NO: 61032 - DNA, 506 bp, Triticum aestivum
  misc_feature (1)..(506): Ceres Seq. ID no. 12598105
atcctcgagcccaagcagcaaaacgcgagcagagagcgcaacacgaagatggcgacgatgtccctcgccgcggcctcacccctcaccgcctccactccccacggcctcgccgtgtccgcgccccgagcgccattcctcggcctccgctcatttggcgcgccggcgacgcggttcgcgggactggcggcggcgccgcggccgtcggggaggggcgatgcggcggtggtgaggatggcgaagagggagcaggagctggaggagatacgggccatggagacggagaatctggagcaggaggtggtggacctgaagggggagctcttcctgctccgcctcaagcgctccgcgcgccaggagttcaagtccagcgagttcggccgcatgcgcaagagggttgctcgtctgctgactgtgagaagagaaagggaaattgaacaaggaatcaacaaaagaaattctaggaagcttgacaggaaatggaaactgggtattgtggttggaccacc

SEQ ID NO: 61033 - protein, 168 aa, Triticum aestivum
  peptide (1)..(168): Ceres Seq. ID no. 12598106
  misc_feature (20)..(167): Homolog of NCBI NO: 15238369 NR Description: 50S ribosomal protein L29
  misc_feature (17)..(167): Homolog of NCBI NO: 5739218 NR Description: ribosomal protein L29 [Zea mays]
ILEPKQQNASRERNTKMATMSLAAASPLTASTPHGLAVSAPRAPFLGLRSFGAPATRFAGLAAAPRPSGRGDAAVVRMAKREQELEEIRAMETENLEQEVVDLKGELFLLRLKRSARQEFKSSEFGRMRKRVARLLTVRREREIEQGINKRNSRKLDRKWKLGIVVGP

SEQ ID NO: 61034 - protein, 152 aa, Triticum aestivum
  peptide (1)..(152): Ceres Seq. ID no. 12598107
  misc_feature (4)..(151): Homolog of NCBI NO: 15238369 NR Description: 50S ribosomal protein L29
  misc_feature (1)..(151): Homolog of NCBI NO: 5739218 NR Description: ribosomal protein L29 [Zea mays]
MATMSLAAASPLTASTPHGLAVSAPRAPFLGLRSFGAPATRFAGLAAAPRPSGRGDAAVVRMAKREQELEEIRAMETENLEQEVVDLKGELFLLRLKRSARQEFKSSEFGRMRKRVARLLTVRREREIEQGINKRNSRKLDRKWKLGIVVGP

SEQ ID NO: 61035 - protein, 149 aa, Triticum aestivum
  peptide (1)..(149): Ceres Seq. ID no. 12598108
  misc_feature (1)..(148): Homolog of NCBI NO: 15238369 NR Description: 50S ribosomal protein L29
  misc_feature (1)..(148): Homolog of NCBI NO: 5739218 NR Description: ribosomal protein L29 [Zea mays]
MSLAAASPLTASTPHGLAVSAPRAPFLGLRSFGAPATRFAGLAAAPRPSGRGDAAVVRMAKREQELEEIRAMETENLEQEVVDLKGELFLLRLKRSARQEFKSSEFGRMRKRVARLLTVRREREIEQGINKRNSRKLDRKWKLGIVVGP

SEQ ID NO: 61036 - DNA, 909 bp, Triticum aestivum
  misc_feature (1)..(909): Ceres Seq. ID no. 12627237
gataacaaactgagcggcagaggcggccatagccgcgagcgaaagcttctctgtgtacaaatcgacttcgatgccactcgtcggtagccctcgccacggcccgccgctgaagctcgctggccgcgcccagcgccggcctccgccccgcaccattgcgcccaaatgcgacatctacttccctcccccgcgcctgaccagaagagccgtttccgccgcctcgctgctcctcaccgccctccctttccccgcctcgtcaccgcaactccccgtggcctccgcatcggaaacggaggcagaagccgggggaggagaaggaggcgcaccggcgctggagttggagcggtacacagaccaggaccaggggttcaccctcctcaagcccgcctcatggcccaaggtggaaaaggcgggcgcgacggcgctgtttcagcaagaggggaaggggagtaacaatattggggtcgtcgtcaatcctgttcgcctctcctcgctgacggatttcggcacaccgcagtttgtcgctgacaggcttctacaggcagagaagaaaaaggaaagtaccaaatctgcagaggtgatttccaccagagagagatcaggtcgcgatggcctgacagtgtacgaaatcgagtattcgttggatagcaccaggggagggatgaagcgcatcttctcagcggcgtttgttgcttctagaaatctttatctgctcaatgtagcctactctgatactgaggagaagcccttggacaagcagactagacttgttttggaggaagtccttcattcctttgattctgtgtagtttctttctcttaacaggggatgtatcatgtatgtctccctttcttgtttatacaaacttcgaccctaacataagcttctttacgttgatttgtaaaaagagtt

SEQ ID NO: 61037 - protein, 244 aa, Triticum aestivum
  peptide (1)..(244): Ceres Seq. ID no. 12627238
  misc_feature (75)..(243): Pfam Name: PsbP Pfam Description: PsbP
  misc_feature (88)..(244): Homolog of NCBI NO: 30683953 NR Description: expressed protein [Arabidopsis thaliana]
  misc_feature (88)..(244): Homolog of NCBI NO: 20198164 NR Description: hypothetical protein [Arabidopsis thaliana]
  misc_feature (1)..(161): Homolog of NCBI NO: 21741209 NR Description: OSJNBb0086G13.4 [Oryza sativa (japonica
MPLVGSPRHGPPLKLAGRAQRRPPPRTIAPKCDIYFPPPRLTRRAVSAASLLLTALPFPASSPQLPVASASETEAEAGGGEGGAPALELERYTDQDQGFTLLKPASWPKVEKAGATALFQQEGKGSNNIGVVVNPVRLSSLTDFGTPQFVADRLLQAEKKKESTKSAEVISTRERSGRDGLTVYEIEYSLDSTRGGMKRIFSAAFVASRNLYLLNVAYSDTEEKPLDKQTRLVLEEVLHSFDSV

SEQ ID NO: 61038 - DNA, 640 bp, Triticum aestivum
  misc_feature (1)..(640): Ceres Seq. ID no. 12599839
acaactcgcagctcacaagcctcaagcactactgcacgcagatccaaagcattcgcttgccatcatcccctctcctctccaagtctcgggcaaggctttcaccgtcgacaagaaccggatggctcgcttcgccgtcgtcgccgccatcctcgccctcctcgccgtcggcgccgccgcgcagggccccatgccggcgccccggatggccccgcttccggcgccaccggcgaggtccccggccaccgcccccgcgccggtcgccacccctccaaccgccgcgtcgccgtccccgatggcatctccccctgccccgaccaccgacgctccctccgcgatgacgccgtccgcggtctctgccacacccaccggcgcacccatcggcgcccccaccggcacccccgcgagctccgccgtttactcatcggccgccagcttcgtcgcagtcgtcggagcggtcgccgccgccatcgtgttctagatggatcgacgatttttttagcggggggactctgttcgctgttgtctatacaatttcattctttctgagatttcttcgttatagacggaggaaagattacacacgacattgcgatgtaatcttgatacgagattattatgaatataaaattctttcatttgt

SEQ ID NO: 61039 - protein, 181 aa, Triticum aestivum
  peptide (1)..(181): Ceres Seq. ID no. 12599840
TTRSSQASSTTARRSKAFACHHPLSSPSLGQGFHRRQEPDGSLRRRRRHPRPPRRRRRRAGPHAGAPDGPASGATGEVPGHRPRAGRHPSNRRVAVPDGISPCPDHRRSLRDDAVRGLCHTHRRTHRRPHRHPRELRRLLIGRQLRRSRRSGRRRHRVLDGSTIFLAGGLCSLLSIQFHSF

SEQ ID NO: 61040 - protein, 158 aa, Triticum aestivum
  peptide (1)..(158): Ceres Seq. ID no. 12599841
  misc_feature (48)..(155): Pfam Name: Glycoprotein GG/GX Pfam Description: Glycoprotein GG/GX
  misc_feature (66)..(136): Homolog of NCBI NO: 5139695 NR Description: expressed in cucumber hypocotyls [Cucumis sativus]
  misc_feature (59)..(134): Homolog of NCBI NO: 27375632 NR Description: blr0521 [Bradyrhizobium japonicum]
  misc_feature (17)..(155): Homolog of NCBI NO: 10945166 NR Description: TapA protein [Acidithiobacillus ferrooxidans]
  misc_feature (40)..(148): Homolog of NCBI NO: 5139695 NR Description: expressed in cucumber hypocotyls [Cucumis sativus]
  misc_feature (62)..(142): Homolog of NCBI NO: 30140331 NR Description: putative arabinagalactan protein [Lotus japonicus]
  misc_feature (39)..(131): Homolog of NCBI NO: 27375589 NR Description: blr0478 [Bradyrhizobium japonicum]
  misc_feature (47)..(158): Homolog of NCBI NO: 806720 NR Description: arabinogalactan-protein precursor
  misc_feature (41)..(158): Homolog of NCBI NO: 15238164 NR Description: arabinogalactan-protein (AGP4)
  misc_feature (40)..(135): Homolog of NCBI NO: 30140331 NR Description: putative arabinagalactan protein [Lotus japonicus]
  misc_feature (40)..(141): Homolog of NCBI NO: 40737023 NR Description: hypothetical protein [Oryza sativa (japonica
QLAAHKPQALLHADPKHSLAIIPSPLQVSGKAFTVDKNRMARFAVVAAILALLAVGAAAQGPMPAPRMAPLPAPPARSPATAPAPVATPPTAASPSPMASPPAPTTDAPSAMTPSAVSATPTGAPIGAPTGTPASSAVYSSAASFVAVVGAVAAAIVF

SEQ ID NO: 61041 - protein, 119 aa, Triticum aestivum
  peptide (1)..(119): Ceres Seq. ID no. 12599842
  misc_feature (9)..(116): Pfam Name: Glycoprotein GG/GX Pfam Description: Glycoprotein GG/GX
  misc_feature (27)..(97): Homolog of NCBI NO: 5139695 NR Description: expressed in cucumber hypocotyls [Cucumis sativus]
  misc_feature (20)..(95): Homolog of NCBI NO: 27375632 NR Description: blr0521 [Bradyrhizobium japonicum]
  misc_feature (1)..(116): Homolog of NCBI NO: 10945166 NR Description: TapA protein [Acidithiobacillus ferrooxidans]
  misc_feature (1)..(109): Homolog of NCBI NO: 5139695 NR Description: expressed in cucumber hypocotyls [Cucumis sativus]
  misc_feature (23)..(103): Homolog of NCBI NO: 30140331 NR Description: putative arabinagalactan protein [Lotus japonicus]
  misc_feature (1)..(92): Homolog of NCBI NO: 27375589 NR Description: blr0478 [Bradyrhizobium japonicum]
  misc_feature (8)..(119): Homolog of NCBI NO: 806720 NR Description: arabinogalactan-protein precursor
  misc_feature (2)..(119): Homolog of NCBI NO: 15238164 NR Description: arabinogalactan-protein (AGP4)
  misc_feature (1)..(96): Homolog of NCBI NO: 30140331 NR Description: putative arabinagalactan protein [Lotus japonicus]
  misc_feature (1)..(102): Homolog of NCBI NO: 40737023 NR Description: hypothetical protein [Oryza sativa (japonica
MARFAVVAAILALLAVGAAAQGPMPAPRMAPLPAPPARSPATAPAPVATPPTAASPSPMASPPAPTTDAPSAMTPSAVSATPTGAPIGAPTGTPASSAVYSSAASFVAVVGAVAAAIVF

SEQ ID NO: 61042 - DNA, 819 bp, Triticum aestivum
  misc_feature (1)..(819): Ceres Seq. ID no. 13590650
ttcccccccttccgccccgtcccgtctccctccccccttcctcggcggccgccgccgccccccaccgcggcgagtccctccgtccacagccggcctaagccgccgccgcgtgcgcccggggtcaccgaggaggcggcgccatgaggttggagaagtgctggttctgctcctccaccgtctaccccggccacggcatccagttcgtccgcaacgacgccaagatctttcggttctgccgatcaaaatgccacaagaacttcaagatgaagaggawccctcgcaaggttaagtggaccaaggcgtacagacgcctgcgtggaaaggacatgacacaggatgccacgtttgagttcgagaggaagaggaacaggccggagcgctacgaccgtaacgtcactgagcacactctcaaggccatcccacttatcacaaagatcagacatgaacggcagaagaaacacatchcagagagacagaaggytggtaagagcatggtgcgaaagagmgacgccaaggagctggatcaggatattggcatggttcccaagaaggagaccgagamctatgtagccaagcagaaggttctagtttytcagctgaagaccgaggagaatcttatggaagagtaatggaatcmaacagttttgtgtgtgcgcgtgcatgtgatcctcttytatatggagkamtttgtgttccatcagattgtagacgacagtgaacatttgttttccactcaccatgagcaagttatgcatgtgatgttatcgcgtggacgatggtcagatttgctctcccmccgtttaatagaattgsgaaatt

SEQ ID NO: 61043 - protein, 162 aa, Triticum aestivum
  peptide (1)..(162): Ceres Seq. ID no. 15220992
  misc_feature (1)..(75): Pfam Name: Ribosomal protein L24e Pfam Description: Ribosomal protein L24e
  misc_feature (1)..(134): Homolog of NCBI NO: 20381079 NR Description: Similar to 60S ribosomal protein L30 isolog [Homo
  misc_feature (1)..(134): Homolog of NCBI NO: 13529146 NR Description: 60S ribosomal protein L30 isolog [Homo sapiens]
  misc_feature (1)..(162): Homolog of NCBI NO: 30354249 NR Description: Similar to chromosome 15 open reading frame 15
  misc_feature (1)..(162): Homolog of NCBI NO: 10047102 NR Description: ribosomal protein L24-like
  misc_feature (1)..(162): Homolog of NCBI NO: 16740902 NR Description: 60S ribosomal protein L30 isolog [Homo sapiens]
  misc_feature (1)..(134): Homolog of NCBI NO: 27769143 NR Description: Similar to chromosome 15 open reading frame 15
  misc_feature (1)..(162): Homolog of NCBI NO: 38083793 NR Description: similar to ribosomal protein L24-like
  misc_feature (1)..(134): Homolog of NCBI NO: 28828084 NR Description: similar to Mus musculus (Mouse). Similar to 60S
  misc_feature (1)..(162): Homolog of NCBI NO: 15225363 NR Description: 60S ribosomal protein L24, putative [Arabidopsis
  misc_feature (1)..(162): Homolog of NCBI NO: 27817966 NR Description: putative 60S ribosomal protein L30
  misc_feature (45)..(45): Xaa is any aa, unknown or other
  misc_feature (109)..(109): Xaa is any aa, unknown or other
  misc_feature (114)..(114): Xaa is any aa, unknown or other
  misc_feature (122)..(122): Xaa is any aa, unknown or other
  misc_feature (141)..(141): Xaa is any aa, unknown or other
  misc_feature (151)..(151): Xaa is any aa, unknown or other
MRLEKCWFCSSTVYPGHGIQFVRNDAKIFRFCRSKCHKNFKMKRXPRKVKWTKAYRRLRGKDMTQDATFEFERKRNRPERYDRNVTEHTLKAIPLITKIRHERQKKHIXERQKXGKSMVRKXDAKELDQDIGMVPKKETEXYVAKQKVLVXQLKTEENLMEE

SEQ ID NO: 61044 - protein, 121 aa, Triticum aestivum
  peptide (1)..(121): Ceres Seq. ID no. 15220993
  misc_feature (1)..(93): Homolog of NCBI NO: 20381079 NR Description: Similar to 60S ribosomal protein L30 isolog [Homo
  misc_feature (1)..(93): Homolog of NCBI NO: 13529146 NR Description: 60S ribosomal protein L30 isolog [Homo sapiens]
  misc_feature (1)..(121): Homolog of NCBI NO: 30354249 NR Description: Similar to chromosome 15 open reading frame 15
  misc_feature (1)..(121): Homolog of NCBI NO: 10047102 NR Description: ribosomal protein L24-like
  misc_feature (1)..(121): Homolog of NCBI NO: 16740902 NR Description: 60S ribosomal protein L30 isolog [Homo sapiens]
  misc_feature (1)..(93): Homolog of NCBI NO: 27769143 NR Description: Similar to chromosome 15 open reading frame 15
  misc_feature (1)..(121): Homolog of NCBI NO: 38083793 NR Description: similar to ribosomal protein L24-like
  misc_feature (1)..(93): Homolog of NCBI NO: 28828084 NR Description: similar to Mus musculus (Mouse). Similar to 60S
  misc_feature (1)..(121): Homolog of NCBI NO: 15225363 NR Description: 60S ribosomal protein L24, putative [Arabidopsis
  misc_feature (1)..(121): Homolog of NCBI NO: 27817966 NR Description: putative 60S ribosomal protein L30
  misc_feature (4)..(4): Xaa is any aa, unknown or other
  misc_feature (68)..(68): Xaa is any aa, unknown or other
  misc_feature (73)..(73): Xaa is any aa, unknown or other
  misc_feature (81)..(81): Xaa is any aa, unknown or other
  misc_feature (100)..(100): Xaa is any aa, unknown or other
  misc_feature (110)..(110): Xaa is any aa, unknown or other
MKRXPRKVKWTKAYRRLRGKDMTQDATFEFERKRNRPERYDRNVTEHTLKAIPLITKIRHERQKKHIXERQKXGKSMVRKXDAKELDQDIGMVPKKETEXYVAKQKVLVXQLKTEENLMEE

SEQ ID NO: 61045 - protein, 100 aa, Triticum aestivum
  peptide (1)..(100): Ceres Seq. ID no. 15220994
  misc_feature (1)..(72): Homolog of NCBI NO: 20381079 NR Description: Similar to 60S ribosomal protein L30 isolog [Homo
  misc_feature (1)..(72): Homolog of NCBI NO: 13529146 NR Description: 60S ribosomal protein L30 isolog [Homo sapiens]
  misc_feature (1)..(100): Homolog of NCBI NO: 30354249 NR Description: Similar to chromosome 15 open reading frame 15
  misc_feature (1)..(100): Homolog of NCBI NO: 10047102 NR Description: ribosomal protein L24-like
  misc_feature (1)..(100): Homolog of NCBI NO: 16740902 NR Description: 60S ribosomal protein L30 isolog [Homo sapiens]
  misc_feature (1)..(72): Homolog of NCBI NO: 27769143 NR Description: Similar to chromosome 15 open reading frame 15
  misc_feature (1)..(100): Homolog of NCBI NO: 38083793 NR Description: similar to ribosomal protein L24-like
  misc_feature (1)..(72): Homolog of NCBI NO: 28828084 NR Description: similar to Mus musculus (Mouse). Similar to 60S
  misc_feature (1)..(100): Homolog of NCBI NO: 15225363 NR Description: 60S ribosomal protein L24, putative [Arabidopsis
  misc_feature (1)..(100): Homolog of NCBI NO: 27817966 NR Description: putative 60S ribosomal protein L30
  misc_feature (47)..(47): Xaa is any aa, unknown or other
  misc_feature (52)..(52): Xaa is any aa, unknown or other
  misc_feature (60)..(60): Xaa is any aa, unknown or other
  misc_feature (79)..(79): Xaa is any aa, unknown or other
  misc_feature (89)..(89): Xaa is any aa, unknown or other
MTQDATFEFERKRNRPERYDRNVTEHTLKAIPLITKIRHERQKKHIXERQKXGKSMVRKXDAKELDQDIGMVPKKETEXYVAKQKVLVXQLKTEENLMEE

SEQ ID NO: 61046 - DNA, 699 bp, Triticum aestivum
  misc_feature (1)..(699): Ceres Seq. ID no. 13591265
agcaaatccaagacacacacacacacacacacaaactagcttagcaggttgtcactgatcaccgtggtcgacgagaagacgacgatggcggtnaggctgatgctggtggcggcgctgctgtgcgcggcggcggcggcggccgcggcgcagcnggcgaacaacgtgcgcgcgacgtaccactactaccggccggcccagaacaactgggacctgggcgcgccggcggtgagcgcctactgcgcgacctgggacgccagcnagccgctgtcgtggcggtccaagtacgggtggacggcgttctgcggccccgccggcgcccacgggcaggcggcgtgcggcaagtgcctccgggtgacgaacccggcgacgggggcgcaggtgacggcgaggatcgtggaccagtgcgccaacggcgggctggacctggactgggacnccgtcttcaccaagatngacaccaacggggtcgggtaccagcagggccncctcaacgtcaactaccagttcgtcgactgccgcgactagatgaaatgaaagggtaagcaagctatgataagaataaaaggctagctagtagcgggctagctacgagtgagcactgagactgatccatgctgttgaataaaagctaccacgtgttgctgcattgtatacgtgtatacagtacgtacatggaaggaaataaagtggatcgtttcc

SEQ ID NO: 61047 - protein, 146 aa, Triticum aestivum
  peptide (1)..(146): Ceres Seq. ID no. 13591266
  misc_feature (24)..(144): Pfam Name: Barwin family Pfam Description: Barwin family
  misc_feature (29)..(146): Homolog of NCBI NO: 6048567 NR Description: PR-4 [Triticum aestivum]
  misc_feature (29)..(146): Homolog of NCBI NO: 6048569 NR Description: PR-4 [Triticum aestivum]
  misc_feature (29)..(146): Homolog of NCBI NO: 6002595 NR Description: pathogenesis-related protein 4 [Triticum aestivum]
  misc_feature (22)..(146): Homolog of NCBI NO: 626038 NR Description: barwin homolog wheatwin1 - wheat
  misc_feature (22)..(146): Homolog of NCBI NO: 442693 NR Description: Barwin, Basic Barley Seed Protein (Nmr, 20
  misc_feature (22)..(146): Homolog of NCBI NO: 114832 NR Description: BARWIN
  misc_feature (22)..(146): Homolog of NCBI NO: 1588926 NR Description: pathogenesis-related protein
  misc_feature (1)..(146): Homolog of NCBI NO: 7442145 NR Description: pathogenesis-related protein 4 - barley
  misc_feature (1)..(146): Homolog of NCBI NO: 34925030 NR Description: Wheatwin1 precursor (Pathogenesis-related protein
  misc_feature (1)..(146): Homolog of NCBI NO: 34925032 NR Description: Wheatwin2 precursor (Pathogenesis-related protein
  misc_feature (3)..(3): Xaa is any aa, unknown or other
  misc_feature (23)..(23): Xaa is any aa, unknown or other
  misc_feature (59)..(59): Xaa is any aa, unknown or other
  misc_feature (118)..(118): Xaa is any aa, unknown or other
  misc_feature (123)..(123): Xaa is any aa, unknown or other
  misc_feature (134)..(134): Xaa is any aa, unknown or other
MAXRLMLVAALLCAAAAAAAAQXANNVRATYHYYRPAQNNWDLGAPAVSAYCATWDASXPLSWRSKYGWTAFCGPAGAHGQAACGKCLRVTNPATGAQVTARIVDQCANGGLDLDWDXVFTKXDTNGVGYQQGXLNVNYQFVDCRD

SEQ ID NO: 61048 - protein, 141 aa, Triticum aestivum
  peptide (1)..(141): Ceres Seq. ID no. 13591267
  misc_feature (19)..(139): Pfam Name: Barwin family Pfam Description: Barwin family
  misc_feature (24)..(141): Homolog of NCBI NO: 6048567 NR Description: PR-4 [Triticum aestivum]
  misc_feature (24)..(141): Homolog of NCBI NO: 6048569 NR Description: PR-4 [Triticum aestivum]
  misc_feature (24)..(141): Homolog of NCBI NO: 6002595 NR Description: pathogenesis-related protein 4 [Triticum aestivum]
  misc_feature (17)..(141): Homolog of NCBI NO: 626038 NR Description: barwin homolog wheatwin1 - wheat
  misc_feature (17)..(141): Homolog of NCBI NO: 442693 NR Description: Barwin, Basic Barley Seed Protein (Nmr, 20
  misc_feature (17)..(141): Homolog of NCBI NO: 114832 NR Description: BARWIN
  misc_feature (17)..(141): Homolog of NCBI NO: 1588926 NR Description: pathogenesis-related protein
  misc_feature (1)..(141): Homolog of NCBI NO: 7442145 NR Description: pathogenesis-related protein 4 - barley
  misc_feature (1)..(141): Homolog of NCBI NO: 34925030 NR Description: Wheatwin1 precursor (Pathogenesis-related protein
  misc_feature (1)..(141): Homolog of NCBI NO: 34925032 NR Description: Wheatwin2 precursor (Pathogenesis-related protein
  misc_feature (18)..(18): Xaa is any aa, unknown or other
  misc_feature (54)..(54): Xaa is any aa, unknown or other
  misc_feature (113)..(113): Xaa is any aa, unknown or other
  misc_feature (118)..(118): Xaa is any aa, unknown or other
  misc_feature (129)..(129): Xaa is any aa, unknown or other
MLVAALLCAAAAAAAAQXANNVRATYHYYRPAQNNWDLGAPAVSAYCATWDASXPLSWRSKYGWTAFCGPAGAHGQAACGKCLRVTNPATGAQVTARIVDQCANGGLDLDWDXVFTKXDTNGVGYQQGXLNVNYQFVDCRD

SEQ ID NO: 61049 - DNA, 900 bp, Triticum aestivum
  misc_feature (1)..(900): Ceres Seq. ID no. 12781196
ataacccgaactctagaaaacttttcctcttatctctctccctctctcccaagtgtggttttcaacccattcgtaaagatcatgaaccttgaagagaaaccaaccatggcttcgagggctctacctcaagccgaaaatctctactacgtccggtgcagcatctgcaacaccatcctcgcggttgggataccaatgaagagaatgcttgacactgtaacggtgaaatgtggccattgtggtaacctctcgtttctcaccacaacccctcctctgcaaggccatgtcagcctcacccttcagatgcagagctttgatgggagtgagtataagaagggaagctcttcttcctcctcctcttctacctccagtgaccagccaccgtctcctagaccaccctttgtcgttaaacctcctgagaagaagcagagactcccatcggcttacaaccgcttcatgagggatgagatacaacgtatcaagagtgccaatccggaaataccacatcgcgaagcttttagtgctgctgccaaaaattgggctaagtacatacccaattctcctacttccattgcttccggagccagcaacatccatggttttggatttggtgagaagaagtgatagcccaaggaaatgtgcctaaaaataataaacgcacgtgtgcgagatcaacctttctggaaagggtttagttagctgcgtcgtttttctcatgttgtgttgctttagatgtttaaagttggtgtgttttcatttgtgtgtctctgcagaaatgatgttgccttagtatctttagttctgtctgtcttagatatgaaagctacattacgttgttgtgttcatctggacgttcatgtcgggacgttataagtttgtcttaatcctataacatttctgcct

SEQ ID NO: 61050 - protein, 206 aa, Triticum aestivum
  peptide (1)..(206): Ceres Seq. ID no. 12781197
  misc_feature (38)..(190): Pfam Name: YABBY protein Pfam Description: YABBY protein
  misc_feature (36)..(196): Homolog of NCBI NO: 11280864 NR Description: hypothetical protein 2 [imported] - rice
  misc_feature (41)..(82): Homolog of NCBI NO: 38605890 NR Description: OSJNBb0020O11.2 [Oryza sativa (japonica
  misc_feature (113)..(182): Homolog of NCBI NO: 38605890 NR Description: OSJNBb0020O11.2 [Oryza sativa (japonica
  misc_feature (34)..(82): Homolog of NCBI NO: 37535908 NR Description: hypothetical protein [Oryza sativa (japonica
  misc_feature (117)..(182): Homolog of NCBI NO: 37535908 NR Description: hypothetical protein [Oryza sativa (japonica
  misc_feature (44)..(195): Homolog of NCBI NO: 33333529 NR Description: CRC-related protein [Triticum aestivum]
  misc_feature (44)..(196): Homolog of NCBI NO: 40362873 NR Description: drooping leaf [Oryza sativa (japonica
  misc_feature (28)..(196): Homolog of NCBI NO: 37542843 NR Description: crabs claw [Nicotiana langsdorffii x Nicotiana
  misc_feature (37)..(206): Homolog of NCBI NO: 21617944 NR Description: transcription factor CRC [Arabidopsis thaliana]
  misc_feature (28)..(206): Homolog of NCBI NO: 15222228 NR Description: transcription factor CRC
ITRTLENFSSYLSPSLPSVVFNPFVKIMNLEEKPTMASRALPQAENLYYVRCSICNTILAVGIPMKRMLDTVTVKCGHCGNLSFLTTTPPLQGHVSLTLQMQSFDGSEYKKGSSSSSSSSTSSDQPPSPRPPFVVKPPEKKQRLPSAYNRFMRDEIQRIKSANPEIPHREAFSAAAKNWAKYIPNSPTSIASGASNIHGFGFGEKK

SEQ ID NO: 61051 - protein, 179 aa, Triticum aestivum
  peptide (1)..(179): Ceres Seq. ID no. 12781198
  misc_feature (11)..(163): Pfam Name: YABBY protein Pfam Description: YABBY protein
  misc_feature (9)..(169): Homolog of NCBI NO: 11280864 NR Description: hypothetical protein 2 [imported] - rice
  misc_feature (14)..(55): Homolog of NCBI NO: 38605890 NR Description: OSJNBb0020O11.2 [Oryza sativa (japonica
  misc_feature (86)..(155): Homolog of NCBI NO: 38605890 NR Description: OSJNBb0020O11.2 [Oryza sativa (japonica
  misc_feature (7)..(55): Homolog of NCBI NO: 37535908 NR Description: hypothetical protein [Oryza sativa (japonica
  misc_feature (90)..(155): Homolog of NCBI NO: 37535908 NR Description: hypothetical protein [Oryza sativa (japonica
  misc_feature (17)..(168): Homolog of NCBI NO: 33333529 NR Description: CRC-related protein [Triticum aestivum]
  misc_feature (17)..(169): Homolog of NCBI NO: 40362873 NR Description: drooping leaf [Oryza sativa (japonica
  misc_feature (1)..(169): Homolog of NCBI NO: 37542843 NR Description: crabs claw [Nicotiana langsdorffii x Nicotiana
  misc_feature (10)..(179): Homolog of NCBI NO: 21617944 NR Description: transcription factor CRC [Arabidopsis thaliana]
  misc_feature (1)..(179): Homolog of NCBI NO: 15222228 NR Description: transcription factor CRC
MNLEEKPTMASRALPQAENLYYVRCSICNTILAVGIPMKRMLDTVTVKCGHCGNLSFLTTTPPLQGHVSLTLQMQSFDGSEYKKGSSSSSSSSTSSDQPPSPRPPFVVKPPEKKQRLPSAYNRFMRDEIQRIKSANPEIPHREAFSAAAKNWAKYIPNSPTSIASGASNIHGFGFGEKK

SEQ ID NO: 61052 - protein, 171 aa, Triticum aestivum
  peptide (1)..(171): Ceres Seq. ID no. 12781199
  misc_feature (3)..(155): Pfam Name: YABBY protein Pfam Description: YABBY protein
  misc_feature (1)..(161): Homolog of NCBI NO: 11280864 NR Description: hypothetical protein 2 [imported] - rice
  misc_feature (6)..(47): Homolog of NCBI NO: 38605890 NR Description: OSJNBb0020O11.2 [Oryza sativa (japonica
  misc_feature (78)..(147): Homolog of NCBI NO: 38605890 NR Description: OSJNBb0020O11.2 [Oryza sativa (japonica
  misc_feature (1)..(47): Homolog of NCBI NO: 37535908 NR Description: hypothetical protein [Oryza sativa (japonica
  misc_feature (82)..(147): Homolog of NCBI NO: 37535908 NR Description: hypothetical protein [Oryza sativa (japonica
  misc_feature (9)..(160): Homolog of NCBI NO: 33333529 NR Description: CRC-related protein [Triticum aestivum]
  misc_feature (9)..(161): Homolog of NCBI NO: 40362873 NR Description: drooping leaf [Oryza sativa (japonica
  misc_feature (1)..(161): Homolog of NCBI NO: 37542843 NR Description: crabs claw [Nicotiana langsdorffii x Nicotiana
  misc_feature (2)..(171): Homolog of NCBI NO: 21617944 NR Description: transcription factor CRC [Arabidopsis thaliana]
  misc_feature (1)..(171): Homolog of NCBI NO: 15222228 NR Description: transcription factor CRC
MASRALPQAENLYYVRCSICNTILAVGIPMKRMLDTVTVKCGHCGNLSFLTTTPPLQGHVSLTLQMQSFDGSEYKKGSSSSSSSSTSSDQPPSPRPPFVVKPPEKKQRLPSAYNRFMRDEIQRIKSANPEIPHREAFSAAAKNWAKYIPNSPTSIASGASNIHGFGFGEKK

SEQ ID NO: 61053 - DNA, 716 bp, Triticum aestivum
  misc_feature (1)..(716): Ceres Seq. ID no. 13661089
acaacagcaaaccaaatcccccaagaccaaaaaaggccccagcaacccaagcgcgtcgaccccatccacagttgaatctctgagtttactttcagagaagattttagtcgagatggcgcaggcgatcgaggctcagagggagggcgcggaggtgtaccacggcgcggcgctgtgcgcggagaaggcggtggagctgctggccgagaccaacatgccgctgggcctgctgccgctggcagacatcgaggaggtgggctacaaccgcgccaccggcttcgtctggctgcgccagaagaaggcgctcacgcacaccttcaagcagatcgggcggcaggtctcgtacggcaccgaggtgacggccttcgtcgaggaccgcaagatgaagcgcatgaccggggtcaagagcaaggagctcctcatctggatcaccctctgcgacatgtacatcgagaaggacgatccctccaagatcaccttcaagacgcccacagggctggggaggaccttccccgtctccgccttcgagaagcaggacgacggcaaggccaaggccgcggctgccgacggcaaggaggccgtcgtggccaagtaggtgaggacggccggcatactctacaaagtttggatgaagagtcctcgagtccaatattaactatatacaaagtttggatgaagagtactatttgcttttatctttataataaactacggattat

SEQ ID NO: 61054 - protein, 196 aa, Triticum aestivum
  peptide (1)..(196): Ceres Seq. ID no. 13661090
  misc_feature (40)..(180): Pfam Name: Protein of unknown function, DUF538 Pfam Description: Protein of unknown function, DUF538
  misc_feature (36)..(174): Homolog of NCBI NO: 34915430 NR Description: hypothetical protein~similar to Arabidopsis
  misc_feature (38)..(193): Homolog of NCBI NO: 18405887 NR Description: expressed protein [Arabidopsis thaliana]
  misc_feature (38)..(174): Homolog of NCBI NO: 34915422 NR Description: hypothetical protein~similar to Arabidopsis
  misc_feature (38)..(174): Homolog of NCBI NO: 34915376 NR Description: hypothetical protein~similar to Oryza sativa
  misc_feature (38)..(174): Homolog of NCBI NO: 34915418 NR Description: hypothetical protein~similar to Arabidopsis
  misc_feature (38)..(174): Homolog of NCBI NO: 33146557 NR Description: unknown protein [Oryza sativa (japonica
  misc_feature (45)..(178): Homolog of NCBI NO: 18422648 NR Description: expressed protein [Arabidopsis thaliana]
  misc_feature (38)..(196): Homolog of NCBI NO: 18391006 NR Description: expressed protein [Arabidopsis thaliana]
  misc_feature (39)..(194): Homolog of NCBI NO: 34903866 NR Description: unnamed protein product [Oryza sativa (japonica
QQQTKSPKTKKGPSNPSASTPSTVESLSLLSEKILVEMAQAIEAQREGAEVYHGAALCAEKAVELLAETNMPLGLLPLADIEEVGYNRATGFVWLRQKKALTHTFKQIGRQVSYGTEVTAFVEDRKMKRMTGVKSKELLIWITLCDMYIEKDDPSKITFKTPTGLGRTFPVSAFEKQDDGKAKAAAADGKEAVVAK

SEQ ID NO: 61055 - protein, 159 aa, Triticum aestivum
  peptide (1)..(159): Ceres Seq. ID no. 13661091
  misc_feature (3)..(143): Pfam Name: Protein of unknown function, DUF538 Pfam Description: Protein of unknown function, DUF538
  misc_feature (1)..(137): Homolog of NCBI NO: 34915430 NR Description: hypothetical protein~similar to Arabidopsis
  misc_feature (1)..(156): Homolog of NCBI NO: 18405887 NR Description: expressed protein [Arabidopsis thaliana]
  misc_feature (1)..(137): Homolog of NCBI NO: 34915422 NR Description: hypothetical protein~similar to Arabidopsis
  misc_feature (1)..(137): Homolog of NCBI NO: 34915376 NR Description: hypothetical protein~similar to Oryza sativa
  misc_feature (1)..(137): Homolog of NCBI NO: 34915418 NR Description: hypothetical protein~similar to Arabidopsis
  misc_feature (1)..(137): Homolog of NCBI NO: 33146557 NR Description: unknown protein [Oryza sativa (japonica
  misc_feature (8)..(141): Homolog of NCBI NO: 18422648 NR Description: expressed protein [Arabidopsis thaliana]
  misc_feature (1)..(159): Homolog of NCBI NO: 18391006 NR Description: expressed protein [Arabidopsis thaliana]
  misc_feature (2)..(157): Homolog of NCBI NO: 34903866 NR Description: unnamed protein product [Oryza sativa (japonica
MAQAIEAQREGAEVYHGAALCAEKAVELLAETNMPLGLLPLADIEEVGYNRATGFVWLRQKKALTHTFKQIGRQVSYGTEVTAFVEDRKMKRMTGVKSKELLIWITLCDMYIEKDDPSKITFKTPTGLGRTFPVSAFEKQDDGKAKAAAADGKEAVVAK

SEQ ID NO: 61056 - protein, 126 aa, Triticum aestivum
  peptide (1)..(126): Ceres Seq. ID no. 13661092
  misc_feature (1)..(110): Pfam Name: Protein of unknown function, DUF538 Pfam Description: Protein of unknown function, DUF538
  misc_feature (1)..(104): Homolog of NCBI NO: 34915430 NR Description: hypothetical protein~similar to Arabidopsis
  misc_feature (1)..(123): Homolog of NCBI NO: 18405887 NR Description: expressed protein [Arabidopsis thaliana]
  misc_feature (1)..(104): Homolog of NCBI NO: 34915422 NR Description: hypothetical protein~similar to Arabidopsis
  misc_feature (1)..(104): Homolog of NCBI NO: 34915376 NR Description: hypothetical protein~similar to Oryza sativa
  misc_feature (1)..(104): Homolog of NCBI NO: 34915418 NR Description: hypothetical protein~similar to Arabidopsis
  misc_feature (1)..(104): Homolog of NCBI NO: 33146557 NR Description: unknown protein [Oryza sativa (japonica
  misc_feature (1)..(108): Homolog of NCBI NO: 18422648 NR Description: expressed protein [Arabidopsis thaliana]
  misc_feature (1)..(126): Homolog of NCBI NO: 18391006 NR Description: expressed protein [Arabidopsis thaliana]
  misc_feature (1)..(124): Homolog of NCBI NO: 34903866 NR Description: unnamed protein product [Oryza sativa (japonica
MPLGLLPLADIEEVGYNRATGFVWLRQKKALTHTFKQIGRQVSYGTEVTAFVEDRKMKRMTGVKSKELLIWITLCDMYIEKDDPSKITFKTPTGLGRTFPVSAFEKQDDGKAKAAAADGKEAVVAK

SEQ ID NO: 61057 - DNA, 1140 bp, Triticum aestivum
  misc_feature (1)..(1140): Ceres Seq. ID no. 15179622
acgtacggtgggctagaagataataggcgcgagtttttccatgttgctccgcctgaagattaccaccgtccagcctgtggcgctgcttcttgggcatgaccatggcgcgacagcatccccgcggcgtctcgccggagcccttccgcagggcggtggagcgtccacgagggcaaagaggctgaggagcgtggcggtggcgatggcgctcaaggaggaggagccggagagcagccgaagccgcttcgccgggggcggcccgagctgggaccccaggatggagatcggagtcccatacgagcaaagaccggttaacgagtactccgctctcaaggagagcaccttgtactcttgggcagagctgagtccaggctctttcttcatgcgcctaggcagcctgtgcctggtcacatttacagttctggcggccccaatctcagccgcaagtttcagtcccggaaaggatccactcaagttcgtgctagctgctgggattgggaccctgctcctggtgtctcttgtggttctcaggatctacctgggttggagctacgtgggtgacaggctattatcggcagtcgtgccgtatgaagaaaccgggtggtacgatggccaaatgtgggtcaagccagcagaggtgctggctcgcgacagactattgggatcttacaaggtaaagccggtgatcaacctgctcaaacagacactggtgggcaccggtgcgctgctcgtcggggcggtggcactcttcgccttcgccgcccccgtcgaggaattcgtccactccttcaatggagcccccactaccgcctcctctaagccgatcatgaggagagaggacctgctgaagctgcctgccgaggtgaggcaagacgacgacctcgctgcggctgctgcggaggccgccaatggacgcccggtttactgcagggaccgctactaccgggcgctcgccggcggtcagtactgcacctcggacgacctgctcaactgatgatagcaaatagtaatagtacatacgtattctggtatatgcagtttgccacattgatataataagcacaagttaagcaaatgtatcttatcggaatgaaattttgggaagaacgatgttgttgattctgtaatagattgcttcatgat

SEQ ID NO: 61058 - protein, 316 aa, Triticum aestivum
  peptide (1)..(316): Ceres Seq. ID no. 15179623
  misc_feature (83)..(235): Homolog of NCBI NO: 11467354 NR Description: ycf36 [Cyanophora paradoxa]
  misc_feature (83)..(235): Homolog of NCBI NO: 22298607 NR Description: ORF_ID:tll1063~hypothetical protein
  misc_feature (83)..(233): Homolog of NCBI NO: 23040962 NR Description: hypothetical protein [Trichodesmium erythraeum
  misc_feature (83)..(238): Homolog of NCBI NO: 17231662 NR Description: hypothetical protein [Nostoc sp. PCC 7120]
  misc_feature (83)..(226): Homolog of NCBI NO: 3184557 NR Description: unknown [Synechococcus sp. PCC 7002]
  misc_feature (83)..(229): Homolog of NCBI NO: 16331827 NR Description: hypothetical protein [Synechocystis sp. PCC 6803]
  misc_feature (83)..(238): Homolog of NCBI NO: 11465739 NR Description: ORF36 [Porphyra purpurea]
  misc_feature (81)..(238): Homolog of NCBI NO: 37520418 NR Description: hypothetical protein [Gloeobacter violaceus]
  misc_feature (38)..(315): Homolog of NCBI NO: 15240715 NR Description: expressed protein [Arabidopsis thaliana]
  misc_feature (54)..(316): Homolog of NCBI NO: 40736997 NR Description: expressed protein [Oryza sativa (japonica
MLLRLKITTVQPVALLLGHDHGATASPRRLAGALPQGGGASTRAKRLRSVAVAMALKEEEPESSRSRFAGGGPSWDPRMEIGVPYEQRPVNEYSALKESTLYSWAELSPGSFFMRLGSLCLVTFTVLAAPISAASFSPGKDPLKFVLAAGIGTLLLVSLVVLRIYLGWSYVGDRLLSAVVPYEETGWYDGQMWVKPAEVLARDRLLGSYKVKPVINLLKQTLVGTGALLVGAVALFAFAAPVEEFVHSFNGAPTTASSKPIMRREDLLKLPAEVRQDDDLAAAAAEAANGRPVYCRDRYYRALAGGQYCTSDDLLN

SEQ ID NO: 61059 - protein, 263 aa, Triticum aestivum
  peptide (1)..(263): Ceres Seq. ID no. 15179624
  misc_feature (30)..(182): Homolog of NCBI NO: 11467354 NR Description: ycf36 [Cyanophora paradoxa]
  misc_feature (30)..(182): Homolog of NCBI NO: 22298607 NR Description: ORF_ID:tll1063~hypothetical protein
  misc_feature (30)..(180): Homolog of NCBI NO: 23040962 NR Description: hypothetical protein [Trichodesmium erythraeum
  misc_feature (30)..(185): Homolog of NCBI NO: 17231662 NR Description: hypothetical protein [Nostoc sp. PCC 7120]
  misc_feature (30)..(173): Homolog of NCBI NO: 3184557 NR Description: unknown [Synechococcus sp. PCC 7002]
  misc_feature (30)..(176): Homolog of NCBI NO: 16331827 NR Description: hypothetical protein [Synechocystis sp. PCC 6803]
  misc_feature (30)..(185): Homolog of NCBI NO: 11465739 NR Description: ORF36 [Porphyra purpurea]
  misc_feature (28)..(185): Homolog of NCBI NO: 37520418 NR Description: hypothetical protein [Gloeobacter violaceus]
  misc_feature (1)..(262): Homolog of NCBI NO: 15240715 NR Description: expressed protein [Arabidopsis thaliana]
  misc_feature (1)..(263): Homolog of NCBI NO: 40736997 NR Description: expressed protein [Oryza sativa (japonica
MALKEEEPESSRSRFAGGGPSWDPRMEIGVPYEQRPVNEYSALKESTLYSWAELSPGSFFMRLGSLCLVTFTVLAAPISAASFSPGKDPLKFVLAAGIGTLLLVSLVVLRIYLGWSYVGDRLLSAVVPYEETGWYDGQMWVKPAEVLARDRLLGSYKVKPVINLLKQTLVGTGALLVGAVALFAFAAPVEEFVHSFNGAPTTASSKPIMRREDLLKLPAEVRQDDDLAAAAAEAANGRPVYCRDRYYRALAGGQYCTSDDLLN

SEQ ID NO: 61060 - protein, 238 aa, Triticum aestivum
  peptide (1)..(238): Ceres Seq. ID no. 15179625
  misc_feature (5)..(157): Homolog of NCBI NO: 11467354 NR Description: ycf36 [Cyanophora paradoxa]
  misc_feature (5)..(157): Homolog of NCBI NO: 22298607 NR Description: ORF_ID:tll1063~hypothetical protein
  misc_feature (5)..(155): Homolog of NCBI NO: 23040962 NR Description: hypothetical protein [Trichodesmium erythraeum
  misc_feature (5)..(160): Homolog of NCBI NO: 17231662 NR Description: hypothetical protein [Nostoc sp. PCC 7120]
  misc_feature (5)..(148): Homolog of NCBI NO: 3184557 NR Description: unknown [Synechococcus sp. PCC 7002]
  misc_feature (5)..(151): Homolog of NCBI NO: 16331827 NR Description: hypothetical protein [Synechocystis sp. PCC 6803]
  misc_feature (5)..(160): Homolog of NCBI NO: 11465739 NR Description: ORF36 [Porphyra purpurea]
  misc_feature (3)..(160): Homolog of NCBI NO: 37520418 NR Description: hypothetical protein [Gloeobacter violaceus]
  misc_feature (1)..(237): Homolog of NCBI NO: 15240715 NR Description: expressed protein [Arabidopsis thaliana]
  misc_feature (1)..(238): Homolog of NCBI NO: 40736997 NR Description: expressed protein [Oryza sativa (japonica
MEIGVPYEQRPVNEYSALKESTLYSWAELSPGSFFMRLGSLCLVTFTVLAAPISAASFSPGKDPLKFVLAAGIGTLLLVSLVVLRIYLGWSYVGDRLLSAVVPYEETGWYDGQMWVKPAEVLARDRLLGSYKVKPVINLLKQTLVGTGALLVGAVALFAFAAPVEEFVHSFNGAPTTASSKPIMRREDLLKLPAEVRQDDDLAAAAAEAANGRPVYCRDRYYRALAGGQYCTSDDLLN

SEQ ID NO: 61061 - DNA, 853 bp, Triticum aestivum
  misc_feature (1)..(853): Ceres Seq. ID no. 12597985
acaccacccggagaactgagctgagatactacttctgttctcttctccccccttttccgagccccccacccgtcatctctccagcctccagtctccgccgacgccatggggcaggtctgggcgtctctgcaagagaagctccaagggcggcactggaaggagaggcaggtgcggaagatcaccgacagggtgttcgaccggctcaccgaggatacccggaagcccgagaaggacgccctcaagttcgaggaggtctacatcgccgtcctctgcgtctacaatgacatcaacaagtacttgccggggccgcactacgaccctccgtccaaggagaggctcaaggaactcatgaaagagtttgacatcgacatgaacggtctcctggatcgcgaggagttcgcggagttcatccggaagctgaccgccgagtcactctgcgcgatcagcctcaagctgatcatcacgctggtcgccgcccctgcgctggcgctggcgaccaanagggcaaccgagggcgtccccggngtcggcaaggtagtgcacaaggtgcccaatgccatttatgccgccgccatcaccatggctgccgtgntcatccagagatccgccgagggcgtngagtanaagcggcatcgcgccgtgaactgtagatgcnccaggcaaccagggagggtgtaaatgtgctgtgatttgccgtgtgaagggtgatgccctgtgggacttatagttttttctgtaataccttcctgtctgtgcttcttggtgttgctagcctggtgtgattcaaaaagacagtattcgctgcttgttgacatgataaattnttggactaaataaanccgtggtcctgctg

SEQ ID NO: 61062 - protein, 190 aa, Triticum aestivum
  peptide (1)..(190): Ceres Seq. ID no. 12597986
  misc_feature (41)..(162): Homolog of NCBI NO: 26453144 NR Description: unknown protein [Arabidopsis thaliana]
  misc_feature (41)..(162): Homolog of NCBI NO: 18420040 NR Description: Expressed protein
  misc_feature (1)..(165): Homolog of NCBI NO: 38344138 NR Description: OSJNBa0041A02.5 [Oryza sativa (japonica
  misc_feature (1)..(164): Homolog of NCBI NO: 18408144 NR Description: expressed protein
  misc_feature (1)..(172): Homolog of NCBI NO: 38344137 NR Description: OSJNBa0041A02.4 [Oryza sativa (japonica
  misc_feature (132)..(132): Xaa is any aa, unknown or other
  misc_feature (140)..(140): Xaa is any aa, unknown or other
  misc_feature (163)..(163): Xaa is any aa, unknown or other
  misc_feature (171)..(171): Xaa is any aa, unknown or other
  misc_feature (173)..(173): Xaa is any aa, unknown or other
  misc_feature (184)..(184): Xaa is any aa, unknown or other
MGQVWASLQEKLQGRHWKERQVRKITDRVFDRLTEDTRKPEKDALKFEEVYIAVLCVYNDINKYLPGPHYDPPSKERLKELMKEFDIDMNGLLDREEFAEFIRKLTAESLCAISLKLIITLVAAPALALATXRATEGVPXVGKVVHKVPNAIYAAAITMAAVXIQRSAEGXEXKRHRAVNCRCXRQPGRV

SEQ ID NO: 61063 - protein, 109 aa, Triticum aestivum
  peptide (1)..(109): Ceres Seq. ID no. 12597987
  misc_feature (1)..(81): Homolog of NCBI NO: 26453144 NR Description: unknown protein [Arabidopsis thaliana]
  misc_feature (1)..(81): Homolog of NCBI NO: 18420040 NR Description: Expressed protein
  misc_feature (1)..(84): Homolog of NCBI NO: 38344138 NR Description: OSJNBa0041A02.5 [Oryza sativa (japonica
  misc_feature (1)..(83): Homolog of NCBI NO: 18408144 NR Description: expressed protein
  misc_feature (1)..(91): Homolog of NCBI NO: 38344137 NR Description: OSJNBa0041A02.4 [Oryza sativa (japonica
  misc_feature (51)..(51): Xaa is any aa, unknown or other
  misc_feature (59)..(59): Xaa is any aa, unknown or other
  misc_feature (82)..(82): Xaa is any aa, unknown or other
  misc_feature (90)..(90): Xaa is any aa, unknown or other
  misc_feature (92)..(92): Xaa is any aa, unknown or other
  misc_feature (103)..(103): Xaa is any aa, unknown or other
MKEFDIDMNGLLDREEFAEFIRKLTAESLCAISLKLIITLVAAPALALATXRATEGVPXVGKVVHKVPNAIYAAAITMAAVXIQRSAEGXEXKRHRAVNCRCXRQPGRV

SEQ ID NO: 61064 - protein, 102 aa, Triticum aestivum
  peptide (1)..(102): Ceres Seq. ID no. 12597988
  misc_feature (1)..(74): Homolog of NCBI NO: 26453144 NR Description: unknown protein [Arabidopsis thaliana]
  misc_feature (1)..(74): Homolog of NCBI NO: 18420040 NR Description: Expressed protein
  misc_feature (1)..(77): Homolog of NCBI NO: 38344138 NR Description: OSJNBa0041A02.5 [Oryza sativa (japonica
  misc_feature (1)..(76): Homolog of NCBI NO: 18408144 NR Description: expressed protein
  misc_feature (1)..(84): Homolog of NCBI NO: 38344137 NR Description: OSJNBa0041A02.4 [Oryza sativa (japonica
  misc_feature (44)..(44): Xaa is any aa, unknown or other
  misc_feature (52)..(52): Xaa is any aa, unknown or other
  misc_feature (75)..(75): Xaa is any aa, unknown or other
  misc_feature (83)..(83): Xaa is any aa, unknown or other
  misc_feature (85)..(85): Xaa is any aa, unknown or other
  misc_feature (96)..(96): Xaa is any aa, unknown or other
MNGLLDREEFAEFIRKLTAESLCAISLKLIITLVAAPALALATXRATEGVPXVGKVVHKVPNAIYAAAITMAAVXIQRSAEGXEXKRHRAVNCRCXRQPGRV

SEQ ID NO: 61065 - DNA, 1231 bp, Triticum aestivum
  misc_feature (1)..(1231): Ceres Seq. ID no. 15225993
atttagcttcccattacaaacacagatcaaaacttcgttcttgtcggaaaaaacaaatcaatggcaaacgcctggaaaagagacaagaatcagaagctattagctccaaagaccttaataatcactcttcttgttctctccatcatcttcctctcctcactcttcttcttctcctcctcctcctcctcctcatatctccaaaacaccaatccaaatccgaccatctccaccaagttcccaatcccacccttcgactgcttcaaatgcccccaatccaaacccgtgatcgccaacgtcgtcgagaatctcaaataccctttcctctactccctcgccgatctcggtaacctcccggagaagccgcacaagaacatcgtgaggctgctcaaggggaagccctttcggaaaccggacatctccgctacgattcaggaggttctggagaggatgagtgctgatggcaaaagagatgggttcgttgtcgatgtgggagctaatgtcggtatggctagcttcgctgccgcggccatggggtttaaagtgcttgcctttgagcctgttttcgagaatttgcagaggatctgtgatgggatttggttcaatagagttgcctctttggtcactgtgtttgaagctgctgcttctgatagaaatggggatattaccttccacaagttggttggaaggcttgacaacagcgcggtttcgaaggtgggagcaagacttgcattcaagtccaacaaagaaatagcggtccaagtgaaatccatacctcttgatgaactcatcccgccttctcaaccgatccttttaatcaagatcgatgttcaaggctgggagaagcatgttttaaacggtgcaaagaagctgctctcgaggaaaccggcggaagctccgtatctaatctacgaggaagatgaaagattgctcaaggcgagcaatagtagctccaaagagatacgggatttcctgaaaagcgttgggtatagcaagtgcgtcgagcatggcacagatgcgcattgcactaaggagtaattgacattggaactttgcgagaagggctaataagttgttgccatgcgagttgaggaacataagaaaatgaggccattagtatttgctgagaaagaaagttgctaattgtggtcagtcatatttgtttctccttgtaatatttactcattttttgtgataccagttctaactagtaaagatatgttattgttgatgt

SEQ ID NO: 61066 - protein, 324 aa, Triticum aestivum
  peptide (1)..(324): Ceres Seq. ID no. 15225994
  misc_feature (135)..(311): Pfam Name: Vibrio cholerae RfbT protein Pfam Description: Vibrio cholerae RfbT protein
  misc_feature (2)..(323): Homolog of NCBI NO: 34896590 NR Description: hypothetical protein [Oryza sativa]
  misc_feature (1)..(324): Homolog of NCBI NO: 18401209 NR Description: expressed protein [Arabidopsis thaliana]
  misc_feature (1)..(324): Homolog of NCBI NO: 21593723 NR Description: unknown [Arabidopsis thaliana]
MANAWKRDKNQKLLAPKTLIITLLVLSIIFLSSLFFFSSSSSSSYLQNTNPNPTISTKFPIPPFDCFKCPQSKPVIANVVENLKYPFLYSLADLGNLPEKPHKNIVRLLKGKPFRKPDISATIQEVLERMSADGKRDGFVVDVGANVGMASFAAAAMGFKVLAFEPVFENLQRICDGIWFNRVASLVTVFEAAASDRNGDITFHKLVGRLDNSAVSKVGARLAFKSNKEIAVQVKSIPLDELIPPSQPILLIKIDVQGWEKHVLNGAKKLLSRKPAEAPYLIYEEDERLLKASNSSSKEIRDFLKSVGYSKCVEHGTDAHCTKE

SEQ ID NO: 61067 - protein, 195 aa, Triticum aestivum
  peptide (1)..(195): Ceres Seq. ID no. 15225995
  misc_feature (6)..(182): Pfam Name: Vibrio cholerae RfbT protein Pfam Description: Vibrio cholerae RfbT protein
  misc_feature (1)..(194): Homolog of NCBI NO: 34896590 NR Description: hypothetical protein [Oryza sativa]
  misc_feature (1)..(195): Homolog of NCBI NO: 18401209 NR Description: expressed protein [Arabidopsis thaliana]
  misc_feature (1)..(195): Homolog of NCBI NO: 21593723 NR Description: unknown [Arabidopsis thaliana]
MSADGKRDGFVVDVGANVGMASFAAAAMGFKVLAFEPVFENLQRICDGIWFNRVASLVTVFEAAASDRNGDITFHKLVGRLDNSAVSKVGARLAFKSNKEIAVQVKSIPLDELIPPSQPILLIKIDVQGWEKHVLNGAKKLLSRKPAEAPYLIYEEDERLLKASNSSSKEIRDFLKSVGYSKCVEHGTDAHCTKE

SEQ ID NO: 61068 - protein, 176 aa, Triticum aestivum
  peptide (1)..(176): Ceres Seq. ID no. 15225996
  misc_feature (1)..(163): Pfam Name: Vibrio cholerae RfbT protein Pfam Description: Vibrio cholerae RfbT protein
  misc_feature (1)..(175): Homolog of NCBI NO: 34896590 NR Description: hypothetical protein [Oryza sativa]
  misc_feature (1)..(176): Homolog of NCBI NO: 18401209 NR Description: expressed protein [Arabidopsis thaliana]
  misc_feature (1)..(176): Homolog of NCBI NO: 21593723 NR Description: unknown [Arabidopsis thaliana]
MASFAAAAMGFKVLAFEPVFENLQRICDGIWFNRVASLVTVFEAAASDRNGDITFHKLVGRLDNSAVSKVGARLAFKSNKEIAVQVKSIPLDELIPPSQPILLIKIDVQGWEKHVLNGAKKLLSRKPAEAPYLIYEEDERLLKASNSSSKEIRDFLKSVGYSKCVEHGTDAHCTKE

SEQ ID NO: 61069 - DNA, 1102 bp, Triticum aestivum
  misc_feature (1)..(1102): Ceres Seq. ID no. 13598724
gactaatatttttcagttgtcaccaaatttctgctctttttaagtaatttaattttatatcagattaaattaaatcccctccgttgttaacgttgtattgttttctgggatgcaggacggcggatcaaagttcttctggttctccatctgcatcatgttcatacgatgtctactgctttggaaaagtattgctggagctggtgacagggagacttggtatcagtgcatcaagtgacggtacaacaagtgattggcttgataacaccctgaggtacatcaacatttatgagaaagagctcatgagcaaaatcattgacccaaccctcattattgatgaggatcatttggaggaagtctgggcaatggcaattgtcgcgaagtcttgcttgaatcctaggtcttcgaagcggccaccaatgaaatatatcctaaaagcacttgagaatcccttgaaagtggtaagagaagataacggctctagctcggccaggttgagagcaacatcttcaaggggttcatggaatgctgcattcttcgggagttggcggcatagctcgtcagagattggtccttcaagggatgataacatgtttaaacggtcagagacaatcaaatcatctggagggagcaatggtgatcactcttcgtcccgcaggaggcaatctaaggagatcttccccgagccatctggttctcgtgacacagaggattaaggatacttcattctttctttttgcgatcctttgggttaacagaggttgctctgttgaagctctgctgccagcgtgtgattagattctttcagctgaaaagccggagggcgaattcgcctgttgccaatgacttcgcaagcagcggactgtcgccgaggcaccattttttgggggttggaatgtgaggtgagcgtatggaggtccgtgtataccctgcctggtgcactgtctggactatggcgtggagtggctctggtttctctttcttttccttttttcttcttctcctggtcatgattaaagaggaaatgtcgagctgattctttttctccttcctgctgtaattgattgtttcattgttgatcatagcaaaaatgttcgttccgtcc

SEQ ID NO: 61070 - protein, 137 aa, Triticum aestivum
  peptide (1)..(137): Ceres Seq. ID no. 13598725
  misc_feature (1)..(47): Homolog of NCBI NO: 18395641 NR Description: leucine-rich repeat transmembrane protein kinase,
  misc_feature (57)..(137): Homolog of NCBI NO: 15226721 NR Description: leucine-rich repeat transmembrane protein kinase,
  misc_feature (1)..(125): Homolog of NCBI NO: 20466770 NR Description: receptor protein kinase-like protein [Arabidopsis
  misc_feature (1)..(125): Homolog of NCBI NO: 15235005 NR Description: leucine-rich repeat transmembrane protein kinase,
  misc_feature (1)..(121): Homolog of NCBI NO: 15226721 NR Description: leucine-rich repeat transmembrane protein kinase,
  misc_feature (1)..(129): Homolog of NCBI NO: 34915200 NR Description: putative  receptor-like protein kinase
  misc_feature (1)..(131): Homolog of NCBI NO: 34394416 NR Description: putative Systemin receptor SR160 precursor
MSKIIDPTLIIDEDHLEEVWAMAIVAKSCLNPRSSKRPPMKYILKALENPLKVVREDNGSSSARLRATSSRGSWNAAFFGSWRHSSSEIGPSRDDNMFKRSETIKSSGGSNGDHSSSRRRQSKEIFPEPSGSRDTED

SEQ ID NO: 61071 - protein, 116 aa, Triticum aestivum
  peptide (1)..(116): Ceres Seq. ID no. 13598726
  misc_feature (1)..(26): Homolog of NCBI NO: 18395641 NR Description: leucine-rich repeat transmembrane protein kinase,
  misc_feature (36)..(116): Homolog of NCBI NO: 15226721 NR Description: leucine-rich repeat transmembrane protein kinase,
  misc_feature (1)..(104): Homolog of NCBI NO: 20466770 NR Description: receptor protein kinase-like protein [Arabidopsis
  misc_feature (1)..(104): Homolog of NCBI NO: 15235005 NR Description: leucine-rich repeat transmembrane protein kinase,
  misc_feature (1)..(100): Homolog of NCBI NO: 15226721 NR Description: leucine-rich repeat transmembrane protein kinase,
  misc_feature (1)..(108): Homolog of NCBI NO: 34915200 NR Description: putative  receptor-like protein kinase
  misc_feature (1)..(110): Homolog of NCBI NO: 34394416 NR Description: putative Systemin receptor SR160 precursor
MAIVAKSCLNPRSSKRPPMKYILKALENPLKVVREDNGSSSARLRATSSRGSWNAAFFGSWRHSSSEIGPSRDDNMFKRSETIKSSGGSNGDHSSSRRRQSKEIFPEPSGSRDTED

SEQ ID NO: 61072 - protein, 98 aa, Triticum aestivum
  peptide (1)..(98): Ceres Seq. ID no. 13598727
  misc_feature (18)..(98): Homolog of NCBI NO: 15226721 NR Description: leucine-rich repeat transmembrane protein kinase,
  misc_feature (1)..(86): Homolog of NCBI NO: 20466770 NR Description: receptor protein kinase-like protein [Arabidopsis
  misc_feature (1)..(86): Homolog of NCBI NO: 15235005 NR Description: leucine-rich repeat transmembrane protein kinase,
  misc_feature (1)..(82): Homolog of NCBI NO: 15226721 NR Description: leucine-rich repeat transmembrane protein kinase,
  misc_feature (1)..(90): Homolog of NCBI NO: 34915200 NR Description: putative  receptor-like protein kinase
  misc_feature (1)..(92): Homolog of NCBI NO: 34394416 NR Description: putative Systemin receptor SR160 precursor
MKYILKALENPLKVVREDNGSSSARLRATSSRGSWNAAFFGSWRHSSSEIGPSRDDNMFKRSETIKSSGGSNGDHSSSRRRQSKEIFPEPSGSRDTED

SEQ ID NO: 61073 - DNA, 1005 bp, Triticum aestivum
  misc_feature (1)..(1005): Ceres Seq. ID no. 12598249
aaatatccacggagcgcacggaggagatcgtcgtcatccgccaaaccagatcggcttcttcttcttcttcttcttcttcaacttcgcagaatcgtcggcggtcgtctcttcctctagttagatccttcgagagcaatgggaggaggcaatgatggtcatgggtacccacccggtggccaggggggataccctccggcagggtacccgccgcagcagggaggttaccctccacagcaaggaggttaccctccacagcaaggatacccgcctgcacctggagcttacccacctgcacctggggcataccctcctgcacctggggcgtaccctcctgcacctggagcgggaggccctgacggggagaaggggctcctctccaacatcatgcatggtgttgccggtgctcatggtggtggtcatggctacccatctggtggccacgggtaccccccgcagcagcatggataccctcagcaaggctaccctcctcagcatggctacccaccgcagcagcatggctaccctccacagcagcatggctacccccctgctggctaccctggctcatctggtcacagtggtagccatggaggaggaggcatgggcatgggtggcattctggctggaggagcagcagctgctgccgccgcttacggagcacacaagctttctcacggcggccacggtggaggtggacacatgatgggaggcatgatgggcggccatggaggatatggcggcgggtacggccaccacggcggcaagttcaagcacgggaagcacggccacggcaagttcaagcacggcaagcatgggaagcacggcatgttcggcggcggcggaaagttcaagaagtggaagtaatgcgctagctagtagcttcaccatggctgatgaatcaaaaaaaatacctaatctcttcgtgtaggcttccagaacttggtttggtcagggaaagcctttgtagatgtatctaagcagggtgtggtgtggttgcttcccggc

SEQ ID NO: 61074 - protein, 242 aa, Triticum aestivum
  peptide (1)..(242): Ceres Seq. ID no. 12598250
  misc_feature (7)..(236): Pfam Name: Dehydrin Pfam Description: Dehydrin
  misc_feature (94)..(242): Homolog of NCBI NO: 21553447 NR Description: putative glycine and proline-rich protein
  misc_feature (94)..(242): Homolog of NCBI NO: 18398103 NR Description: expressed protein
  misc_feature (85)..(242): Homolog of NCBI NO: 15238005 NR Description: glycine/proline-rich protein; protein id:
  misc_feature (50)..(235): Homolog of NCBI NO: 18422542 NR Description: expressed protein
  misc_feature (74)..(242): Homolog of NCBI NO: 13543234 NR Description: Unknown (protein for MGC:12025) [Mus musculus]
  misc_feature (69)..(234): Homolog of NCBI NO: 8099125 NR Description: rice EST C27893 corresponds to a region of the
  misc_feature (93)..(242): Homolog of NCBI NO: 15234178 NR Description: putative protein
  misc_feature (67)..(242): Homolog of NCBI NO: 13543234 NR Description: Unknown (protein for MGC:12025) [Mus musculus]
  misc_feature (57)..(242): Homolog of NCBI NO: 33668156 NR Description: GPRP [Oryza sativa (indica cultivar-group)]
  misc_feature (74)..(242): Homolog of NCBI NO: 6478148 NR Description: putative glycine and proline-rich protein
MGGGNDGHGYPPGGQGGYPPAGYPPQQGGYPPQQGGYPPQQGYPPAPGAYPPAPGAYPPAPGAYPPAPGAGGPDGEKGLLSNIMHGVAGAHGGGHGYPSGGHGYPPQQHGYPQQGYPPQHGYPPQQHGYPPQQHGYPPAGYPGSSGHSGSHGGGGMGMGGILAGGAAAAAAAYGAHKLSHGGHGGGGHMMGGMMGGHGGYGGGYGHHGGKFKHGKHGHGKFKHGKHGKHGMFGGGGKFKKWK

SEQ ID NO: 61075 - protein, 184 aa, Triticum aestivum
  peptide (1)..(184): Ceres Seq. ID no. 12598251
MMVMGTHPVARGDTLRQGTRRSREVTLHSKEVTLHSKDTRLHLELTHLHLGHTLLHLGRTLLHLEREALTGRRGSSPTSCMVLPVLMVVVMATHLVATGTPRSSMDTLSKATLLSMATHRSSMATLHSSMATPLLATLAHLVTVVAMEEEAWAWVAFWLEEQQLLPPLTEHTSFLTAATVEVDT

SEQ ID NO: 61076 - protein, 183 aa, Triticum aestivum
  peptide (1)..(183): Ceres Seq. ID no. 12598252
MVMGTHPVARGDTLRQGTRRSREVTLHSKEVTLHSKDTRLHLELTHLHLGHTLLHLGRTLLHLEREALTGRRGSSPTSCMVLPVLMVVVMATHLVATGTPRSSMDTLSKATLLSMATHRSSMATLHSSMATPLLATLAHLVTVVAMEEEAWAWVAFWLEEQQLLPPLTEHTSFLTAATVEVDT

SEQ ID NO: 61077 - DNA, 778 bp, Triticum aestivum
  misc_feature (1)..(778): Ceres Seq. ID no. 13661310
ataaattcccacgaccatcggaccaaagaatcatacccctctcttctagccattcaaactagtaaacaatggggatactcaggaagaaaaaacacgagcgaaagccgtcgtttaagagtgttttaacctcaatattagctacacaagccgcaacattcctcttgttgatctccggtgtatccctcgccggcacagccaccgcatttatcgctaccatgccactattcgtagtattcagtccgattctcgtaccagctggtattaccactggtttactgactacgggtttagcagccgccggtggcgccggtgcgactgctgtcaccatcatcctgtggctctacaagcaagcaacgggcaaggagccgccagcagtcctgtcaaaagtcttgaaaaagataataccaggtgctgcagccgcgccagcagccgcaccagcagccgctccagcagccgcaccagctgccgcgccagcagccgcaccagcacctaagcccgcagccgcaccagcacctaagccagcagccccaccggcactatgaaaagaagtggtgggcatgagtaaaggctgatatggaaaatttgatacatggaaacaaaagagtaatccaactttttaaaaataaataacaacttcacgtggggatagaaaaaaattcaaatattattctactaatggatgtcgtggtacaaagtagtaacaaatgtaagcatatttattgtatagcattttaagaacgaagctgtgtatcgttgatattagtaccttattcaagtt

SEQ ID NO: 61078 - protein, 157 aa, Triticum aestivum
  peptide (1)..(157): Ceres Seq. ID no. 13661311
  misc_feature (14)..(128): Pfam Name: Oleosin Pfam Description: Oleosin
  misc_feature (55)..(141): Homolog of NCBI NO: 7488470 NR Description: oleosin-like protein OLN10 - rape (fragment)
  misc_feature (56)..(140): Homolog of NCBI NO: 7488475 NR Description: oleosin-like protein OLN8 - rape (fragment)
  misc_feature (11)..(145): Homolog of NCBI NO: 15081220 NR Description: glycine-rich protein GRP20 [Arabidopsis thaliana]
  misc_feature (11)..(145): Homolog of NCBI NO: 15081227 NR Description: glycine-rich protein GRP20 [Arabidopsis thaliana]
  misc_feature (11)..(147): Homolog of NCBI NO: 15081213 NR Description: glycine-rich protein GRP20 [Arabidopsis thaliana]
  misc_feature (11)..(147): Homolog of NCBI NO: 15240816 NR Description: glycine-rich protein GRP20 [Arabidopsis thaliana]
  misc_feature (1)..(140): Homolog of NCBI NO: 7488519 NR Description: anther-specific protein BNA237 - turnip
  misc_feature (1)..(157): Homolog of NCBI NO: 123952 NR Description: MICROSPORE-SPECIFIC PROTEIN I3
  misc_feature (1)..(156): Homolog of NCBI NO: 1076453 NR Description: oleosin - rape
  misc_feature (1)..(157): Homolog of NCBI NO: 1076452 NR Description: oleosin - rape
MGILRKKKHERKPSFKSVLTSILATQAATFLLLISGVSLAGTATAFIATMPLFVVFSPILVPAGITTGLLTTGLAAAGGAGATAVTIILWLYKQATGKEPPAVLSKVLKKIIPGAAAAPAAAPAAAPAAAPAAAPAAAPAPKPAAAPAPKPAAPPAL

SEQ ID NO: 61079 - protein, 108 aa, Triticum aestivum; identical to SEQ ID NO: 51988
  peptide (1)..(108): Ceres Seq. ID no. 13661312
  misc_feature (1)..(79): Pfam Name: Oleosin Pfam Description: Oleosin
  misc_feature (6)..(92): Homolog of NCBI NO: 7488470 NR Description: oleosin-like protein OLN10 - rape (fragment)
  misc_feature (7)..(91): Homolog of NCBI NO: 7488475 NR Description: oleosin-like protein OLN8 - rape (fragment)
  misc_feature (1)..(96): Homolog of NCBI NO: 15081220 NR Description: glycine-rich protein GRP20 [Arabidopsis thaliana]
  misc_feature (1)..(96): Homolog of NCBI NO: 15081227 NR Description: glycine-rich protein GRP20 [Arabidopsis thaliana]
  misc_feature (1)..(98): Homolog of NCBI NO: 15081213 NR Description: glycine-rich protein GRP20 [Arabidopsis thaliana]
  misc_feature (1)..(98): Homolog of NCBI NO: 15240816 NR Description: glycine-rich protein GRP20 [Arabidopsis thaliana]
  misc_feature (1)..(91): Homolog of NCBI NO: 7488519 NR Description: anther-specific protein BNA237 - turnip
  misc_feature (1)..(108): Homolog of NCBI NO: 123952 NR Description: MICROSPORE-SPECIFIC PROTEIN I3
  misc_feature (1)..(107): Homolog of NCBI NO: 1076453 NR Description: oleosin - rape
  misc_feature (1)..(108): Homolog of NCBI NO: 1076452 NR Description: oleosin - rape

SEQ ID NO: 61080 - DNA, 513 bp, Triticum aestivum
  misc_feature (1)..(513): Ceres Seq. ID no. 13663329
agtaatactaggctcaaagacaggaaaggtcacacgcactcccctgatctccccgtttctccccaaatcctcagcaaccccgccagatcgcgggcgatcttctcgcaggctgcctgcgacgagcgcgtgtgccaggcgccagcaaccaccggcctccttgcagtggcgcacctgcagccgctgcataataatccgtagcggcgacagtgagaaagcgagagaagaggggatgaccagcctgtccatcacggtgatgacgctgaacctgcacgaggggaatcaaccgggcgagagccctaacagctgggagaagcgccgcgacatctgcgtcagcgtcatcaccagttactcccccaccatcctctgcacccagcaagggttgaggtgccagctggactacctacagcaatgcctgcctggttatgagcaatttggcatttcaagaaaaagttcacaggacaccactgatgaatattgcacaatattctacgaaaaggagaaggtggagcttac

SEQ ID NO: 61081 - protein, 170 aa, Triticum aestivum
  peptide (1)..(170): Ceres Seq. ID no. 13663330
  misc_feature (84)..(169): Pfam Name: Endonuclease/Exonuclease/phosphatase family Pfam Description: Endonuclease/Exonuclease/phosphatase family
VILGSKTGKVTRTPLISPFLPKSSATPPDRGRSSRRLPATSACARRQQPPASLQWRTCSRCIIIRSGDSEKAREEGMTSLSITVMTLNLHEGNQPGESPNSWEKRRDICVSVITSYSPTILCTQQGLRCQLDYLQQCLPGYEQFGISRKSSQDTTDEYCTIFYEKEKVEL

SEQ ID NO: 61082 - protein, 94 aa, Triticum aestivum
  peptide (1)..(94): Ceres Seq. ID no. 13663331
  misc_feature (8)..(93): Pfam Name: Endonuclease/Exonuclease/phosphatase family Pfam Description: Endonuclease/Exonuclease/phosphatase family
MTSLSITVMTLNLHEGNQPGESPNSWEKRRDICVSVITSYSPTILCTQQGLRCQLDYLQQCLPGYEQFGISRKSSQDTTDEYCTIFYEKEKVEL

SEQ ID NO: 61083 - protein, 86 aa, Triticum aestivum
  peptide (1)..(86): Ceres Seq. ID no. 13663332
  misc_feature (1)..(85): Pfam Name: Endonuclease/Exonuclease/phosphatase family Pfam Description: Endonuclease/Exonuclease/phosphatase family
MTLNLHEGNQPGESPNSWEKRRDICVSVITSYSPTILCTQQGLRCQLDYLQQCLPGYEQFGISRKSSQDTTDEYCTIFYEKEKVEL

SEQ ID NO: 61084 - DNA, 769 bp, Triticum aestivum
  misc_feature (1)..(769): Ceres Seq. ID no. 13661117
atcgaaaaacccacatacgacaagaaaactgcaccagtgcacaccagtgctagtgtgtgacacgccaccatgaggtctctgcaggctgtgctcgtggcggtcctcgtcctgctcgccgtcgccgcgacgacagacgccgcgtgggcgccgataccggaccgcgacctgaacggcatggtggtgcagcaggcgggccggttcgccgtgctcgtgcatgacatcacgcaccggacgaccctggtgttcgtcaaggtggagcgcggcgagatggagcggccggtcggcggcggcaacggcaccaactaccggctcgtggtgaccgcggcgagggcgcccggcgggaacaagggccagtacgagtgcgtcgtgtggggcgtgcccggctcgcgcaccagcacctggaagctcctcagcttcaaggcgctctagctgcatgcatggccactgagcactcgtacgtgtgagtgtgatggtccgaggcaaagccgcgcgcgtactccgctgaataatctgcatatagtatgtgcatgggttttttaagtactggtacacgtcctttaatttgtaacccgcgtaggcacggcaaatacctgtctgcgtgcagtccgcacacactagcgccggaataagtaagttgtgactatcacccagtatacttcttttttgtcatcactgcccgaatgatgtatgttggtgattttataagagtcttgatactatgatcgttccctactakgakgggggtcttgatactatgatcgttcccttg

SEQ ID NO: 61085 - protein, 119 aa, Triticum aestivum
  peptide (1)..(119): Ceres Seq. ID no. 15220071
  misc_feature (1)..(118): Homolog of NCBI NO: 37534118 NR Description: hypothetical protein [Oryza sativa (japonica
MRSLQAVLVAVLVLLAVAATTDAAWAPIPDRDLNGMVVQQAGRFAVLVHDITHRTTLVFVKVERGEMERPVGGGNGTNYRLVVTAARAPGGNKGQYECVVWGVPGSRTSTWKLLSFKAL

SEQ ID NO: 61086 - protein, 84 aa, Triticum aestivum
  peptide (1)..(84): Ceres Seq. ID no. 15220072
  misc_feature (1)..(83): Homolog of NCBI NO: 37534118 NR Description: hypothetical protein [Oryza sativa (japonica
MVVQQAGRFAVLVHDITHRTTLVFVKVERGEMERPVGGGNGTNYRLVVTAARAPGGNKGQYECVVWGVPGSRTSTWKLLSFKAL

SEQ ID NO: 61087 - DNA, 869 bp, Triticum aestivum
  misc_feature (1)..(869): Ceres Seq. ID no. 13662992
atcggtacttaggttgtgatcccttcaccactgcgccatgcccacatccaaggcatttctcatcttggtgctcgccgtgctcactcccatggcggcgacctcccaggacacggcgacgaacctcaccctccacaacctgtgcgcgtaccctgtgtggccgctcatcactccgaacatcggcctccccgccatccccgacctggacgacgccgccagccgcctcgacgggggcggagaggggctcgtcaccctggcgttcccttccggcgcgtggtccggccgcgtcgtggcgcgcaccggctgcagcagcagcgatgactacgactcctcctccccctcctcctcctcgacggcggcggtggccaggtgcgtcacgggcatgccgccggcgccggtgacggtggcgcaggtgagcgtgcacgggtccggcgggctggcggagtacagcgtgagcctggtggacgggttcaacctgccggtgatggtgacgccgcacgggttcgagcagggccggcagtgcccgtccctcggctgcgccgtggacctcgacgtggactgcccccgcgacgccagggcccccgccggcgggtgcagggcccagggtcaggggcacttcttcaaggagaggtgcccggacactcggacgacgccgacggacgtggaggccacgccacagcgctgcctccagcccggcgagctcaagatcgtcttctgccccgattcttccgactagtcacttgctaccacacacactaggctagctagaccggctgtgtgtcactcacgatgccggttatataataagctaagcgattgattgctgattcgctaagccagattcaaccgaataatatgttaactattcttct

SEQ ID NO: 61088 - protein, 231 aa, Triticum aestivum
  peptide (1)..(231): Ceres Seq. ID no. 13662993
  misc_feature (33)..(227): Pfam Name: Thaumatin family Pfam Description: Thaumatin family
  misc_feature (9)..(227): Homolog of NCBI NO: 30692042 NR Description: thaumatin family [Arabidopsis thaliana]
  misc_feature (7)..(229): Homolog of NCBI NO: 5823278 NR Description: osmotin-like protein [Benincasa hispida]
  misc_feature (182)..(227): Homolog of NCBI NO: 7442171 NR Description: thaumatin-like protein - rice
  misc_feature (182)..(227): Homolog of NCBI NO: 2062389 NR Description: pathogenesis-related thaumatin-like protein
  misc_feature (12)..(185): Homolog of NCBI NO: 7442171 NR Description: thaumatin-like protein - rice
  misc_feature (12)..(185): Homolog of NCBI NO: 2062389 NR Description: pathogenesis-related thaumatin-like protein
  misc_feature (4)..(198): Homolog of NCBI NO: 37531042 NR Description: putative thaumatin-like protein
  misc_feature (12)..(227): Homolog of NCBI NO: 7442162 NR Description: osmotin protein homolog - rice (fragment)
  misc_feature (26)..(227): Homolog of NCBI NO: 15222875 NR Description: thaumatin family [Arabidopsis thaliana]
  misc_feature (26)..(227): Homolog of NCBI NO: 4105697 NR Description: thaumatin-like protein [Arabidopsis thaliana]
MPTSKAFLILVLAVLTPMAATSQDTATNLTLHNLCAYPVWPLITPNIGLPAIPDLDDAASRLDGGGEGLVTLAFPSGAWSGRVVARTGCSSSDDYDSSSPSSSSTAAVARCVTGMPPAPVTVAQVSVHGSGGLAEYSVSLVDGFNLPVMVTPHGFEQGRQCPSLGCAVDLDVDCPRDARAPAGGCRAQGQGHFFKERCPDTRTTPTDVEATPQRCLQPGELKIVFCPDSSD

SEQ ID NO: 61089 - protein, 214 aa, Triticum aestivum
  peptide (1)..(214): Ceres Seq. ID no. 13662994
  misc_feature (16)..(210): Pfam Name: Thaumatin family Pfam Description: Thaumatin family
  misc_feature (1)..(210): Homolog of NCBI NO: 30692042 NR Description: thaumatin family [Arabidopsis thaliana]
  misc_feature (1)..(212): Homolog of NCBI NO: 5823278 NR Description: osmotin-like protein [Benincasa hispida]
  misc_feature (165)..(210): Homolog of NCBI NO: 7442171 NR Description: thaumatin-like protein - rice
  misc_feature (165)..(210): Homolog of NCBI NO: 2062389 NR Description: pathogenesis-related thaumatin-like protein
  misc_feature (1)..(168): Homolog of NCBI NO: 7442171 NR Description: thaumatin-like protein - rice
  misc_feature (1)..(168): Homolog of NCBI NO: 2062389 NR Description: pathogenesis-related thaumatin-like protein
  misc_feature (1)..(181): Homolog of NCBI NO: 37531042 NR Description: putative thaumatin-like protein
  misc_feature (1)..(210): Homolog of NCBI NO: 7442162 NR Description: osmotin protein homolog - rice (fragment)
  misc_feature (9)..(210): Homolog of NCBI NO: 15222875 NR Description: thaumatin family [Arabidopsis thaliana]
  misc_feature (9)..(210): Homolog of NCBI NO: 4105697 NR Description: thaumatin-like protein [Arabidopsis thaliana]
MAATSQDTATNLTLHNLCAYPVWPLITPNIGLPAIPDLDDAASRLDGGGEGLVTLAFPSGAWSGRVVARTGCSSSDDYDSSSPSSSSTAAVARCVTGMPPAPVTVAQVSVHGSGGLAEYSVSLVDGFNLPVMVTPHGFEQGRQCPSLGCAVDLDVDCPRDARAPAGGCRAQGQGHFFKERCPDTRTTPTDVEATPQRCLQPGELKIVFCPDSSD

SEQ ID NO: 61090 - protein, 131 aa, Triticum aestivum
  peptide (1)..(131): Ceres Seq. ID no. 13662995
RYLGCDPFTTAPCPHPRHFSSWCSPCSLPWRRPPRTRRRTSPSTTCARTLCGRSSLRTSASPPSPTWTTPPAASTGAERGSSPWRSLPARGPAASWRAPAAAAAMTTTPPPPPPPRRRRWPGASRACRRRR

SEQ ID NO: 61091 - DNA, 627 bp, Triticum aestivum
  misc_feature (1)..(627): Ceres Seq. ID no. 12623242
acaaaaccatcacagctagtactagacaccgagacagcccttggaagatcgatcagtagctaccaaaaccaatttcgattttagcctcgcttgaacgcggacattttccgagtttctatttctcattgatagggagcatctgccaaaccagcagcacgcaaaatgaagcaaagattgtcatccaattgagcatgtcgtgcgacaaacgccggtcgaaagcactgacgctggcctccagagcagccggggtgacgtcgatgggcataaccggcgacgccagggaccagctggaggtggtcggtgacggcgtcgacccggtgtgcctcgtcagctgcctccgcaagaaactcggccacgcccacatcatcaaggtagaggaagtgaagaagccggaggagaagaagaagccggtgaaccccccgcagtactactactcgccggcgccggccggctactaccaccaccaatacccgccgcacatggtcgtctgcgaggaacagcctagcaactgccggaccatgtaactgccagagaacgattttgacgtagtactttaattttgtcagcaactatagttgcatacatgtacttgtaaattaattggaggaagaaataaaaaggagaaag

SEQ ID NO: 61092 - protein, 110 aa, Triticum aestivum
  peptide (1)..(110): Ceres Seq. ID no. 12623243
  misc_feature (1)..(71): Homolog of NCBI NO: 8978333 NR Description: ATFP4-like [Arabidopsis thaliana]
  misc_feature (1)..(73): Homolog of NCBI NO: 15231486 NR Description: unknown protein; protein id: At3g07600.1
  misc_feature (1)..(73): Homolog of NCBI NO: 4097549 NR Description: ATFP4 [Arabidopsis thaliana]
  misc_feature (1)..(76): Homolog of NCBI NO: 15231057 NR Description: hypothetical protein; protein id: At3g20180.1
  misc_feature (1)..(64): Homolog of NCBI NO: 18412779 NR Description: hypothetical protein; protein id: At4g05030.1
  misc_feature (1)..(110): Homolog of NCBI NO: 38606532 NR Description: OSJNBa0016O02.20 [Oryza sativa (japonica
  misc_feature (1)..(78): Homolog of NCBI NO: 38606531 NR Description: OSJNBa0016O02.19 [Oryza sativa (japonica
  misc_feature (1)..(110): Homolog of NCBI NO: 38606530 NR Description: OSJNBa0016O02.18 [Oryza sativa (japonica
  misc_feature (1)..(110): Homolog of NCBI NO: 38606529 NR Description: OSJNBa0016O02.17 [Oryza sativa (japonica
  misc_feature (1)..(110): Homolog of NCBI NO: 21741986 NR Description: OSJNBa0060P14.7 [Oryza sativa (japonica
MSCDKRRSKALTLASRAAGVTSMGITGDARDQLEVVGDGVDPVCLVSCLRKKLGHAHIIKVEEVKKPEEKKKPVNPPQYYYSPAPAGYYHHQYPPHMVVCEEQPSNCRTM

SEQ ID NO: 61093 - protein, 88 aa, Triticum aestivum
  peptide (1)..(88): Ceres Seq. ID no. 12623244
  misc_feature (1)..(49): Homolog of NCBI NO: 8978333 NR Description: ATFP4-like [Arabidopsis thaliana]
  misc_feature (1)..(51): Homolog of NCBI NO: 15231486 NR Description: unknown protein; protein id: At3g07600.1
  misc_feature (1)..(51): Homolog of NCBI NO: 4097549 NR Description: ATFP4 [Arabidopsis thaliana]
  misc_feature (1)..(54): Homolog of NCBI NO: 15231057 NR Description: hypothetical protein; protein id: At3g20180.1
  misc_feature (1)..(42): Homolog of NCBI NO: 18412779 NR Description: hypothetical protein; protein id: At4g05030.1
  misc_feature (1)..(88): Homolog of NCBI NO: 38606532 NR Description: OSJNBa0016O02.20 [Oryza sativa (japonica
  misc_feature (1)..(56): Homolog of NCBI NO: 38606531 NR Description: OSJNBa0016O02.19 [Oryza sativa (japonica
  misc_feature (1)..(88): Homolog of NCBI NO: 38606530 NR Description: OSJNBa0016O02.18 [Oryza sativa (japonica
  misc_feature (1)..(88): Homolog of NCBI NO: 38606529 NR Description: OSJNBa0016O02.17 [Oryza sativa (japonica
  misc_feature (1)..(88): Homolog of NCBI NO: 21741986 NR Description: OSJNBa0060P14.7 [Oryza sativa (japonica
MGITGDARDQLEVVGDGVDPVCLVSCLRKKLGHAHIIKVEEVKKPEEKKKPVNPPQYYYSPAPAGYYHHQYPPHMVVCEEQPSNCRTM

SEQ ID NO: 61094 - DNA, 1016 bp, Triticum aestivum
  misc_feature (1)..(1016): Ceres Seq. ID no. 13664262
gtattaagacatgaggagctgagtcttccggagagactgcgaaaaccctaatttcgttcgtgcgcgaaaggggtttttggttctatcttcagacaacgatgatgcaccactcaaccgacgattcggaacctgatggtgctatgcccgtccaacaaagagacgactctgcctcctcctccgactctgcttccgccgtttctaatcacaccatcactannaccgtttaccatggctcctccgaccaccatctccatgttcctcagcacgccactttcggggatgtgaagaaagcctttgttctggaaactgggttggaggctactgatctgaagatcttgttcaggggagatgtgaaagatgacgctgagcagttgcaagctgctggtgttacggacgggtctgtagttgtccttgtggatgagcctaataagggagttgaccatgttgaaccgcctcctgtgatgaccgaagagattgccaaggctattgctgctgttctagcagtctctggagaggtcgatgagctctcggatagggttggtgctttagaggctgctgtcgatggagggacgatagttgcggtgaaggagtttgacatgactgctgagctgctcatgaggcagttgctcaaattggatggcatcaaggcagatggggaagctagactacagcgaaaggcagaggtacgtagggttcaaaagttgcaggaggatgtggatacgttgaaggcaagatgttacagagcaaagccgcagctgtaagcactgagtgggattcgttctgaaacggtgttggagagcttgaaccctcctccgccagctttcgccttgtaccaatgtaaacccaagattgggagaaattttactgacatttttattattctgttacgttacaaaaaaaatattgcttctttttgttattgttaaatgaggaaatgaccagaaaaatatgggttgtatcctggaatttgtatgatttttttagtatctcaatctgaatagcaatacatttttttt

SEQ ID NO: 61095 - protein, 220 aa, Triticum aestivum
  peptide (1)..(220): Ceres Seq. ID no. 13664263
  misc_feature (129)..(210): Pfam Name: BAG domain Pfam Description: BAG domain
  misc_feature (38)..(210): Homolog of NCBI NO: 6624711 NR Description: hypothetical protein [Oryza sativa (indica
  misc_feature (8)..(212): Homolog of NCBI NO: 15240726 NR Description: BAG domain containing protein [Arabidopsis
  misc_feature (8)..(212): Homolog of NCBI NO: 21537107 NR Description: unknown [Arabidopsis thaliana]
  misc_feature (13)..(219): Homolog of NCBI NO: 15242267 NR Description: BAG domain containing protein [Arabidopsis
  misc_feature (13)..(212): Homolog of NCBI NO: 34898024 NR Description: ESTs AU082174(S13676),AU032395(R3986) correspond a region of the predicted gene.~Similar to Arabidopsis thaliana
  misc_feature (13)..(212): Homolog of NCBI NO: 25553557 NR Description: OSJNBa0038F22.4 [Oryza sativa (japonica
  misc_feature (13)..(220): Homolog of NCBI NO: 34907972 NR Description: P0446G04.18 [Oryza sativa (japonica
  misc_feature (2)..(220): Homolog of NCBI NO: 21554254 NR Description: unknown [Arabidopsis thaliana]
  misc_feature (1)..(220): Homolog of NCBI NO: 19699283 NR Description: At3g51780/ORF3 [Arabidopsis thaliana]
  misc_feature (1)..(220): Homolog of NCBI NO: 15231035 NR Description: expressed protein [Arabidopsis thaliana]
  misc_feature (40)..(40): Xaa is any aa, unknown or other
MMHHSTDDSEPDGAMPVQQRDDSASSSDSASAVSNHTITXTVYHGSSDHHLHVPQHATFGDVKKAFVLETGLEATDLKILFRGDVKDDAEQLQAAGVTDGSVVVLVDEPNKGVDHVEPPPVMTEEIAKAIAAVLAVSGEVDELSDRVGALEAAVDGGTIVAVKEFDMTAELLMRQLLKLDGIKADGEARLQRKAEVRRVQKLQEDVDTLKARCYRAKPQL

SEQ ID NO: 61096 - protein, 219 aa, Triticum aestivum
  peptide (1)..(219): Ceres Seq. ID no. 13664264
  misc_feature (128)..(209): Pfam Name: BAG domain Pfam Description: BAG domain
  misc_feature (37)..(209): Homolog of NCBI NO: 6624711 NR Description: hypothetical protein [Oryza sativa (indica
  misc_feature (7)..(211): Homolog of NCBI NO: 15240726 NR Description: BAG domain containing protein [Arabidopsis
  misc_feature (7)..(211): Homolog of NCBI NO: 21537107 NR Description: unknown [Arabidopsis thaliana]
  misc_feature (12)..(218): Homolog of NCBI NO: 15242267 NR Description: BAG domain containing protein [Arabidopsis
  misc_feature (12)..(211): Homolog of NCBI NO: 34898024 NR Description: ESTs AU082174(S13676),AU032395(R3986) correspond a region of the predicted gene.~Similar to Arabidopsis thaliana
  misc_feature (12)..(211): Homolog of NCBI NO: 25553557 NR Description: OSJNBa0038F22.4 [Oryza sativa (japonica
  misc_feature (12)..(219): Homolog of NCBI NO: 34907972 NR Description: P0446G04.18 [Oryza sativa (japonica
  misc_feature (1)..(219): Homolog of NCBI NO: 21554254 NR Description: unknown [Arabidopsis thaliana]
  misc_feature (1)..(219): Homolog of NCBI NO: 19699283 NR Description: At3g51780/ORF3 [Arabidopsis thaliana]
  misc_feature (1)..(219): Homolog of NCBI NO: 15231035 NR Description: expressed protein [Arabidopsis thaliana]
  misc_feature (39)..(39): Xaa is any aa, unknown or other
MHHSTDDSEPDGAMPVQQRDDSASSSDSASAVSNHTITXTVYHGSSDHHLHVPQHATFGDVKKAFVLETGLEATDLKILFRGDVKDDAEQLQAAGVTDGSVVVLVDEPNKGVDHVEPPPVMTEEIAKAIAAVLAVSGEVDELSDRVGALEAAVDGGTIVAVKEFDMTAELLMRQLLKLDGIKADGEARLQRKAEVRRVQKLQEDVDTLKARCYRAKPQL

SEQ ID NO: 61097 - protein, 206 aa, Triticum aestivum
  peptide (1)..(206): Ceres Seq. ID no. 13664265
  misc_feature (115)..(196): Pfam Name: BAG domain Pfam Description: BAG domain
  misc_feature (24)..(196): Homolog of NCBI NO: 6624711 NR Description: hypothetical protein [Oryza sativa (indica
  misc_feature (1)..(198): Homolog of NCBI NO: 15240726 NR Description: BAG domain containing protein [Arabidopsis
  misc_feature (1)..(198): Homolog of NCBI NO: 21537107 NR Description: unknown [Arabidopsis thaliana]
  misc_feature (1)..(205): Homolog of NCBI NO: 15242267 NR Description: BAG domain containing protein [Arabidopsis
  misc_feature (1)..(198): Homolog of NCBI NO: 34898024 NR Description: ESTs AU082174(S13676),AU032395(R3986) correspond a region of the predicted gene.~Similar to Arabidopsis thaliana
  misc_feature (1)..(198): Homolog of NCBI NO: 25553557 NR Description: OSJNBa0038F22.4 [Oryza sativa (japonica
  misc_feature (1)..(206): Homolog of NCBI NO: 34907972 NR Description: P0446G04.18 [Oryza sativa (japonica
  misc_feature (1)..(206): Homolog of NCBI NO: 21554254 NR Description: unknown [Arabidopsis thaliana]
  misc_feature (1)..(206): Homolog of NCBI NO: 19699283 NR Description: At3g51780/ORF3 [Arabidopsis thaliana]
  misc_feature (1)..(206): Homolog of NCBI NO: 15231035 NR Description: expressed protein [Arabidopsis thaliana]
  misc_feature (26)..(26): Xaa is any aa, unknown or other
MPVQQRDDSASSSDSASAVSNHTITXTVYHGSSDHHLHVPQHATFGDVKKAFVLETGLEATDLKILFRGDVKDDAEQLQAAGVTDGSVVVLVDEPNKGVDHVEPPPVMTEEIAKAIAAVLAVSGEVDELSDRVGALEAAVDGGTIVAVKEFDMTAELLMRQLLKLDGIKADGEARLQRKAEVRRVQKLQEDVDTLKARCYRAKPQL

SEQ ID NO: 61098 - DNA, 892 bp, Triticum aestivum
  misc_feature (1)..(892): Ceres Seq. ID no. 13661594
agattcaggtgatggcaatgctaatggcagtacaggcagtggtagatcagtaggaaatcatatggttaacccatcacaaattgggaaggcagagtcagttaatctccagtttggttcttttgggattagcgcgtggctgagtgacacaggcggtggcaccagccatgctggaagtgtagatgacctgagggctgatgggatcgagacaagcggtagatacttctcctcatgctgcagctcaccaaaaacgtcagactgcgcctccaaagagcatatggaggattattcagtctatggtagtgaagaggatgctgacgacccacctgatgctgaaactgatgaggatctaactgatgaagaaagggatgctcatgagattgaagcgggctccgtcgacgagcactccaccaagtctgacgaggagtacgacgacctagccatgcaggacgtgatggggaacggcaactgctccgacgacgacgacgagcaagctgcagggtacggcaccaggggctcacagcccatggaggagagcatccttggagcagatggcgccgtggtggagggcaggtaccaccacaacctggacctcttcacgatgtccaaggacgtcgccgccacaaagatgccgtgcgcgtgacacagcctaacccgaccaacccctgggggaagaaagacaccactgccacggttcactgtcagccgcggtgctcttgggcacattctccggtggtgcttaggagtctgcaccggttactgtacccatatgagcttatgttggtggttgtgactgttagaggatctcatgcttggctatatataggaatcctggggctttgcccttttgtcgaaactcgaataatgaaaagttgaaattgcattctgaatttgc

SEQ ID NO: 61099 - protein, 212 aa, Triticum aestivum
  peptide (1)..(212): Ceres Seq. ID no. 13661595
  misc_feature (19)..(212): Homolog of NCBI NO: 30697428 NR Description: expressed protein [Arabidopsis thaliana]
  misc_feature (26)..(208): Homolog of NCBI NO: 18407911 NR Description: expressed protein [Arabidopsis thaliana]
  misc_feature (26)..(208): Homolog of NCBI NO: 11290092 NR Description: hypothetical protein T14D3.30 - Arabidopsis
DSGDGNANGSTGSGRSVGNHMVNPSQIGKAESVNLQFGSFGISAWLSDTGGGTSHAGSVDDLRADGIETSGRYFSSCCSSPKTSDCASKEHMEDYSVYGSEEDADDPPDAETDEDLTDEERDAHEIEAGSVDEHSTKSDEEYDDLAMQDVMGNGNCSDDDDEQAAGYGTRGSQPMEESILGADGAVVEGRYHHNLDLFTMSKDVAATKMPCA

SEQ ID NO: 61100 - protein, 192 aa, Triticum aestivum
  peptide (1)..(192): Ceres Seq. ID no. 13661596
  misc_feature (1)..(192): Homolog of NCBI NO: 30697428 NR Description: expressed protein [Arabidopsis thaliana]
  misc_feature (6)..(188): Homolog of NCBI NO: 18407911 NR Description: expressed protein [Arabidopsis thaliana]
  misc_feature (6)..(188): Homolog of NCBI NO: 11290092 NR Description: hypothetical protein T14D3.30 - Arabidopsis
MVNPSQIGKAESVNLQFGSFGISAWLSDTGGGTSHAGSVDDLRADGIETSGRYFSSCCSSPKTSDCASKEHMEDYSVYGSEEDADDPPDAETDEDLTDEERDAHEIEAGSVDEHSTKSDEEYDDLAMQDVMGNGNCSDDDDEQAAGYGTRGSQPMEESILGADGAVVEGRYHHNLDLFTMSKDVAATKMPCA

SEQ ID NO: 61101 - protein, 121 aa, Triticum aestivum
  peptide (1)..(121): Ceres Seq. ID no. 13661597
  misc_feature (1)..(121): Homolog of NCBI NO: 30697428 NR Description: expressed protein [Arabidopsis thaliana]
  misc_feature (1)..(117): Homolog of NCBI NO: 18407911 NR Description: expressed protein [Arabidopsis thaliana]
  misc_feature (1)..(117): Homolog of NCBI NO: 11290092 NR Description: hypothetical protein T14D3.30 - Arabidopsis
MEDYSVYGSEEDADDPPDAETDEDLTDEERDAHEIEAGSVDEHSTKSDEEYDDLAMQDVMGNGNCSDDDDEQAAGYGTRGSQPMEESILGADGAVVEGRYHHNLDLFTMSKDVAATKMPCA

SEQ ID NO: 61102 - DNA, 1120 bp, Triticum aestivum
  misc_feature (1)..(1120): Ceres Seq. ID no. 13661606
cttttctttcgataagacctcactctgctttcctctgctctgctcctactcgtgtcccggtcacgccacctcccgaccccccaaatcgcgagaccacccgcggcggctggccggccggcgggataggcgacgaggcgaagtaactcgagacggcgcgggcggaccgctccgtgtggctcatgaagcgctcccccatcgtctcccaggcccggcagggcgcctccgcctcctccagcgaagctaaccctaacccggccgtcgccaaggtcgtgctgtccctcgaccccctcagctccgctgagccctccctccagctcaagatggagatgcctcaaactagggaaactagcacttgcaacttaccaaagagttgccccttgaatatgttcttcctcctccgtctcttcgctatcgccatcctgccttgctctgccaacaacgccacccaactggtctatgacacagaaggcaacgagctaaatagcaagtcaaattactacatcctcccagccaaacctgcaagcggtggcggcctcaaagccatcccaaccggtctacggtgcctacattttgtggtcgaggagcgcagcgagacgactctcctcgacacgcccatgcgattcatgccgttgccagaacacgcttctaccactgagccgatccgcctttcgagtgacatatggatccgcctttcgagtgacatatggatcgagtttcacgacttgagaagcttttgctccgaaaggctagattggcccttaccgaacaggtgccggagtcgtcatcaggagagcctaaacacatggctgccggcagtgaagagggcctaagatcatttggggtgttccgggacggatctctcgggatataagataatttcatgtgttggcaaggggccatgcagagacctaggtttgcatgtttacaaggacaagacatggctgactgtaaaggataaaccttttatggttgtgtttaggaaaaagactatataggtgtttttttgcttgcttcttgaggtgatccctgtaggcgagttcattgtatcgccactgtggtgttcatgttatgtaatgtgttcccccactttgcaataaagcgatactaactatattatgtg

SEQ ID NO: 61103 - protein, 216 aa, Triticum aestivum
  peptide (1)..(216): Ceres Seq. ID no. 13661607
  misc_feature (92)..(216): Pfam Name: Trypsin and protease inhibitor Pfam Description: Trypsin and protease inhibitor
  misc_feature (1)..(70): Homolog of NCBI NO: 34909946 NR Description: putative transcription initiation factor
  misc_feature (92)..(173): Homolog of NCBI NO: 266323 NR Description: ALPHA-AMYLASE/SUBTILISIN INHIBITOR (RASI)
  misc_feature (92)..(216): Homolog of NCBI NO: 225172 NR Description: amylase subtilisin inhibitor alpha
  misc_feature (92)..(216): Homolog of NCBI NO: 4699833 NR Description: Chain C, Amy2BASI PROTEIN-Protein Complex From
  misc_feature (92)..(216): Homolog of NCBI NO: 123974 NR Description: Alpha-amylase/subtilisin inhibitor precursor
  misc_feature (92)..(216): Homolog of NCBI NO: 82362 NR Description: alpha-amylase/subtilisin inhibitor precursor -
  misc_feature (92)..(216): Homolog of NCBI NO: 123975 NR Description: Endogenous alpha-amylase/subtilisin inhibitor
  misc_feature (72)..(216): Homolog of NCBI NO: 17402591 NR Description: bifunctional alpha-amylase/subtilisin inhibitor
MKRSPIVSQARQGASASSSEANPNPAVAKVVLSLDPLSSAEPSLQLKMEMPQTRETSTCNLPKSCPLNMFFLLRLFAIAILPCSANNATQLVYDTEGNELNSKSNYYILPAKPASGGGLKAIPTGLRCLHFVVEERSETTLLDTPMRFMPLPEHASTTEPIRLSSDIWIRLSSDIWIEFHDLRSFCSERLDWPLPNRCRSRHQESLNTWLPAVKRA

SEQ ID NO: 61104 - protein, 169 aa, Triticum aestivum
  peptide (1)..(169): Ceres Seq. ID no. 13661608
  misc_feature (45)..(169): Pfam Name: Trypsin and protease inhibitor Pfam Description: Trypsin and protease inhibitor
  misc_feature (1)..(23): Homolog of NCBI NO: 34909946 NR Description: putative transcription initiation factor
  misc_feature (45)..(126): Homolog of NCBI NO: 266323 NR Description: ALPHA-AMYLASE/SUBTILISIN INHIBITOR (RASI)
  misc_feature (45)..(169): Homolog of NCBI NO: 4699833 NR Description: Chain C, Amy2BASI PROTEIN-Protein Complex From
  misc_feature (45)..(169): Homolog of NCBI NO: 225172 NR Description: amylase subtilisin inhibitor alpha
  misc_feature (45)..(169): Homolog of NCBI NO: 123974 NR Description: Alpha-amylase/subtilisin inhibitor precursor
  misc_feature (45)..(169): Homolog of NCBI NO: 82362 NR Description: alpha-amylase/subtilisin inhibitor precursor -
  misc_feature (45)..(169): Homolog of NCBI NO: 123975 NR Description: Endogenous alpha-amylase/subtilisin inhibitor
  misc_feature (25)..(169): Homolog of NCBI NO: 17402591 NR Description: bifunctional alpha-amylase/subtilisin inhibitor
MEMPQTRETSTCNLPKSCPLNMFFLLRLFAIAILPCSANNATQLVYDTEGNELNSKSNYYILPAKPASGGGLKAIPTGLRCLHFVVEERSETTLLDTPMRFMPLPEHASTTEPIRLSSDIWIRLSSDIWIEFHDLRSFCSERLDWPLPNRCRSRHQESLNTWLPAVKRA

SEQ ID NO: 61105 - protein, 167 aa, Triticum aestivum
  peptide (1)..(167): Ceres Seq. ID no. 13661609
  misc_feature (43)..(167): Pfam Name: Trypsin and protease inhibitor Pfam Description: Trypsin and protease inhibitor
  misc_feature (1)..(21): Homolog of NCBI NO: 34909946 NR Description: putative transcription initiation factor
  misc_feature (43)..(124): Homolog of NCBI NO: 266323 NR Description: ALPHA-AMYLASE/SUBTILISIN INHIBITOR (RASI)
  misc_feature (43)..(167): Homolog of NCBI NO: 123974 NR Description: Alpha-amylase/subtilisin inhibitor precursor
  misc_feature (43)..(167): Homolog of NCBI NO: 225172 NR Description: amylase subtilisin inhibitor alpha
  misc_feature (43)..(167): Homolog of NCBI NO: 4699833 NR Description: Chain C, Amy2BASI PROTEIN-Protein Complex From
  misc_feature (43)..(167): Homolog of NCBI NO: 82362 NR Description: alpha-amylase/subtilisin inhibitor precursor -
  misc_feature (43)..(167): Homolog of NCBI NO: 123975 NR Description: Endogenous alpha-amylase/subtilisin inhibitor
  misc_feature (23)..(167): Homolog of NCBI NO: 17402591 NR Description: bifunctional alpha-amylase/subtilisin inhibitor
MPQTRETSTCNLPKSCPLNMFFLLRLFAIAILPCSANNATQLVYDTEGNELNSKSNYYILPAKPASGGGLKAIPTGLRCLHFVVEERSETTLLDTPMRFMPLPEHASTTEPIRLSSDIWIRLSSDIWIEFHDLRSFCSERLDWPLPNRCRSRHQESLNTWLPAVKRA

SEQ ID NO: 61106 - DNA, 846 bp, Triticum aestivum
  misc_feature (1)..(846): Ceres Seq. ID no. 15173102
taccccggcgagtaaggaggcacggccatcgccaacgtgctcttcggaagatacaatccagggggaaggctgccgctaacgtggtacaagaacgagtacatcagcaagatcccgatgacgtccatggcgctgcggccggtcgccggcaaggggtaccctggcaggacctacaagttctacggcgggccggaagtgctctacccgttcggccacggtctcagctacagcaacttcagctacgcgtccgacgccaccgccgcatcggtcacagtcccggttggcgcatgggagtcctgcaagcagctcacccgcaagccggggacggccccgctggcctgcccggccgtcaacgttgccgggcacgggtgccaagaggaggtaggcttcagtctgaccgtggccaaccgtggcagcagggacggcacccacgtcgtgatggtctacacggtgccgccggccgaggtggacgacgcaccgctgaagcagctggtggcgttccggagggtgttcgtgcccgctggagccgccgtccaagtgccgttcacgctcaatgtgtgcaaggcgttcgccatcgtcgaggagacggcgtacaccgtcgtgccgtcgggcgtcagcacggtcctggtcggagacgaagcgctgtcattctctttccccgtgaagatcgagctggctgtatagattctttacatgtccattgaattttttagtttctttacataccaaagatgaaagattgaaggccaaaccgttagatactgtgggcagcacgtataatatcttctccttttctttgcgagaagtgtaatatcttctcctctgctactataaacgcacagtttacac

SEQ ID NO: 61107 - protein, 232 aa, Triticum aestivum
  peptide (1)..(232): Ceres Seq. ID no. 15173103
PRRVRRHGHRQRALRKIQSRGKAAANVVQERVHQQDPDDVHGAAAGRRQGVPWQDLQVLRRAGSALPVRPRSQLQQLQLRVRRHRRIGHSPGWRMGVLQAAHPQAGDGPAGLPGRQRCRARVPRGGRLQSDRGQPWQQGRHPRRDGLHGAAGRGGRRTAEAAGGVPEGVRARWSRRPSAVHAQCVQGVRHRRGDGVHRRAVGRQHGPGRRRSAVILFPREDRAGCIDSLHVH

SEQ ID NO: 61108 - protein, 188 aa, Triticum aestivum
  peptide (1)..(188): Ceres Seq. ID no. 15173104
  misc_feature (1)..(180): Homolog of NCBI NO: 40363751 NR Description: putative beta-xylosidase [Triticum aestivum]
  misc_feature (1)..(173): Homolog of NCBI NO: 38344900 NR Description: OSJNBb0079B02.3 [Oryza sativa (japonica
  misc_feature (1)..(173): Homolog of NCBI NO: 15239867 NR Description: glycosyl hydrolase family 3 [Arabidopsis
  misc_feature (1)..(184): Homolog of NCBI NO: 15237736 NR Description: glycosyl hydrolase family 3 [Arabidopsis
  misc_feature (1)..(174): Homolog of NCBI NO: 32481073 NR Description: auxin-induced beta-glucosidase [Chenopodium
  misc_feature (1)..(182): Homolog of NCBI NO: 15242489 NR Description: beta-glucosidase - like protein [Arabidopsis
  misc_feature (1)..(173): Homolog of NCBI NO: 30316196 NR Description: Putative beta-D-xylosidase (PpAz152)
  misc_feature (1)..(179): Homolog of NCBI NO: 18378991 NR Description: glycosyl hydrolase family 3 [Arabidopsis
  misc_feature (1)..(179): Homolog of NCBI NO: 25518461 NR Description: hypothetical protein T14P4.8 - Arabidopsis
  misc_feature (1)..(186): Homolog of NCBI NO: 34894432 NR Description: putative beta-xylosidase [Oryza sativa (japonica
MTSMALRPVAGKGYPGRTYKFYGGPEVLYPFGHGLSYSNFSYASDATAASVTVPVGAWESCKQLTRKPGTAPLACPAVNVAGHGCQEEVGFSLTVANRGSRDGTHVVMVYTVPPAEVDDAPLKQLVAFRRVFVPAGAAVQVPFTLNVCKAFAIVEETAYTVVPSGVSTVLVGDEALSFSFPVKIELAV

SEQ ID NO: 61109 - protein, 185 aa, Triticum aestivum
  peptide (1)..(185): Ceres Seq. ID no. 15173105
  misc_feature (1)..(177): Homolog of NCBI NO: 40363751 NR Description: putative beta-xylosidase [Triticum aestivum]
  misc_feature (1)..(170): Homolog of NCBI NO: 38344900 NR Description: OSJNBb0079B02.3 [Oryza sativa (japonica
  misc_feature (1)..(170): Homolog of NCBI NO: 15239867 NR Description: glycosyl hydrolase family 3 [Arabidopsis
  misc_feature (1)..(181): Homolog of NCBI NO: 15237736 NR Description: glycosyl hydrolase family 3 [Arabidopsis
  misc_feature (1)..(171): Homolog of NCBI NO: 32481073 NR Description: auxin-induced beta-glucosidase [Chenopodium
  misc_feature (1)..(179): Homolog of NCBI NO: 15242489 NR Description: beta-glucosidase - like protein [Arabidopsis
  misc_feature (1)..(170): Homolog of NCBI NO: 30316196 NR Description: Putative beta-D-xylosidase (PpAz152)
  misc_feature (1)..(176): Homolog of NCBI NO: 18378991 NR Description: glycosyl hydrolase family 3 [Arabidopsis
  misc_feature (1)..(176): Homolog of NCBI NO: 25518461 NR Description: hypothetical protein T14P4.8 - Arabidopsis
  misc_feature (1)..(183): Homolog of NCBI NO: 34894432 NR Description: putative beta-xylosidase [Oryza sativa (japonica
MALRPVAGKGYPGRTYKFYGGPEVLYPFGHGLSYSNFSYASDATAASVTVPVGAWESCKQLTRKPGTAPLACPAVNVAGHGCQEEVGFSLTVANRGSRDGTHVVMVYTVPPAEVDDAPLKQLVAFRRVFVPAGAAVQVPFTLNVCKAFAIVEETAYTVVPSGVSTVLVGDEALSFSFPVKIELAV

SEQ ID NO: 61110 - DNA, 1088 bp, Triticum aestivum
  misc_feature (1)..(1088): Ceres Seq. ID no. 13661175
cgaaaagcacccaagttcagtctagatcgagtaggtagaagcccattgatcaacttcacttagcatttttgtccatccttgtccatggccactcaccccaatttccatgctagtgcatttgatgggtcggtgcaaaacaccgagtttaagttcagtagcttgtactggcaccacatttattctggaccaagcccaaaccaatcagttttgataggtgcagaggctaccactgggttgggccagtcagcagttaacgattggacgatttatggtggggttggctccgacgcggagctagtggcacgcgcacaaggattgcatctctacgctggtagttggcacaatacattcacccttcgtttcgagattgaaaggcttaagaaaagcacgcttcaggtaatgggagcatctgtagaggatgaaggtgagtggtctattgtcggcgggacaggtgatctcgcgatggcacgtggtgttgtagccaaaaggctgcatgagaaaacagatggtggagacatagtcgagcttaccatacatggattctgtcgcatgcaactgcccattctcaacaagaggggcccatggggtagcaagcagggttccgctgttggtttggaaaaaccctccaagattgcaagtatcaccatccattatcaagaaataattaattcgtttgaatatatttacgtcgaccaatatggcaacattggtaacacaaatatttggggcactaagagtcccaatcacgcagagatcgtgctcggccctgatgagatagtgacgggaatgtccggaactgtgatcaaacataataatctcgatgttatacagacactgatgtttaccaccagcaagaaaacatacgggccttatggaaacaccacaaatatacaaggtggtactactttcagcaccgtcgtgccaaatggccaagcaattgtcggcttcttcgggcatactgatatgaaatgcctgaacggaattggtgtctatatggcctaggttttatttgagtcatatgtggttaatttggttgttctttcaagaagaataagatgtttagggatctccggccccgttcttatgat

SEQ ID NO: 61111 - protein, 305 aa, Triticum aestivum
  peptide (1)..(305): Ceres Seq. ID no. 15220076
  misc_feature (16)..(154): Pfam Name: Dirigent-like protein Pfam Description: Dirigent-like protein
  misc_feature (16)..(153): Homolog of NCBI NO: 37532940 NR Description: putative disease resistance protein
  misc_feature (4)..(154): Homolog of NCBI NO: 7489661 NR Description: benzothiadiazole-induced protein (clone WCI-1) -
  misc_feature (23)..(153): Homolog of NCBI NO: 34895198 NR Description: P0463A02.21 [Oryza sativa (japonica
  misc_feature (9)..(225): Homolog of NCBI NO: 21311647 NR Description: hessian fly response gene 1 protein [Triticum
  misc_feature (7)..(206): Homolog of NCBI NO: 7489672 NR Description: jasmonate-induced protein homolog - wheat
  misc_feature (10)..(304): Homolog of NCBI NO: 9313027 NR Description: beta-glucosidase aggregating factor precursor
  misc_feature (6)..(292): Homolog of NCBI NO: 7489384 NR Description: jacalin homolog - barley
  misc_feature (7)..(303): Homolog of NCBI NO: 16151819 NR Description: VER2 [Triticum aestivum]
  misc_feature (6)..(304): Homolog of NCBI NO: 7489385 NR Description: jakalin homolog - barley
  misc_feature (1)..(304): Homolog of NCBI NO: 7489383 NR Description: jacalin homolog - barley
MATHPNFHASAFDGSVQNTEFKFSSLYWHHIYSGPSPNQSVLIGAEATTGLGQSAVNDWTIYGGVGSDAELVARAQGLHLYAGSWHNTFTLRFEIERLKKSTLQVMGASVEDEGEWSIVGGTGDLAMARGVVAKRLHEKTDGGDIVELTIHGFCRMQLPILNKRGPWGSKQGSAVGLEKPSKIASITIHYQEIINSFEYIYVDQYGNIGNTNIWGTKSPNHAEIVLGPDEIVTGMSGTVIKHNNLDVIQTLMFTTSKKTYGPYGNTTNIQGGTTFSTVVPNGQAIVGFFGHTDMKCLNGIGVYMA

SEQ ID NO: 61112 - protein, 200 aa, Triticum aestivum
  peptide (1)..(200): Ceres Seq. ID no. 15220077
  misc_feature (67)..(198): Pfam Name: Jacalin-like lectin domain Pfam Description: Jacalin-like lectin domain
  misc_feature (1)..(48): Homolog of NCBI NO: 37532940 NR Description: putative disease resistance protein
  misc_feature (1)..(49): Homolog of NCBI NO: 7489661 NR Description: benzothiadiazole-induced protein (clone WCI-1) -
  misc_feature (1)..(48): Homolog of NCBI NO: 34895198 NR Description: P0463A02.21 [Oryza sativa (japonica
  misc_feature (1)..(120): Homolog of NCBI NO: 21311647 NR Description: hessian fly response gene 1 protein [Triticum
  misc_feature (1)..(101): Homolog of NCBI NO: 7489672 NR Description: jasmonate-induced protein homolog - wheat
  misc_feature (1)..(199): Homolog of NCBI NO: 9313027 NR Description: beta-glucosidase aggregating factor precursor
  misc_feature (1)..(187): Homolog of NCBI NO: 7489384 NR Description: jacalin homolog - barley
  misc_feature (1)..(198): Homolog of NCBI NO: 16151819 NR Description: VER2 [Triticum aestivum]
  misc_feature (1)..(199): Homolog of NCBI NO: 7489385 NR Description: jakalin homolog - barley
  misc_feature (1)..(199): Homolog of NCBI NO: 7489383 NR Description: jacalin homolog - barley
MGASVEDEGEWSIVGGTGDLAMARGVVAKRLHEKTDGGDIVELTIHGFCRMQLPILNKRGPWGSKQGSAVGLEKPSKIASITIHYQEIINSFEYIYVDQYGNIGNTNIWGTKSPNHAEIVLGPDEIVTGMSGTVIKHNNLDVIQTLMFTTSKKTYGPYGNTTNIQGGTTFSTVVPNGQAIVGFFGHTDMKCLNGIGVYMA

SEQ ID NO: 61113 - protein, 179 aa, Triticum aestivum
  peptide (1)..(179): Ceres Seq. ID no. 15220078
  misc_feature (46)..(177): Pfam Name: Jacalin-like lectin domain Pfam Description: Jacalin-like lectin domain
  misc_feature (1)..(27): Homolog of NCBI NO: 37532940 NR Description: putative disease resistance protein
  misc_feature (1)..(28): Homolog of NCBI NO: 7489661 NR Description: benzothiadiazole-induced protein (clone WCI-1) -
  misc_feature (1)..(27): Homolog of NCBI NO: 34895198 NR Description: P0463A02.21 [Oryza sativa (japonica
  misc_feature (1)..(99): Homolog of NCBI NO: 21311647 NR Description: hessian fly response gene 1 protein [Triticum
  misc_feature (1)..(80): Homolog of NCBI NO: 7489672 NR Description: jasmonate-induced protein homolog - wheat
  misc_feature (1)..(178): Homolog of NCBI NO: 9313027 NR Description: beta-glucosidase aggregating factor precursor
  misc_feature (1)..(166): Homolog of NCBI NO: 7489384 NR Description: jacalin homolog - barley
  misc_feature (1)..(177): Homolog of NCBI NO: 16151819 NR Description: VER2 [Triticum aestivum]
  misc_feature (1)..(178): Homolog of NCBI NO: 7489385 NR Description: jakalin homolog - barley
  misc_feature (1)..(178): Homolog of NCBI NO: 7489383 NR Description: jacalin homolog - barley
MARGVVAKRLHEKTDGGDIVELTIHGFCRMQLPILNKRGPWGSKQGSAVGLEKPSKIASITIHYQEIINSFEYIYVDQYGNIGNTNIWGTKSPNHAEIVLGPDEIVTGMSGTVIKHNNLDVIQTLMFTTSKKTYGPYGNTTNIQGGTTFSTVVPNGQAIVGFFGHTDMKCLNGIGVYMA

SEQ ID NO: 61114 - DNA, 774 bp, Triticum aestivum
  misc_feature (1)..(774): Ceres Seq. ID no. 13661176
cctagcagaggaggcggcggaggcagagaaggagagcggcagctcgcgcgcgcgcgcccccattgccgccgcagcaggagcccgccgattccaatccaaggaggagctttgaaggtttgtcagggcggggaagatggttctcaagacagagctctgccgtttcagtggtgccaagatatacccagggaaggggatcagattcatccgctcagactctcaagtcttccttttctccaactcaaagtgcaagagctacttccacaaccgtctcaagccagctaagcttgcatggacggccatgtacaggaagcagcacaagaaggatattcatgctgaggctgcaaagaagaggcgccgcaccaccaagaggccgtattccaggtcaattgtaggtgcttcccttgaagttatccagaagaagagagctgagaagccggaggtccgtgatgcagccagggaagcagctctgcgtgagatcaaggagcgcattaagaagaccaaggatgagaagaaagctaagaaggtggaggtgacgaaatcccagaagaccgccggcagaggcaatgcccccaaacccgggaaggcccccaagcttggcggtggtggtgggaagcgctaggtggcgtccctgccgatcaatgcgaaattttgaactagttacatgatgtcctaccctgtatcttttaggaagtttttggctcaaacctgctgttgccgtcggtatgcagcatctgggtgcataaaccgtcgtcaatgtgagattgttttatgctc

SEQ ID NO: 61115 - protein, 161 aa, Triticum aestivum
  peptide (1)..(161): Ceres Seq. ID no. 13661177
  misc_feature (3)..(73): Pfam Name: Ribosomal protein L24e Pfam Description: Ribosomal protein L24e
  misc_feature (3)..(156): Homolog of NCBI NO: 37778978 NR Description: 60S ribosomal protein L24 [Pagrus major]
  misc_feature (3)..(150): Homolog of NCBI NO: 19075214 NR Description: 60s ribosomal protein L24 [Schizosaccharomyces
  misc_feature (3)..(151): Homolog of NCBI NO: 19115030 NR Description: 60S ribosomal protein L24 [Schizosaccharomyces
  misc_feature (5)..(161): Homolog of NCBI NO: 25295112 NR Description: 60S ribosomal protein L24 [imported] -
  misc_feature (1)..(161): Homolog of NCBI NO: 15231730 NR Description: 60S ribosomal protein L24 (RPL24B) [Arabidopsis
  misc_feature (1)..(161): Homolog of NCBI NO: 18404176 NR Description: 60S ribosomal protein L24 (RPL24A) [Arabidopsis
  misc_feature (1)..(160): Homolog of NCBI NO: 6094040 NR Description: 60S ribosomal protein L24
  misc_feature (1)..(156): Homolog of NCBI NO: 10180025 NR Description: 60S ribosomal protein L24 [Prunus avium]
  misc_feature (1)..(161): Homolog of NCBI NO: 1710521 NR Description: 60S RIBOSOMAL PROTEIN L24
  misc_feature (4)..(161): Homolog of NCBI NO: 34900364 NR Description: putative 60S ribosomal protein L24
MVLKTELCRFSGAKIYPGKGIRFIRSDSQVFLFSNSKCKSYFHNRLKPAKLAWTAMYRKQHKKDIHAEAAKKRRRTTKRPYSRSIVGASLEVIQKKRAEKPEVRDAAREAALREIKERIKKTKDEKKAKKVEVTKSQKTAGRGNAPKPGKAPKLGGGGGKR

SEQ ID NO: 61116 - protein, 106 aa, Triticum aestivum
  peptide (1)..(106): Ceres Seq. ID no. 13661178
  misc_feature (1)..(101): Homolog of NCBI NO: 37778978 NR Description: 60S ribosomal protein L24 [Pagrus major]
  misc_feature (1)..(95): Homolog of NCBI NO: 19075214 NR Description: 60s ribosomal protein L24 [Schizosaccharomyces
  misc_feature (1)..(96): Homolog of NCBI NO: 19115030 NR Description: 60S ribosomal protein L24 [Schizosaccharomyces
  misc_feature (1)..(106): Homolog of NCBI NO: 25295112 NR Description: 60S ribosomal protein L24 [imported] -
  misc_feature (1)..(106): Homolog of NCBI NO: 15231730 NR Description: 60S ribosomal protein L24 (RPL24B) [Arabidopsis
  misc_feature (1)..(106): Homolog of NCBI NO: 18404176 NR Description: 60S ribosomal protein L24 (RPL24A) [Arabidopsis
  misc_feature (1)..(105): Homolog of NCBI NO: 6094040 NR Description: 60S ribosomal protein L24
  misc_feature (1)..(101): Homolog of NCBI NO: 10180025 NR Description: 60S ribosomal protein L24 [Prunus avium]
  misc_feature (1)..(106): Homolog of NCBI NO: 1710521 NR Description: 60S RIBOSOMAL PROTEIN L24
  misc_feature (1)..(106): Homolog of NCBI NO: 34900364 NR Description: putative 60S ribosomal protein L24
MYRKQHKKDIHAEAAKKRRRTTKRPYSRSIVGASLEVIQKKRAEKPEVRDAAREAALREIKERIKKTKDEKKAKKVEVTKSQKTAGRGNAPKPGKAPKLGGGGGKR

SEQ ID NO: 61117 - protein, 93 aa, Triticum aestivum
  peptide (1)..(93): Ceres Seq. ID no. 13661179
PSRGGGGGREGERQLARARPHCRRSRSPPIPIQGGALKVCQGGEDGSQDRALPFQWCQDIPREGDQIHPLRLSSLPFLQLKVQELLPQPSQAS

SEQ ID NO: 61118 - DNA, 849 bp, Triticum aestivum
  misc_feature (1)..(849): Ceres Seq. ID no. 13661185
agaacatcctaatcgaaaatagattgttcctacacacgccatttgcattcttctctctcttcagctactaaccaacgaatctctctctctctctaaaacaatggctcaggaagacgtcgctgctgctgctgctgctgctaacggtgctaccacggcggtggagaagtccgttacgttcacggcgtacaagcctcagctgattgtggaagcacagaaggtcggtgacgctgttgcgttctacaaggctgtgtttggcgccgtggagactggacgctctctctaccccaagcgtaaggctgaccaagagctccctcacctcgtctcttccgagctcgagctcgccggaacaaccgtagtcgtttctgacgtatccgttaactctggccctgatgcgaagacggggactatgcctgcgatcctcgaaaccgatgacgtggaagctgccgttgcgaaggccgttgcggctggagctgtcaaggaggaggaggaggaggaggtctcggagggtggagtcaaggggaaagtgacggatccgttcgggttcacgtggatctttgttgctccggcgaagaagagtgagaaggaaggaaacaaagaggtctaactgttaaccgtcggatctgatcatttcgtcggtttctgaacgaactttttaatattattatcctatgctttttattagtttgtcttttgtggaatctccggtatgagtaaaccggattgattaggctaaaatgacttttgttcttcaccaccttttgacataaacttggtgaaagaaataacaaaaatatcggatgttaatgtcaaaaaaaaaaaaaaaaaagcttatcgataccgtcgacctyg

SEQ ID NO: 61119 - protein, 167 aa, Triticum aestivum; identical to SEQ ID NO: 1109
  peptide (1)..(167): Ceres Seq. ID no. 15220082
  misc_feature (12)..(162): Homolog of NCBI NO: 37520521 NR Description: hypothetical protein glr0952 [Gloeobacter
  misc_feature (1)..(160): Homolog of NCBI NO: 28565534 NR Description: early tobacco anther 1 [Nicotiana tabacum]
  misc_feature (1)..(167): Homolog of NCBI NO: 18422918 NR Description: expressed protein [Arabidopsis thaliana]

SEQ ID NO: 61120 - DNA, 870 bp, Triticum aestivum
  misc_feature (1)..(870): Ceres Seq. ID no. 13664275
agaacatcctaatcgaaaaataccaactctacagttaagatctacctcacagtttaataacctttatttcatactttctcctctatttcatccaaacaccaaagttttagaaatggcaacagcatcggttaacatgcagtcagtcttcgcctgtgggttggccactcgcaagatcaacacaaacaagctcttcttcgccggaaacttcccaaatctcaagaggaactatccggtgggagtgaagtgcatggctgagggagaacccatgaaggacgagtccgcaccttcgacctccgcggctaagcctttgtctagctcatcatcgccgccacctcctccacctcctactaaacctaaggtgagcacgaagtttagcgacttgctagcgtttagcggtccagcaccagaaagaataaacgggcgtttagcgatggttggattcgtggcggccttggcggttgaactttccaagggtgaaaacgttttggctcagatctcggacggcggcgtctcgtggttccttggtacgactgcgatcttgacgcttgcgtcgcttgtaccccttttcaagggtatcaccgccgagtctaagtccaaaggtttcatgacgtccgacgctgagctttggaacggacgtttcgcgatgcttggtttggtcgcgttggcgttcactgagtttgtcaagggtgggacccttgtctgaggaaagaaaatttcttattggggagaatgttatattacagttttgcccttgtaaagttatctggtatgatatgtgtttaagcctatggtgtgtttctttacatatgtattagtgacatgagactttgtggtaaagcactatatcagtaaaagtagtgatgtttttct

SEQ ID NO: 61121 - protein, 233 aa, Triticum aestivum
  peptide (1)..(233): Ceres Seq. ID no. 13664276
  misc_feature (38)..(230): Homolog of NCBI NO: 28194659 NR Description: putative early light induced protein [Arachis
  misc_feature (45)..(233): Homolog of NCBI NO: 25315849 NR Description: early light-inducable protein [imported] -
  misc_feature (38)..(232): Homolog of NCBI NO: 7488128 NR Description: probable light induced protein - Arabidopsis
  misc_feature (38)..(233): Homolog of NCBI NO: 18414282 NR Description: expressed protein [Arabidopsis thaliana]
  misc_feature (38)..(233): Homolog of NCBI NO: 21618071 NR Description: light-induced protein-like protein [Arabidopsis
  misc_feature (38)..(233): Homolog of NCBI NO: 15228866 NR Description: early light-induced protein [Arabidopsis
  misc_feature (38)..(233): Homolog of NCBI NO: 38123375 NR Description: ELIP [Brassica rapa subsp. pekinensis]
EHPNRKIPTLQLRSTSQFNNLYFILSPLFHPNTKVLEMATASVNMQSVFACGLATRKINTNKLFFAGNFPNLKRNYPVGVKCMAEGEPMKDESAPSTSAAKPLSSSSSPPPPPPPTKPKVSTKFSDLLAFSGPAPERINGRLAMVGFVAALAVELSKGENVLAQISDGGVSWFLGTTAILTLASLVPLFKGITAESKSKGFMTSDAELWNGRFAMLGLVALAFTEFVKGGTLV

SEQ ID NO: 61122 - protein, 196 aa, Triticum aestivum
  peptide (1)..(196): Ceres Seq. ID no. 13664277
  misc_feature (1)..(193): Homolog of NCBI NO: 28194659 NR Description: putative early light induced protein [Arachis
  misc_feature (8)..(196): Homolog of NCBI NO: 25315849 NR Description: early light-inducable protein [imported] -
  misc_feature (1)..(195): Homolog of NCBI NO: 7488128 NR Description: probable light induced protein - Arabidopsis
  misc_feature (1)..(196): Homolog of NCBI NO: 18414282 NR Description: expressed protein [Arabidopsis thaliana]
  misc_feature (1)..(196): Homolog of NCBI NO: 21618071 NR Description: light-induced protein-like protein [Arabidopsis
  misc_feature (1)..(196): Homolog of NCBI NO: 15228866 NR Description: early light-induced protein [Arabidopsis
  misc_feature (1)..(196): Homolog of NCBI NO: 38123375 NR Description: ELIP [Brassica rapa subsp. pekinensis]
MATASVNMQSVFACGLATRKINTNKLFFAGNFPNLKRNYPVGVKCMAEGEPMKDESAPSTSAAKPLSSSSSPPPPPPPTKPKVSTKFSDLLAFSGPAPERINGRLAMVGFVAALAVELSKGENVLAQISDGGVSWFLGTTAILTLASLVPLFKGITAESKSKGFMTSDAELWNGRFAMLGLVALAFTEFVKGGTLV

SEQ ID NO: 61123 - protein, 189 aa, Triticum aestivum
  peptide (1)..(189): Ceres Seq. ID no. 13664278
  misc_feature (1)..(186): Homolog of NCBI NO: 28194659 NR Description: putative early light induced protein [Arachis
  misc_feature (1)..(189): Homolog of NCBI NO: 25315849 NR Description: early light-inducable protein [imported] -
  misc_feature (1)..(188): Homolog of NCBI NO: 7488128 NR Description: probable light induced protein - Arabidopsis
  misc_feature (1)..(189): Homolog of NCBI NO: 18414282 NR Description: expressed protein [Arabidopsis thaliana]
  misc_feature (1)..(189): Homolog of NCBI NO: 21618071 NR Description: light-induced protein-like protein [Arabidopsis
  misc_feature (1)..(189): Homolog of NCBI NO: 15228866 NR Description: early light-induced protein [Arabidopsis
  misc_feature (1)..(189): Homolog of NCBI NO: 38123375 NR Description: ELIP [Brassica rapa subsp. pekinensis]
MQSVFACGLATRKINTNKLFFAGNFPNLKRNYPVGVKCMAEGEPMKDESAPSTSAAKPLSSSSSPPPPPPPTKPKVSTKFSDLLAFSGPAPERINGRLAMVGFVAALAVELSKGENVLAQISDGGVSWFLGTTAILTLASLVPLFKGITAESKSKGFMTSDAELWNGRFAMLGLVALAFTEFVKGGTLV

SEQ ID NO: 61124 - DNA, 911 bp, Triticum aestivum
  misc_feature (1)..(911): Ceres Seq. ID no. 13664381
atactaactcacacacaaattactagacatcctcgttctctgtgcagttccaacaatcctagtgatggcgtgtgcaagccatgtcatgattttccttgtgttctcaaatttagccatagccatggccacccttcctcctcccttgtatgaccctaacctagggaagtgtaagaatagttgtgaggaagagctcaatctatctttgtacctacaccaagttgtgacaggaccagcccacaaccaagaagtaattctcagccctggctttcctaacatgtttggtatgatagccgtcgttgactggaccatatacgccgtccctgattccacttcaagtatcattgctcgggcaaagggaatgactatccaggctacccaaagcgaggtcaatggtgttgcctggtttcttcctttcagcatggtctttcaggattccaggtttggcggttctacgctgcaagtgatgggagcaattactggtgcagtagatggtgagtgggctattgtgggtgggactggcaaattgtccacggcacgtggtactattaagttcatagcagtccaggcacagagcaccccaacctttgaggtctacagaaggattgatatccatgcattctacacacccgcaccggccgtttaagatatgaagaatacacatgcagcactccgactggaaaggcgagccagcaatctcgcataaataaaatatgtgttttccattatgactagtagtactacctcgttgtaatatgtggtcaagtcgtctttactttcaaaaaatgcaggagtttgtggcatatcattgaaaatcttagacataaatccacaaggcctttgtccttttttgtaaaattggactgtatgatttaatttggaatattacaatcttaatatattatgtgaaaagg

SEQ ID NO: 61125 - protein, 192 aa, Triticum aestivum
  peptide (1)..(192): Ceres Seq. ID no. 13664382
  misc_feature (28)..(187): Pfam Name: Dirigent-like protein Pfam Description: Dirigent-like protein
  misc_feature (47)..(192): Homolog of NCBI NO: 38636739 NR Description: benzothiadiazole-induced protein-like
  misc_feature (21)..(163): Homolog of NCBI NO: 7489661 NR Description: benzothiadiazole-induced protein (clone WCI-1) -
  misc_feature (29)..(188): Homolog of NCBI NO: 21311647 NR Description: hessian fly response gene 1 protein [Triticum
  misc_feature (42)..(188): Homolog of NCBI NO: 34895198 NR Description: P0463A02.21 [Oryza sativa (japonica
  misc_feature (1)..(192): Homolog of NCBI NO: 38637455 NR Description: putative benzothiadiazole-induced protein
  misc_feature (1)..(192): Homolog of NCBI NO: 38637464 NR Description: disease resistance response protein-like
  misc_feature (1)..(192): Homolog of NCBI NO: 38636734 NR Description: benzothiadiazole-induced protein-like
  misc_feature (40)..(188): Homolog of NCBI NO: 37532940 NR Description: putative disease resistance protein
  misc_feature (36)..(188): Homolog of NCBI NO: 37532964 NR Description: putative disease resistance response protein
  misc_feature (1)..(187): Homolog of NCBI NO: 37532952 NR Description: putative disease resistance response protein
MACASHVMIFLVFSNLAIAMATLPPPLYDPNLGKCKNSCEEELNLSLYLHQVVTGPAHNQEVILSPGFPNMFGMIAVVDWTIYAVPDSTSSIIARAKGMTIQATQSEVNGVAWFLPFSMVFQDSRFGGSTLQVMGAITGAVDGEWAIVGGTGKLSTARGTIKFIAVQAQSTPTFEVYRRIDIHAFYTPAPAV

SEQ ID NO: 61126 - protein, 185 aa, Triticum aestivum
  peptide (1)..(185): Ceres Seq. ID no. 13664383
  misc_feature (21)..(180): Pfam Name: Dirigent-like protein Pfam Description: Dirigent-like protein
  misc_feature (40)..(185): Homolog of NCBI NO: 38636739 NR Description: benzothiadiazole-induced protein-like
  misc_feature (14)..(156): Homolog of NCBI NO: 7489661 NR Description: benzothiadiazole-induced protein (clone WCI-1) -
  misc_feature (22)..(181): Homolog of NCBI NO: 21311647 NR Description: hessian fly response gene 1 protein [Triticum
  misc_feature (35)..(181): Homolog of NCBI NO: 34895198 NR Description: P0463A02.21 [Oryza sativa (japonica
  misc_feature (1)..(185): Homolog of NCBI NO: 38637455 NR Description: putative benzothiadiazole-induced protein
  misc_feature (1)..(185): Homolog of NCBI NO: 38637464 NR Description: disease resistance response protein-like
  misc_feature (1)..(185): Homolog of NCBI NO: 38636734 NR Description: benzothiadiazole-induced protein-like
  misc_feature (33)..(181): Homolog of NCBI NO: 37532940 NR Description: putative disease resistance protein
  misc_feature (29)..(181): Homolog of NCBI NO: 37532964 NR Description: putative disease resistance response protein
  misc_feature (1)..(180): Homolog of NCBI NO: 37532952 NR Description: putative disease resistance response protein
MIFLVFSNLAIAMATLPPPLYDPNLGKCKNSCEEELNLSLYLHQVVTGPAHNQEVILSPGFPNMFGMIAVVDWTIYAVPDSTSSIIARAKGMTIQATQSEVNGVAWFLPFSMVFQDSRFGGSTLQVMGAITGAVDGEWAIVGGTGKLSTARGTIKFIAVQAQSTPTFEVYRRIDIHAFYTPAPAV

SEQ ID NO: 61127 - protein, 173 aa, Triticum aestivum
  peptide (1)..(173): Ceres Seq. ID no. 13664384
  misc_feature (9)..(168): Pfam Name: Dirigent-like protein Pfam Description: Dirigent-like protein
  misc_feature (28)..(173): Homolog of NCBI NO: 38636739 NR Description: benzothiadiazole-induced protein-like
  misc_feature (2)..(144): Homolog of NCBI NO: 7489661 NR Description: benzothiadiazole-induced protein (clone WCI-1) -
  misc_feature (10)..(169): Homolog of NCBI NO: 21311647 NR Description: hessian fly response gene 1 protein [Triticum
  misc_feature (23)..(169): Homolog of NCBI NO: 34895198 NR Description: P0463A02.21 [Oryza sativa (japonica
  misc_feature (1)..(173): Homolog of NCBI NO: 38637455 NR Description: putative benzothiadiazole-induced protein
  misc_feature (1)..(173): Homolog of NCBI NO: 38637464 NR Description: disease resistance response protein-like
  misc_feature (1)..(173): Homolog of NCBI NO: 38636734 NR Description: benzothiadiazole-induced protein-like
  misc_feature (21)..(169): Homolog of NCBI NO: 37532940 NR Description: putative disease resistance protein
  misc_feature (17)..(169): Homolog of NCBI NO: 37532964 NR Description: putative disease resistance response protein
  misc_feature (1)..(168): Homolog of NCBI NO: 37532952 NR Description: putative disease resistance response protein
MATLPPPLYDPNLGKCKNSCEEELNLSLYLHQVVTGPAHNQEVILSPGFPNMFGMIAVVDWTIYAVPDSTSSIIARAKGMTIQATQSEVNGVAWFLPFSMVFQDSRFGGSTLQVMGAITGAVDGEWAIVGGTGKLSTARGTIKFIAVQAQSTPTFEVYRRIDIHAFYTPAPAV

SEQ ID NO: 61128 - DNA, 1113 bp, Triticum aestivum
  misc_feature (1)..(1113): Ceres Seq. ID no. 13661469
atcaatcactcttaacccaaatcgctgaaagcagtacagtatgacgatcatgcggatgttcctagctctctgcgcccttgggttcgtcgcaggagtagtagaagatggatcgtcgtttgacgtcagcgcttacccggtcaagtgggatgaggacccatctgtgggatcaggggacgtggccgctccaccgtctcccggtactgaggcgccggcgccgcctccgaagcatcacatgatggtgaagaagggcatgctgtttctggagcgcgacctctttgccggggcgctcctgccggcaaacacccggctgggctacgtcagacgcacgagttcaccaggcccagtcatttcaagtactacaagcccagtaccacccttcaggtacagcagtttcgagaaaatcttgaagttttacaatgtaacgcacggctccaagcaagcagggaggatctcggagactctccagttctgcgaggaggcgggagacaaggaaccacacgcgtgcgcaacgtctgtggccgccgcgagagacttcgcggccaccgttttggggaccaaggagccgcgcgcggtcacttcaatccttcacggacgcacacaacccctccgctacgtggtggcgcccaacggaatcgccagcgtcggcggcgacgcggtggtgccatgccaccccctggcgtaccctgtggaggtcttttactgccacaaccccagcaacgtgcaagcgctccgtgtccaacttgttggacaggaggacccttccgtcggcgccacggccatcgcagtatgccacaaggataccagctactgggatgaggcatacttcatgatgctcaacggatcccgtggcgagccgatatgtcacttcatgccggccaattaccttctgtggctctaggaggtgaggacacgagcagcaagtacgagagttgagagacagccggccggtgacgtgtaatttcggacttagtagccgatctagcttaaataaacgtcactgtatctgtatgcccttaccagttattgtaagcgcatgtagcgcaaagatatatgtaccccgaaaaatgatacgtatgatacagatatatattgtgaamtrraaaaaaagggggg

SEQ ID NO: 61129 - protein, 285 aa, Triticum aestivum
  peptide (1)..(285): Ceres Seq. ID no. 15218784
  misc_feature (71)..(285): Pfam Name: BURP domain Pfam Description: BURP domain
MTIMRMFLALCALGFVAGVVEDGSSFDVSAYPVKWDEDPSVGSGDVAAPPSPGTEAPAPPPKHHMMVKKGMLFLERDLFAGALLPANTRLGYVRRTSSPGPVISSTTSPVPPFRYSSFEKILKFYNVTHGSKQAGRISETLQFCEEAGDKEPHACATSVAAARDFAATVLGTKEPRAVTSILHGRTQPLRYVVAPNGIASVGGDAVVPCHPLAYPVEVFYCHNPSNVQALRVQLVGQEDPSVGATAIAVCHKDTSYWDEAYFMMLNGSRGEPICHFMPANYLLWL

SEQ ID NO: 61130 - protein, 282 aa, Triticum aestivum
  peptide (1)..(282): Ceres Seq. ID no. 15218785
  misc_feature (68)..(282): Pfam Name: BURP domain Pfam Description: BURP domain
MRMFLALCALGFVAGVVEDGSSFDVSAYPVKWDEDPSVGSGDVAAPPSPGTEAPAPPPKHHMMVKKGMLFLERDLFAGALLPANTRLGYVRRTSSPGPVISSTTSPVPPFRYSSFEKILKFYNVTHGSKQAGRISETLQFCEEAGDKEPHACATSVAAARDFAATVLGTKEPRAVTSILHGRTQPLRYVVAPNGIASVGGDAVVPCHPLAYPVEVFYCHNPSNVQALRVQLVGQEDPSVGATAIAVCHKDTSYWDEAYFMMLNGSRGEPICHFMPANYLLWL

SEQ ID NO: 61131 - protein, 280 aa, Triticum aestivum
  peptide (1)..(280): Ceres Seq. ID no. 15218786
  misc_feature (66)..(280): Pfam Name: BURP domain Pfam Description: BURP domain
MFLALCALGFVAGVVEDGSSFDVSAYPVKWDEDPSVGSGDVAAPPSPGTEAPAPPPKHHMMVKKGMLFLERDLFAGALLPANTRLGYVRRTSSPGPVISSTTSPVPPFRYSSFEKILKFYNVTHGSKQAGRISETLQFCEEAGDKEPHACATSVAAARDFAATVLGTKEPRAVTSILHGRTQPLRYVVAPNGIASVGGDAVVPCHPLAYPVEVFYCHNPSNVQALRVQLVGQEDPSVGATAIAVCHKDTSYWDEAYFMMLNGSRGEPICHFMPANYLLWL

SEQ ID NO: 61132 - DNA, 907 bp, Triticum aestivum
  misc_feature (1)..(907): Ceres Seq. ID no. 13661617
aaaagtcatatcttcttgtaccactctccttcaaacatagtcagagaaaaacagcaactcttgtctgaaaaatcagagagagagagagagagaaaaagaatggatcaaaatgtgctaggcactcaagtatacccctacacgacccaaacccatggccagtgcatcatcgttnaccagatcgatggatcatcatcaggcgaaggatcaaagccggtgaagcggcggaggaggaggaggagcaaagggtcgtctgccacgagcgaagatgacatgacggcgatcggagtgatgttgaggaagaggaagttgaccgatgagcaagtgaatatgctcgaattcagcttcgagaacgagcacaagcttgagtcagggaggaaagagaagatcgccgcagagttaggtctcgacccgagacaggtggctgtttggttccagaaccgccgtgcacggtggaagaacaagaaactcgaggaagaatacgccaaactgaagagccaacacgacaccgtcgtcctcggccaatgtcagctcgaatctcaggtattaaaactgtcggaacaattgagtgaagctcaaaacgaaattcgaaaactttccgagcgacttgctcaagaaacattaacaaacagtccgagttcacctcgttctgttgaagccaatggtgcaccaattcatttcgagtttccgccggatgttaattacaacatcccgttttacatatcggataatagttacttgcagaacatggagtattgggatggtttgtatgtgtaattttaacaactaaaatatttagagtctatggatcgaaaatcatgtttaaattaatgtataaatagatgtttgtcaacctgttgtaaatgcagtgtttaaaatatttttattttaataaataactttgtttctc

SEQ ID NO: 61133 - protein, 257 aa, Triticum aestivum
  peptide (1)..(257): Ceres Seq. ID no. 13661618
  misc_feature (100)..(153): Pfam Name: Homeobox domain Pfam Description: Homeobox domain
  misc_feature (99)..(222): Homolog of NCBI NO: 29367373 NR Description: homeodomain leucine zipper protein-like protein
  misc_feature (99)..(228): Homolog of NCBI NO: 1435022 NR Description: DNA-binding protein [Daucus carota]
  misc_feature (71)..(206): Homolog of NCBI NO: 3868841 NR Description: CRHB7 [Ceratopteris richardii]
  misc_feature (50)..(192): Homolog of NCBI NO: 15232122 NR Description: homeobox-leucine zipper protein HAT5 (HD-ZIP
  misc_feature (99)..(230): Homolog of NCBI NO: 18034441 NR Description: homeodomain leucine zipper protein CPHB-5
  misc_feature (143)..(251): Homolog of NCBI NO: 11231049 NR Description: homeobox-leucine zipper protein [Zinnia elegans]
  misc_feature (46)..(222): Homolog of NCBI NO: 33146844 NR Description: homeodomain protein-like [Oryza sativa (japonica
  misc_feature (66)..(255): Homolog of NCBI NO: 15224190 NR Description: homeodomain protein [Arabidopsis thaliana]
  misc_feature (66)..(257): Homolog of NCBI NO: 15234508 NR Description: homeodomain protein [Arabidopsis thaliana]
  misc_feature (35)..(257): Homolog of NCBI NO: 15240052 NR Description: homeodomain protein [Arabidopsis thaliana]
  misc_feature (58)..(58): Xaa is any aa, unknown or other
KSHIFLYHSPSNIVREKQQLLSEKSERERERKRMDQNVLGTQVYPYTTQTHGQCIIVXQIDGSSSGEGSKPVKRRRRRRSKGSSATSEDDMTAIGVMLRKRKLTDEQVNMLEFSFENEHKLESGRKEKIAAELGLDPRQVAVWFQNRRARWKNKKLEEEYAKLKSQHDTVVLGQCQLESQVLKLSEQLSEAQNEIRKLSERLAQETLTNSPSSPRSVEANGAPIHFEFPPDVNYNIPFYISDNSYLQNMEYWDGLYV

SEQ ID NO: 61134 - protein, 224 aa, Triticum aestivum
  peptide (1)..(224): Ceres Seq. ID no. 13661619
  misc_feature (67)..(120): Pfam Name: Homeobox domain Pfam Description: Homeobox domain
  misc_feature (66)..(189): Homolog of NCBI NO: 29367373 NR Description: homeodomain leucine zipper protein-like protein
  misc_feature (66)..(195): Homolog of NCBI NO: 1435022 NR Description: DNA-binding protein [Daucus carota]
  misc_feature (38)..(173): Homolog of NCBI NO: 3868841 NR Description: CRHB7 [Ceratopteris richardii]
  misc_feature (17)..(159): Homolog of NCBI NO: 15232122 NR Description: homeobox-leucine zipper protein HAT5 (HD-ZIP
  misc_feature (66)..(197): Homolog of NCBI NO: 18034441 NR Description: homeodomain leucine zipper protein CPHB-5
  misc_feature (110)..(218): Homolog of NCBI NO: 11231049 NR Description: homeobox-leucine zipper protein [Zinnia elegans]
  misc_feature (13)..(189): Homolog of NCBI NO: 33146844 NR Description: homeodomain protein-like [Oryza sativa (japonica
  misc_feature (33)..(222): Homolog of NCBI NO: 15224190 NR Description: homeodomain protein [Arabidopsis thaliana]
  misc_feature (33)..(224): Homolog of NCBI NO: 15234508 NR Description: homeodomain protein [Arabidopsis thaliana]
  misc_feature (2)..(224): Homolog of NCBI NO: 15240052 NR Description: homeodomain protein [Arabidopsis thaliana]
  misc_feature (25)..(25): Xaa is any aa, unknown or other
MDQNVLGTQVYPYTTQTHGQCIIVXQIDGSSSGEGSKPVKRRRRRRSKGSSATSEDDMTAIGVMLRKRKLTDEQVNMLEFSFENEHKLESGRKEKIAAELGLDPRQVAVWFQNRRARWKNKKLEEEYAKLKSQHDTVVLGQCQLESQVLKLSEQLSEAQNEIRKLSERLAQETLTNSPSSPRSVEANGAPIHFEFPPDVNYNIPFYISDNSYLQNMEYWDGLYV

SEQ ID NO: 61135 - protein, 167 aa, Triticum aestivum
  peptide (1)..(167): Ceres Seq. ID no. 13661620
  misc_feature (10)..(63): Pfam Name: Homeobox domain Pfam Description: Homeobox domain
  misc_feature (9)..(132): Homolog of NCBI NO: 29367373 NR Description: homeodomain leucine zipper protein-like protein
  misc_feature (9)..(138): Homolog of NCBI NO: 1435022 NR Description: DNA-binding protein [Daucus carota]
  misc_feature (1)..(116): Homolog of NCBI NO: 3868841 NR Description: CRHB7 [Ceratopteris richardii]
  misc_feature (1)..(102): Homolog of NCBI NO: 15232122 NR Description: homeobox-leucine zipper protein HAT5 (HD-ZIP
  misc_feature (9)..(140): Homolog of NCBI NO: 18034441 NR Description: homeodomain leucine zipper protein CPHB-5
  misc_feature (53)..(161): Homolog of NCBI NO: 11231049 NR Description: homeobox-leucine zipper protein [Zinnia elegans]
  misc_feature (1)..(132): Homolog of NCBI NO: 33146844 NR Description: homeodomain protein-like [Oryza sativa (japonica
  misc_feature (1)..(165): Homolog of NCBI NO: 15224190 NR Description: homeodomain protein [Arabidopsis thaliana]
  misc_feature (1)..(167): Homolog of NCBI NO: 15234508 NR Description: homeodomain protein [Arabidopsis thaliana]
  misc_feature (1)..(167): Homolog of NCBI NO: 15240052 NR Description: homeodomain protein [Arabidopsis thaliana]
MTAIGVMLRKRKLTDEQVNMLEFSFENEHKLESGRKEKIAAELGLDPRQVAVWFQNRRARWKNKKLEEEYAKLKSQHDTVVLGQCQLESQVLKLSEQLSEAQNEIRKLSERLAQETLTNSPSSPRSVEANGAPIHFEFPPDVNYNIPFYISDNSYLQNMEYWDGLYV

SEQ ID NO: 61136 - DNA, 1028 bp, Triticum aestivum
  misc_feature (1)..(1028): Ceres Seq. ID no. 12623490
gcaggccgtcgctagctatcatccaaagaccaacgagtacgccaacatgtgaagtgcaccgagctgagcagtgagtgagcggccggggacgcggtcgacgagccaagaatggcgacgcaccatcgtgctctcctcctcctgctcgccgtgctgctccccgcggccgccttcgccgacccggacgccgtgcaggacttctgcgtgccggaccccgggcgcggccggccggtggagctcaacctcatccgctcctacccgtgcaggaaccccgcgaacctcaccgcgggcgacttcgccttctcaggcgtgcgcgcggcgggcaacttctcggcggacacggggttcgcgggggtgtccgtcacgccggcgcagttcccgggcctgcacaccctcggcatgtccttcgcgcgcgccgacctctcggcggccggcggcgtcaacccgccccactaccacccgcgcgccaccgagacggcgctagtgctcgccggccgcgtctacgccggcttcgtcgacaccgccggccgcctcttcgccaaggtgctcgtggagggggaggtcatggtgttcccccgcggcatggtgcacttccagctcaacgtcggcgaccagcccgccaccgtctacggcaccttcaacagcgagaaccccgggatcgtgcgcgtcccggccaccgtgttcgggtccgggatcagggacgccgtcctcgagagggccttcgggctctcccccgaggagctccggcggatcgagaagaggttcggcgtgcccaagaaggccgagctggaggactagttaattagtttattactacttcgttcgttgctggccggccatggccgcatgcgcatgattagttgacaggtagacttgtgggttgggagtatgggcaatacttatctctttccatttgattaatataatatacttgtggatttatagtggtggttggtagggctcatccgcgtaatgatacgaaaagtgtaaggtatacaaatgattgcgagtatattatactctctgttttt

SEQ ID NO: 61137 - protein, 228 aa, Triticum aestivum
  peptide (1)..(228): Ceres Seq. ID no. 12623491
  misc_feature (65)..(211): Pfam Name: Cupin Pfam Description: Cupin
  misc_feature (8)..(222): Homolog of NCBI NO: 18202917 NR Description: Germin-like protein subfamily 2 member 2
  misc_feature (1)..(219): Homolog of NCBI NO: 18202909 NR Description: Putative germin-like protein subfamily 1 member
  misc_feature (1)..(219): Homolog of NCBI NO: 15241589 NR Description: germin - like protein; protein id: At5g38960.1
  misc_feature (9)..(219): Homolog of NCBI NO: 4996622 NR Description: germin-like protein [Atriplex lentiformis]
  misc_feature (1)..(219): Homolog of NCBI NO: 7447346 NR Description: germin-like protein - Monterey pine
  misc_feature (1)..(219): Homolog of NCBI NO: 2745849 NR Description: germin-like protein; PcGER1 [Pinus caribaea]
  misc_feature (1)..(219): Homolog of NCBI NO: 19071771 NR Description: germin-like protein [Pinus sylvestris]
  misc_feature (9)..(220): Homolog of NCBI NO: 27529869 NR Description: germin-like protein [Barbula unguiculata]
  misc_feature (7)..(223): Homolog of NCBI NO: 34904670 NR Description: putative germin protein [Oryza sativa (japonica
  misc_feature (6)..(218): Homolog of NCBI NO: 15232830 NR Description: germin-like protein
MATHHRALLLLLAVLLPAAAFADPDAVQDFCVPDPGRGRPVELNLIRSYPCRNPANLTAGDFAFSGVRAAGNFSADTGFAGVSVTPAQFPGLHTLGMSFARADLSAAGGVNPPHYHPRATETALVLAGRVYAGFVDTAGRLFAKVLVEGEVMVFPRGMVHFQLNVGDQPATVYGTFNSENPGIVRVPATVFGSGIRDAVLERAFGLSPEELRRIEKRFGVPKKAELED

SEQ ID NO: 61138 - protein, 132 aa, Triticum aestivum
  peptide (1)..(132): Ceres Seq. ID no. 12623492
  misc_feature (1)..(115): Pfam Name: Cupin Pfam Description: Cupin
  misc_feature (1)..(126): Homolog of NCBI NO: 18202917 NR Description: Germin-like protein subfamily 2 member 2
  misc_feature (1)..(123): Homolog of NCBI NO: 18202909 NR Description: Putative germin-like protein subfamily 1 member
  misc_feature (1)..(123): Homolog of NCBI NO: 15241589 NR Description: germin - like protein; protein id: At5g38960.1
  misc_feature (1)..(123): Homolog of NCBI NO: 4996622 NR Description: germin-like protein [Atriplex lentiformis]
  misc_feature (1)..(123): Homolog of NCBI NO: 7447346 NR Description: germin-like protein - Monterey pine
  misc_feature (1)..(123): Homolog of NCBI NO: 2745849 NR Description: germin-like protein; PcGER1 [Pinus caribaea]
  misc_feature (1)..(123): Homolog of NCBI NO: 19071771 NR Description: germin-like protein [Pinus sylvestris]
  misc_feature (1)..(124): Homolog of NCBI NO: 27529869 NR Description: germin-like protein [Barbula unguiculata]
  misc_feature (1)..(127): Homolog of NCBI NO: 34904670 NR Description: putative germin protein [Oryza sativa (japonica
  misc_feature (1)..(122): Homolog of NCBI NO: 15232830 NR Description: germin-like protein
MSFARADLSAAGGVNPPHYHPRATETALVLAGRVYAGFVDTAGRLFAKVLVEGEVMVFPRGMVHFQLNVGDQPATVYGTFNSENPGIVRVPATVFGSGIRDAVLERAFGLSPEELRRIEKRFGVPKKAELED

SEQ ID NO: 61139 - DNA, 808 bp, Triticum aestivum
  misc_feature (1)..(808): Ceres Seq. ID no. 13661143
aacatcctaatcgaaaaacaccacacgcaacgcaagccttcgcacccgaacgcaagaaagagagagagagagagagagagagcacacgcggcgggggaaaagcaggagcgaagcgagggatcgggaggaacatcggcgaggccatggcgcggcggggcacggaggcgttcccggacctgggcgcgcactgcgacagggaggactgcaaccagctcgacttcctgcccttcgactgcaacggctgcggcaaggtgttctgcacggagcaccgcgcgtacgttgaccacggctgcccgctcgcggccgacaacggccgcaccgtcgtcgtctgcgaggcctgcggcgactccatcgagcgcgccgggtcggacgagacggatgcgcagatcctcgagaagcacgcgcggtcgcgccggggctgcgacccggccaggaagctcaagccgcgatgccccgcgcggcgctgcaaggagacactcaccttctccaacacgagccactgcaaggagtgcgggcagaagctgtgcctcaagcaccggttccccgaggaccacgggtgctcgcgcgtgtcgccggtgggggccgccgccgccgcgaggagggccggcgactgcggccgcgacgcgcagaagacaaaggacggcggtgggtgggcgctgccgccgttgatccggaatttcaattgattaccctgaagctgaaattgtggctgggatttacgcaattcatggaacgtttgttttctccggtgtcatattttcaattgtgcacattttgttgttgttaaatgaagaatcaaattcagtct

SEQ ID NO: 61140 - protein, 227 aa, Triticum aestivum
  peptide (1)..(227): Ceres Seq. ID no. 13661144
  misc_feature (150)..(188): Pfam Name: AN1-like Zinc finger Pfam Description: AN1-like Zinc finger
  misc_feature (56)..(199): Homolog of NCBI NO: 21749694 NR Description: unnamed protein product [Homo sapiens]
  misc_feature (56)..(199): Homolog of NCBI NO: 20270357 NR Description: hypothetical protein BC018415 [Homo sapiens]
  misc_feature (53)..(212): Homolog of NCBI NO: 31207325 NR Description: ENSANGP00000015397 [Anopheles gambiae]
  misc_feature (56)..(202): Homolog of NCBI NO: 34876869 NR Description: similar to RIKEN cDNA 1110060O18 [Rattus
  misc_feature (56)..(202): Homolog of NCBI NO: 21312112 NR Description: RIKEN cDNA 1110060O18 [Mus musculus]
  misc_feature (56)..(202): Homolog of NCBI NO: 15079311 NR Description: RIKEN cDNA 1110060O18 [Mus musculus]
  misc_feature (52)..(186): Homolog of NCBI NO: 30688811 NR Description: zinc finger protein (PMZ) -related [Arabidopsis
  misc_feature (52)..(187): Homolog of NCBI NO: 15230311 NR Description: expressed protein [Arabidopsis thaliana]
  misc_feature (52)..(186): Homolog of NCBI NO: 33146779 NR Description: putative arsenite inducible RNA associated
  misc_feature (48)..(188): Homolog of NCBI NO: 15232930 NR Description: zinc finger protein (PMZ) -related [Arabidopsis
HPNRKTPHATQAFAPERKKERERERESTRGGGKAGAKRGIGRNIGEAMARRGTEAFPDLGAHCDREDCNQLDFLPFDCNGCGKVFCTEHRAYVDHGCPLAADNGRTVVVCEACGDSIERAGSDETDAQILEKHARSRRGCDPARKLKPRCPARRCKETLTFSNTSHCKECGQKLCLKHRFPEDHGCSRVSPVGAAAAARRAGDCGRDAQKTKDGGGWALPPLIRNFN

SEQ ID NO: 61141 - protein, 222 aa, Triticum aestivum
  peptide (1)..(222): Ceres Seq. ID no. 13661145
  misc_feature (44)..(206): Pfam Name: Equine herpesvirus glycoprotein gp2 Pfam Description: Equine herpesvirus glycoprotein gp2
  misc_feature (22)..(207): Homolog of NCBI NO: 2769724 NR Description: H87 [Human herpesvirus 6]
  misc_feature (44)..(206): Homolog of NCBI NO: 17221112 NR Description: glycoprotein gp2 [Equine herpesvirus 1]
  misc_feature (44)..(206): Homolog of NCBI NO: 17221114 NR Description: glycoprotein gp2 [Equine herpesvirus 1]
  misc_feature (9)..(203): Homolog of NCBI NO: 2769724 NR Description: H87 [Human herpesvirus 6]
  misc_feature (59)..(208): Homolog of NCBI NO: 17221112 NR Description: glycoprotein gp2 [Equine herpesvirus 1]
  misc_feature (44)..(206): Homolog of NCBI NO: 17221106 NR Description: glycoprotein gp2 [Equine herpesvirus 1]
  misc_feature (59)..(206): Homolog of NCBI NO: 17221110 NR Description: glycoprotein gp2 [Equine herpesvirus 1]
  misc_feature (9)..(192): Homolog of NCBI NO: 7460853 NR Description: probable immediate early protein 2 - human
  misc_feature (44)..(206): Homolog of NCBI NO: 17221102 NR Description: glycoprotein gp2 [Equine herpesvirus 1]
  misc_feature (28)..(222): Homolog of NCBI NO: 11360494 NR Description: antifreeze glycopeptide AFGP polyprotein
NILIEKHHTQRKPSHPNARKRERERERAHAAGEKQERSEGSGGTSARPWRGGARRRSRTWARTATGRTATSSTSCPSTATAAARCSARSTARTLTTAARSRPTTAAPSSSARPAATPSSAPGRTRRMRRSSRSTRGRAGAATRPGSSSRDAPRGAARRHSPSPTRATARSAGRSCASSTGSPRTTGARACRRWGPPPPRGGPATAAATRRRQRTAVGGRCRR

SEQ ID NO: 61142 - protein, 180 aa, Triticum aestivum
  peptide (1)..(180): Ceres Seq. ID no. 13661146
  misc_feature (103)..(141): Pfam Name: AN1-like Zinc finger Pfam Description: AN1-like Zinc finger
  misc_feature (9)..(152): Homolog of NCBI NO: 21749694 NR Description: unnamed protein product [Homo sapiens]
  misc_feature (9)..(152): Homolog of NCBI NO: 20270357 NR Description: hypothetical protein BC018415 [Homo sapiens]
  misc_feature (6)..(165): Homolog of NCBI NO: 31207325 NR Description: ENSANGP00000015397 [Anopheles gambiae]
  misc_feature (9)..(155): Homolog of NCBI NO: 34876869 NR Description: similar to RIKEN cDNA 1110060O18 [Rattus
  misc_feature (9)..(155): Homolog of NCBI NO: 21312112 NR Description: RIKEN cDNA 1110060O18 [Mus musculus]
  misc_feature (9)..(155): Homolog of NCBI NO: 15079311 NR Description: RIKEN cDNA 1110060O18 [Mus musculus]
  misc_feature (5)..(139): Homolog of NCBI NO: 30688811 NR Description: zinc finger protein (PMZ) -related [Arabidopsis
  misc_feature (5)..(140): Homolog of NCBI NO: 15230311 NR Description: expressed protein [Arabidopsis thaliana]
  misc_feature (5)..(139): Homolog of NCBI NO: 33146779 NR Description: putative arsenite inducible RNA associated
  misc_feature (1)..(141): Homolog of NCBI NO: 15232930 NR Description: zinc finger protein (PMZ) -related [Arabidopsis
MARRGTEAFPDLGAHCDREDCNQLDFLPFDCNGCGKVFCTEHRAYVDHGCPLAADNGRTVVVCEACGDSIERAGSDETDAQILEKHARSRRGCDPARKLKPRCPARRCKETLTFSNTSHCKECGQKLCLKHRFPEDHGCSRVSPVGAAAAARRAGDCGRDAQKTKDGGGWALPPLIRNFN

SEQ ID NO: 61143 - DNA, 725 bp, Triticum aestivum
  misc_feature (1)..(725): Ceres Seq. ID no. 12623748
ctgaatagtcttgaaccgataaggagaggagacgaccgtaaaatcccggagaggagcgccccgggcagcgatggcgacgagggtgtgggcggcgtcggcggcggccttaaaccccactctcctccccctttcgtcttccgcacgtccgagcaggcccgccccctccacgcggccgagcgggcacctccgactgcgcagccgcccgccgcggccggccagggtcgtgtgccgccgcgccaagaacgccgccttcgaggactacaagttcccggactccatccccgagttcgccgagcaggagacgagcaagttcagggagcacatgacgtggcggctggagcagaagaaggagcagtacttcgggaagcacgtggaggacatcgtcgacgtctgcaccgaggtcttgagcacgttcttgcaacatgagtactgcggacccgggacgctcctggttcaccccttcttggatatgaagggcgagatcaaagagaggggcctccccggcgcgcctcaggctgcgcgcgcccccatcgcgtgggctgagaagaacatcgacaaggactggaaggagtgggacggagattgatagcgctgacttccttttgtctctgctgtagcagcagcatgtggtacctgtagtagtagtagtcttaatgtttcagtagcagcaggaatctaactatagattttagtttagtcatattcatcctatctggatcccgaga

SEQ ID NO: 61144 - protein, 171 aa, Triticum aestivum
  peptide (1)..(171): Ceres Seq. ID no. 12623749
  misc_feature (52)..(170): Homolog of NCBI NO: 18391169 NR Description: Expressed protein
MATRVWAASAAALNPTLLPLSSSARPSRPAPSTRPSGHLRLRSRPPRPARVVCRRAKNAAFEDYKFPDSIPEFAEQETSKFREHMTWRLEQKKEQYFGKHVEDIVDVCTEVLSTFLQHEYCGPGTLLVHPFLDMKGEIKERGLPGAPQAARAPIAWAEKNIDKDWKEWDGD

SEQ ID NO: 61145 - protein, 141 aa, Triticum aestivum
  peptide (1)..(141): Ceres Seq. ID no. 12623750
LNSLEPIRRGDDRKIPERSAPGSDGDEGVGGVGGGLKPHSPPPFVFRTSEQARPLHAAERAPPTAQPPAAAGQGRVPPRQERRLRGLQVPGLHPRVRRAGDEQVQGAHDVAAGAEEGAVLREARGGHRRRLHRGLEHVLAT

SEQ ID NO: 61146 - protein, 87 aa, Triticum aestivum
  peptide (1)..(87): Ceres Seq. ID no. 12623751
  misc_feature (1)..(86): Homolog of NCBI NO: 18391169 NR Description: Expressed protein
MTWRLEQKKEQYFGKHVEDIVDVCTEVLSTFLQHEYCGPGTLLVHPFLDMKGEIKERGLPGAPQAARAPIAWAEKNIDKDWKEWDGD

SEQ ID NO: 61147 - DNA, 848 bp, Triticum aestivum
  misc_feature (1)..(848): Ceres Seq. ID no. 13598740
atgatatgacaagttgctcagatatatcccgtgaggcccttgaatgagcaatctccaattgtaaagcctggattaaactctagtatcactagaacaggagttggtgaagcagtgtcgcccaatggttcccaaaacggacagacacctttggccattttgggtctacagttatcaaagctttctataaaaaagaccagctacttcagtgacaagacagagattcaaaagtctgctactcttcttggatatgttgcacatgcggtctcccttattgcatcatatctcgatgttcctcttcgatatccactacggttgggaggttcacattcttatgttgttgatcatgccccttcagttgacccatctatagctccaggagtaagttcttctaccccttcgagcacgagcatgaggacaatggaatttcctctgttttttgaaggccaagaaacaacaagatcggcatatgctgtattcttgttaaacaaggatgtcgaacaacttctgaaccacattggcgctgaaagtcttggcccaagacatgtactagctaacctgaagcagctaacaaccattgtccagtcasaacaatacatttctgattgatttaacccaaaggaacacagttttgaatttctgagggatgatattryttgcttatggctgagtcctagtgtaacctggtgcwgtttttwscgagcrcctttcctttcccaggacagaaatgagctcaggtctccctttgctgacatgttgatgtaaacgcgtaaaycgctttctccgtgtaaaacgttrtcacttggatgtgtacakgaaatagatggatgatgataaatgagttgtagtgc

SEQ ID NO: 61148 - protein, 65 aa, Triticum aestivum
  peptide (1)..(65): Ceres Seq. ID no. 15222415
  misc_feature (1)..(27): Homolog of NCBI NO: 20197059 NR Description: hypothetical protein [Arabidopsis thaliana]
  misc_feature (1)..(27): Homolog of NCBI NO: 7486092 NR Description: hypothetical protein At2g32760 [imported] -
  misc_feature (1)..(63): Homolog of NCBI NO: 30685426 NR Description: expressed protein [Arabidopsis thaliana]
  misc_feature (60)..(60): Xaa is any aa, unknown or other
MRTMEFPLFFEGQETTRSAYAVFLLNKDVEQLLNHIGAESLGPRHVLANLKQLTTIVQSXQYISD

SEQ ID NO: 61149 - protein, 62 aa, Triticum aestivum
  peptide (1)..(62): Ceres Seq. ID no. 15222416
  misc_feature (1)..(24): Homolog of NCBI NO: 20197059 NR Description: hypothetical protein [Arabidopsis thaliana]
  misc_feature (1)..(24): Homolog of NCBI NO: 7486092 NR Description: hypothetical protein At2g32760 [imported] -
  misc_feature (1)..(60): Homolog of NCBI NO: 30685426 NR Description: expressed protein [Arabidopsis thaliana]
  misc_feature (57)..(57): Xaa is any aa, unknown or other
MEFPLFFEGQETTRSAYAVFLLNKDVEQLLNHIGAESLGPRHVLANLKQLTTIVQSXQYISD

SEQ ID NO: 61150 - protein, 40 aa, Triticum aestivum
  peptide (1)..(40): Ceres Seq. ID no. 15222417
MLHMRSPLLHHISMFLFDIHYGWEVHILMLLIMPLQLTHL

SEQ ID NO: 61151 - DNA, 1180 bp, Triticum aestivum
  misc_feature (1)..(1180): Ceres Seq. ID no. 13664220
  misc_feature: Pfam Name: Str_synth Pfam Description: Strictosidine synthase
accaaccaagcaaccgagccaaacaggctcaccttccaacagtagtatagctgccgaagcaaatcaacatggcgagtggcacgagggatctcggcgtggcgcttgctgtcctgctcctgctgttcatgttcggggcctccgccgctgccgcggtcgtccccagcatcgacgccacgcggacccgccacctgccgctgccgcctggactgctgcgcggcccggagagcgtcgccttcgacgccaaaggcaacggcccatacagcggcgtctccgacggccgcgtcctcaagtggaacggcgacaggctcggctggacgacgtacacttacagccctggatacagcagcgaggcgtgcacggcgtccgtccgccgccccgagaccgtgaccgagagccgctgcggccgtccgctgggcctacggtttcacctcaagtctggctacttgtacatagccgacgcctacaaggggctcatgagggtcgcgccaggaggtggggaggcgacggtgcttgtgacggaggccgatggcgctcctctccgtttcaccaacggcgtggacgtcgaccaggtgaccggtgaagtctacttcaccgacagctctatgaaatatcaaaggtcacaacacgagatggtaacaagaaccggggactcgacaggccgcctaatgagatatgatccacgcacaggaaaagtgattgtgctaaaggccggcatcacttaccccaatggtctcgccatcagcgttgaccggacacacctcgtcatctcatcgaccgggccgtgcaagttgttgaggtactggaccaaaggtcccaagacaggcacgatcgaactgttaactgatctaccgggctatcctgataatgtgagcccggataagagaggaggatactgggtggcattacatcatgagaagacagagctcccctttgacgttgatagccatctacttgccttgaggatcaatgctgatggaaaaataatcgaggagatgagaggacccaaaggcatgaggccgacagaggtggtggaacggacaggcggtagactatttgtgggatccgtcgagctttcttatgtggccgtggccacccgcaaatagagattaatttaagttctgtaaaggatttgcattgagcatgctctttttttcaatgtcatgttctgcttttctttccc

SEQ ID NO: 61152 - protein, 344 aa, Triticum aestivum
  peptide (1)..(344): Ceres Seq. ID no. 15220299
  misc_feature: Pfam Name: Str_synth Pfam Description: Strictosidine synthase
  misc_feature (50)..(279): Homolog of NCBI NO: 15231703 NR Description: strictosidine synthase-related [Arabidopsis
  misc_feature (50)..(283): Homolog of NCBI NO: 30694556 NR Description: strictosidine synthase-related [Arabidopsis
  misc_feature (50)..(283): Homolog of NCBI NO: 11280567 NR Description: hypothetical protein F24I3.110 - Arabidopsis
  misc_feature (31)..(279): Homolog of NCBI NO: 34902140 NR Description: putative male fertility protein
  misc_feature (31)..(279): Homolog of NCBI NO: 14028757 NR Description: male fertility protein [Zea mays]
  misc_feature (15)..(340): Homolog of NCBI NO: 40253286 NR Description: putative male fertility protein
  misc_feature (103)..(340): Homolog of NCBI NO: 34395249 NR Description: putative strictosidine synthase
  misc_feature (103)..(340): Homolog of NCBI NO: 34395252 NR Description: putative strictosidine synthase-related
  misc_feature (10)..(333): Homolog of NCBI NO: 34393255 NR Description: putative male fertility protein
  misc_feature (10)..(340): Homolog of NCBI NO: 34395247 NR Description: putative strictosidine synthase
MASGTRDLGVALAVLLLLFMFGASAAAAVVPSIDATRTRHLPLPPGLLRGPESVAFDAKGNGPYSGVSDGRVLKWNGDRLGWTTYTYSPGYSSEACTASVRRPETVTESRCGRPLGLRFHLKSGYLYIADAYKGLMRVAPGGGEATVLVTEADGAPLRFTNGVDVDQVTGEVYFTDSSMKYQRSQHEMVTRTGDSTGRLMRYDPRTGKVIVLKAGITYPNGLAISVDRTHLVISSTGPCKLLRYWTKGPKTGTIELLTDLPGYPDNVSPDKRGGYWVALHHEKTELPFDVDSHLLALRINADGKIIEEMRGPKGMRPTEVVERTGGRLFVGSVELSYVAVATRK

SEQ ID NO: 61153 - protein, 325 aa, Triticum aestivum
  peptide (1)..(325): Ceres Seq. ID no. 15220300
  misc_feature: Pfam Name: Str_synth Pfam Description: Strictosidine synthase
  misc_feature (31)..(260): Homolog of NCBI NO: 15231703 NR Description: strictosidine synthase-related [Arabidopsis
  misc_feature (31)..(264): Homolog of NCBI NO: 30694556 NR Description: strictosidine synthase-related [Arabidopsis
  misc_feature (31)..(264): Homolog of NCBI NO: 11280567 NR Description: hypothetical protein F24I3.110 - Arabidopsis
  misc_feature (12)..(260): Homolog of NCBI NO: 34902140 NR Description: putative male fertility protein
  misc_feature (12)..(260): Homolog of NCBI NO: 14028757 NR Description: male fertility protein [Zea mays]
  misc_feature (1)..(321): Homolog of NCBI NO: 40253286 NR Description: putative male fertility protein
  misc_feature (84)..(321): Homolog of NCBI NO: 34395249 NR Description: putative strictosidine synthase
  misc_feature (84)..(321): Homolog of NCBI NO: 34395252 NR Description: putative strictosidine synthase-related
  misc_feature (1)..(314): Homolog of NCBI NO: 34393255 NR Description: putative male fertility protein
  misc_feature (1)..(321): Homolog of NCBI NO: 34395247 NR Description: putative strictosidine synthase
MFGASAAAAVVPSIDATRTRHLPLPPGLLRGPESVAFDAKGNGPYSGVSDGRVLKWNGDRLGWTTYTYSPGYSSEACTASVRRPETVTESRCGRPLGLRFHLKSGYLYIADAYKGLMRVAPGGGEATVLVTEADGAPLRFTNGVDVDQVTGEVYFTDSSMKYQRSQHEMVTRTGDSTGRLMRYDPRTGKVIVLKAGITYPNGLAISVDRTHLVISSTGPCKLLRYWTKGPKTGTIELLTDLPGYPDNVSPDKRGGYWVALHHEKTELPFDVDSHLLALRINADGKIIEEMRGPKGMRPTEVVERTGGRLFVGSVELSYVAVATRK

SEQ ID NO: 61154 - protein, 209 aa, Triticum aestivum
  peptide (1)..(209): Ceres Seq. ID no. 15220301
  misc_feature: Pfam Name: Str_synth Pfam Description: Strictosidine synthase
  misc_feature (1)..(144): Homolog of NCBI NO: 15231703 NR Description: strictosidine synthase-related [Arabidopsis
  misc_feature (1)..(148): Homolog of NCBI NO: 30694556 NR Description: strictosidine synthase-related [Arabidopsis
  misc_feature (1)..(148): Homolog of NCBI NO: 11280567 NR Description: hypothetical protein F24I3.110 - Arabidopsis
  misc_feature (1)..(144): Homolog of NCBI NO: 34902140 NR Description: putative male fertility protein
  misc_feature (1)..(144): Homolog of NCBI NO: 14028757 NR Description: male fertility protein [Zea mays]
  misc_feature (1)..(205): Homolog of NCBI NO: 40253286 NR Description: putative male fertility protein
  misc_feature (1)..(205): Homolog of NCBI NO: 34395249 NR Description: putative strictosidine synthase
  misc_feature (1)..(205): Homolog of NCBI NO: 34395252 NR Description: putative strictosidine synthase-related
  misc_feature (1)..(198): Homolog of NCBI NO: 34393255 NR Description: putative male fertility protein
  misc_feature (1)..(205): Homolog of NCBI NO: 34395247 NR Description: putative strictosidine synthase
MRVAPGGGEATVLVTEADGAPLRFTNGVDVDQVTGEVYFTDSSMKYQRSQHEMVTRTGDSTGRLMRYDPRTGKVIVLKAGITYPNGLAISVDRTHLVISSTGPCKLLRYWTKGPKTGTIELLTDLPGYPDNVSPDKRGGYWVALHHEKTELPFDVDSHLLALRINADGKIIEEMRGPKGMRPTEVVERTGGRLFVGSVELSYVAVATRK

SEQ ID NO: 61155 - DNA, 1065 bp, Triticum aestivum
  misc_feature (1)..(1065): Ceres Seq. ID no. 13661928
accattattgttgttctgccagcggcatatacggagggagggagctccaccgtcccctgtttcccaccccctcccctgtcccattcgacaaaacacgccaagcacgcgcaccgaatccatcgcccgagcaagcgaagcagacgccacctgccctgcccagaccgccgcccaccgtctcccaggagctcagaggcgccaccaagaaccgcacggaagagagcggatcgatggcgatggccggcggagccccgccggcgccgctgccggtggtggggcaccagttctgcgcgccctacgtggtgccgctgacggtgaccaagaaggcgctcagcctctccgacggcgacttcgccatcacggacgccaacggcgccgtcgtgctcaaggtcaagggcgccatcttcagcatccggagccgccgcaccatcctcgacggcgccgggatgcccctcctcaccatgcaggaaaaggtgttcagcatgcaccaccgatgggaggttttcagaggggacagcaccaacgcaggtgacctgctcttcaccgtgaagacaacttcgctgatccaactcaagaccgagatggatgtcttcttggcagggaacaccgcgcagcaggtctgcgacttcaagatcaagggcagctacttcgacaggtcctgcgtcttctaccttggcgactccaacaacatggtagctcaaatgagccgtaaactgactgtttccaatgtgctgctggggagggacacgttcagtgtgaccgtgttcccgcacgtcgactacgtgttcatcgcgagccttgttgtgatcctggatgaggttcacagggacaagcgcgacgattgatgagtgagttatatacgctcctcgatcctaagcgttcctggagttctactactgtcgtgtcatctcaagttgatatgttgtcactgtaagtcactggtgttatctgcatttcttgtagcattatgcgtgcatggtgagccatgctgaattgtgatgttgtggaataatgttcatgcaccttacatttgatccctggcctgccagtgtatcattcgtatttact

SEQ ID NO: 61156 - protein, 279 aa, Triticum aestivum
  peptide (1)..(279): Ceres Seq. ID no. 13661929
  misc_feature (89)..(268): Pfam Name: Protein of unknown function (DUF567) Pfam Description: Protein of unknown function (DUF567)
  misc_feature (87)..(273): Homolog of NCBI NO: 15228906 NR Description: hypothetical protein [Arabidopsis thaliana]
  misc_feature (82)..(235): Homolog of NCBI NO: 25352417 NR Description: hypothetical protein T3M13.14 - Arabidopsis
  misc_feature (74)..(233): Homolog of NCBI NO: 21553506 NR Description: unknown [Arabidopsis thaliana]
  misc_feature (74)..(233): Homolog of NCBI NO: 18413737 NR Description: expressed protein [Arabidopsis thaliana]
  misc_feature (89)..(269): Homolog of NCBI NO: 15217694 NR Description: hypothetical protein [Arabidopsis thaliana]
  misc_feature (82)..(269): Homolog of NCBI NO: 9665105 NR Description: Hypothetical protein [Arabidopsis thaliana]
  misc_feature (86)..(274): Homolog of NCBI NO: 15225960 NR Description: expressed protein [Arabidopsis thaliana]
  misc_feature (86)..(274): Homolog of NCBI NO: 17979321 NR Description: unknown protein [Arabidopsis thaliana]
  misc_feature (74)..(277): Homolog of NCBI NO: 30679390 NR Description: expressed protein [Arabidopsis thaliana]
  misc_feature (78)..(278): Homolog of NCBI NO: 27818079 NR Description: OSJNBa0086N05.7 [Oryza sativa (japonica
HYCCSASGIYGGRELHRPLFPTPSPVPFDKTRQARAPNPSPEQAKQTPPALPRPPPTVSQELRGATKNRTEESGSMAMAGGAPPAPLPVVGHQFCAPYVVPLTVTKKALSLSDGDFAITDANGAVVLKVKGAIFSIRSRRTILDGAGMPLLTMQEKVFSMHHRWEVFRGDSTNAGDLLFTVKTTSLIQLKTEMDVFLAGNTAQQVCDFKIKGSYFDRSCVFYLGDSNNMVAQMSRKLTVSNVLLGRDTFSVTVFPHVDYVFIASLVVILDEVHRDKRDD

SEQ ID NO: 61157 - protein, 204 aa, Triticum aestivum
  peptide (1)..(204): Ceres Seq. ID no. 13661930
  misc_feature (14)..(193): Pfam Name: Protein of unknown function (DUF567) Pfam Description: Protein of unknown function (DUF567)
  misc_feature (12)..(198): Homolog of NCBI NO: 15228906 NR Description: hypothetical protein [Arabidopsis thaliana]
  misc_feature (7)..(160): Homolog of NCBI NO: 25352417 NR Description: hypothetical protein T3M13.14 - Arabidopsis
  misc_feature (1)..(158): Homolog of NCBI NO: 21553506 NR Description: unknown [Arabidopsis thaliana]
  misc_feature (1)..(158): Homolog of NCBI NO: 18413737 NR Description: expressed protein [Arabidopsis thaliana]
  misc_feature (14)..(194): Homolog of NCBI NO: 15217694 NR Description: hypothetical protein [Arabidopsis thaliana]
  misc_feature (7)..(194): Homolog of NCBI NO: 9665105 NR Description: Hypothetical protein [Arabidopsis thaliana]
  misc_feature (11)..(199): Homolog of NCBI NO: 15225960 NR Description: expressed protein [Arabidopsis thaliana]
  misc_feature (11)..(199): Homolog of NCBI NO: 17979321 NR Description: unknown protein [Arabidopsis thaliana]
  misc_feature (1)..(202): Homolog of NCBI NO: 30679390 NR Description: expressed protein [Arabidopsis thaliana]
  misc_feature (3)..(203): Homolog of NCBI NO: 27818079 NR Description: OSJNBa0086N05.7 [Oryza sativa (japonica
MAMAGGAPPAPLPVVGHQFCAPYVVPLTVTKKALSLSDGDFAITDANGAVVLKVKGAIFSIRSRRTILDGAGMPLLTMQEKVFSMHHRWEVFRGDSTNAGDLLFTVKTTSLIQLKTEMDVFLAGNTAQQVCDFKIKGSYFDRSCVFYLGDSNNMVAQMSRKLTVSNVLLGRDTFSVTVFPHVDYVFIASLVVILDEVHRDKRDD

SEQ ID NO: 61158 - protein, 202 aa, Triticum aestivum
  peptide (1)..(202): Ceres Seq. ID no. 13661931
  misc_feature (12)..(191): Pfam Name: Protein of unknown function (DUF567) Pfam Description: Protein of unknown function (DUF567)
  misc_feature (10)..(196): Homolog of NCBI NO: 15228906 NR Description: hypothetical protein [Arabidopsis thaliana]
  misc_feature (5)..(158): Homolog of NCBI NO: 25352417 NR Description: hypothetical protein T3M13.14 - Arabidopsis
  misc_feature (1)..(156): Homolog of NCBI NO: 21553506 NR Description: unknown [Arabidopsis thaliana]
  misc_feature (1)..(156): Homolog of NCBI NO: 18413737 NR Description: expressed protein [Arabidopsis thaliana]
  misc_feature (12)..(192): Homolog of NCBI NO: 15217694 NR Description: hypothetical protein [Arabidopsis thaliana]
  misc_feature (5)..(192): Homolog of NCBI NO: 9665105 NR Description: Hypothetical protein [Arabidopsis thaliana]
  misc_feature (9)..(197): Homolog of NCBI NO: 15225960 NR Description: expressed protein [Arabidopsis thaliana]
  misc_feature (9)..(197): Homolog of NCBI NO: 17979321 NR Description: unknown protein [Arabidopsis thaliana]
  misc_feature (1)..(200): Homolog of NCBI NO: 30679390 NR Description: expressed protein [Arabidopsis thaliana]
  misc_feature (1)..(201): Homolog of NCBI NO: 27818079 NR Description: OSJNBa0086N05.7 [Oryza sativa (japonica
MAGGAPPAPLPVVGHQFCAPYVVPLTVTKKALSLSDGDFAITDANGAVVLKVKGAIFSIRSRRTILDGAGMPLLTMQEKVFSMHHRWEVFRGDSTNAGDLLFTVKTTSLIQLKTEMDVFLAGNTAQQVCDFKIKGSYFDRSCVFYLGDSNNMVAQMSRKLTVSNVLLGRDTFSVTVFPHVDYVFIASLVVILDEVHRDKRDD

SEQ ID NO: 61159 - DNA, 1155 bp, Triticum aestivum
  misc_feature (1)..(1155): Ceres Seq. ID no. 14301506
gtcactctcctctcctctgactcgtactctgcacagcttccccccacagaaaacaatcatggttaaaggtccaggactctacaccgaaatcggcaaaaaggccagagatcttctctacaaggactaccaaggagaccagaagctcagcgtcaccacttactcttccaccggcgttgcaatcaccaccactggaacaaacaagggagacttgtttgttggtgatgtaactacccaagtcaagaacaagaacttcactgccgatatcaaagtcgccactgattcttctctgctgaccacctttacctatgatgaggctacccctggattgaaggcaatcgtcagcgccaaggtgcctgatcagaaatctggcaaggttgagctccagtatctgcacgactatgctggtatctgcaccagtgttggtttgacagctagccccattgtcaatttctccggcgtggttggaaacaacgtcttggctcttggtaccgatgtgtccttcaacacccagtctggtgatttcaagcatttcaacgctggtttcagcttcaccaaggacgatctgattgctgcccttactctgaatgacaaaggtgacaaactgaatgcatcgtactaccacattgtgaacccgttgagcaacacagtggttggagctgaggttacccacagcttcacgactcaaaagaacgccattaccgttggtgctcagcatgctcttgacccattgacgacattgaaggcacgcgtgaacaatgatggtgtagctaacgcgctgatccagcaccagtggcgtccaaagtcgttcatcaccgtttctggagaggttaactccagggcgattgagaagggtgccaaggttgggtttgctcttgctctcaagccttgagaaagaatcaagaatccaaatgtgcccttgaggaggggtagcttagtttttttttcatcttctcggtcttctaatcttttggactaatctctctgcctggttttgctttaaaaatctttcatttgttgttttgttttaatcggtgttgggatttgtagaaaataagaaaaaaaaactattaaaaggatcgtcttgaagatgaaccgtacgaatctctttcctaattatttgtctcaatgctctgctaaaacactctgttcaattcg

SEQ ID NO: 61160 - protein, 295 aa, Triticum aestivum
  peptide (1)..(295): Ceres Seq. ID no. 14301507
  misc_feature (23)..(288): Pfam Name: Eukaryotic porin Pfam Description: Eukaryotic porin
  misc_feature (20)..(295): Homolog of NCBI NO: 7442952 NR Description: voltage-dependent anion channel protein - spinach
  misc_feature (20)..(295): Homolog of NCBI NO: 21593558 NR Description: putative porin [Arabidopsis thaliana]
  misc_feature (20)..(295): Homolog of NCBI NO: 15232074 NR Description: porin -related [Arabidopsis thaliana]
  misc_feature (20)..(295): Homolog of NCBI NO: 5031279 NR Description: porin [Prunus armeniaca]
  misc_feature (20)..(295): Homolog of NCBI NO: 1172555 NR Description: 34 kDa outer mitochondrial membrane protein porin
  misc_feature (20)..(295): Homolog of NCBI NO: 36957183 NR Description: VDAC1.2 [Lotus corniculatus var. japonicus]
  misc_feature (20)..(295): Homolog of NCBI NO: 7442953 NR Description: porin - common ice plant
  misc_feature (20)..(295): Homolog of NCBI NO: 36957170 NR Description: VDAC1.1 [Lotus corniculatus var. japonicus]
  misc_feature (20)..(295): Homolog of NCBI NO: 15242210 NR Description: voltage-dependent anion-selective channel protein
  misc_feature (20)..(295): Homolog of NCBI NO: 21553387 NR Description: voltage-dependent anion-selective channel protein
SLSSPLTRTLHSFPPQKTIMVKGPGLYTEIGKKARDLLYKDYQGDQKLSVTTYSSTGVAITTTGTNKGDLFVGDVTTQVKNKNFTADIKVATDSSLLTTFTYDEATPGLKAIVSAKVPDQKSGKVELQYLHDYAGICTSVGLTASPIVNFSGVVGNNVLALGTDVSFNTQSGDFKHFNAGFSFTKDDLIAALTLNDKGDKLNASYYHIVNPLSNTVVGAEVTHSFTTQKNAITVGAQHALDPLTTLKARVNNDGVANALIQHQWRPKSFITVSGEVNSRAIEKGAKVGFALALKP

SEQ ID NO: 61161 - protein, 276 aa, Triticum aestivum
  peptide (1)..(276): Ceres Seq. ID no. 14301508
  misc_feature (4)..(269): Pfam Name: Eukaryotic porin Pfam Description: Eukaryotic porin
  misc_feature (1)..(276): Homolog of NCBI NO: 7442952 NR Description: voltage-dependent anion channel protein - spinach
  misc_feature (1)..(276): Homolog of NCBI NO: 21593558 NR Description: putative porin [Arabidopsis thaliana]
  misc_feature (1)..(276): Homolog of NCBI NO: 15232074 NR Description: porin -related [Arabidopsis thaliana]
  misc_feature (1)..(276): Homolog of NCBI NO: 5031279 NR Description: porin [Prunus armeniaca]
  misc_feature (1)..(276): Homolog of NCBI NO: 1172555 NR Description: 34 kDa outer mitochondrial membrane protein porin
  misc_feature (1)..(276): Homolog of NCBI NO: 36957183 NR Description: VDAC1.2 [Lotus corniculatus var. japonicus]
  misc_feature (1)..(276): Homolog of NCBI NO: 7442953 NR Description: porin - common ice plant
  misc_feature (1)..(276): Homolog of NCBI NO: 36957170 NR Description: VDAC1.1 [Lotus corniculatus var. japonicus]
  misc_feature (1)..(276): Homolog of NCBI NO: 15242210 NR Description: voltage-dependent anion-selective channel protein
  misc_feature (1)..(276): Homolog of NCBI NO: 21553387 NR Description: voltage-dependent anion-selective channel protein
MVKGPGLYTEIGKKARDLLYKDYQGDQKLSVTTYSSTGVAITTTGTNKGDLFVGDVTTQVKNKNFTADIKVATDSSLLTTFTYDEATPGLKAIVSAKVPDQKSGKVELQYLHDYAGICTSVGLTASPIVNFSGVVGNNVLALGTDVSFNTQSGDFKHFNAGFSFTKDDLIAALTLNDKGDKLNASYYHIVNPLSNTVVGAEVTHSFTTQKNAITVGAQHALDPLTTLKARVNNDGVANALIQHQWRPKSFITVSGEVNSRAIEKGAKVGFALALKP

SEQ ID NO: 61162 - DNA, 978 bp, Triticum aestivum
  misc_feature (1)..(978): Ceres Seq. ID no. 12627370
agattagataattagggatttgaaaccagcatccctaaaatggagattacggagcggagggacgatgagatcagagacgcaaaagaatccgcaaacattgacaccatcaagtcgcagtatgtcaccgactctttttccgatgaacgctactctcgcgagctcaaggatggtcttcatcctctacggtacaagtttgcgatttggtacacacgtcgaacacctggggtcaggagccagacttcttacgaggataacattaagaagattgttgaattcagcactgttgaagggttttgggccagttactgtcaccttgctcgttcttctctcttgcctaacccaacagaccttcatttcttcaaggatgggattcgccccttgtgggaggatggtgccaactgcaatggaggaaagtggatcatacgtttctccaaagttgtctctgctcgcttctgggaggatctgcttcttgcgttggtaggcgaccagcttgatgatgctgaaaacatttgtggggcagtgctgagtgtccgcatcaatgaggacatcattagtgtatggaatcgcaatgcttctgatcatcaggcagtgatggggttgagagactcaatcaagcgccacttgaagctgcctcatgcttatgtgatggagtacaagcctcacgatgcttctcttcgcgataactcatcctacagaaacacatggagaggataggctcaaagtggactattgtatcacttgaggtgttaaaagattcggaagctctcctgcaacctaggatgatatatggattgaaccttgtttctggtagcgtactgtatcaatggcttacaatctcagcaatgaaaaatcctggctacttctgcaacagtagtttattaagtcgttttatggtttctaaatcttcttgctaccttcaatggtttgtgtcttgtttaaaactctattgtttcatttttcaaaagaaaacttgagctc

SEQ ID NO: 61163 - protein, 224 aa, Triticum aestivum
  peptide (1)..(224): Ceres Seq. ID no. 12627371
  misc_feature (46)..(213): Homolog of NCBI NO: 3201958 NR Description: eIF4E-like protein 4E-LP [Mus musculus]
  misc_feature (46)..(213): Homolog of NCBI NO: 34877568 NR Description: similar to eukaryotic translation initiation
  misc_feature (46)..(213): Homolog of NCBI NO: 12653185 NR Description: EIF4EL3 protein [Homo sapiens]
  misc_feature (46)..(213): Homolog of NCBI NO: 29839292 NR Description: Eukaryotic translation initiation factor 4E type (eIF-4E type 3) (eIF4E type 3) (mRNA cap-binding protein type 3) translation initiation factor 4E-like 3) (eIF4E-like protein
  misc_feature (46)..(213): Homolog of NCBI NO: 4757702 NR Description: eukaryotic translation initiation factor 4E-like 3
  misc_feature (46)..(213): Homolog of NCBI NO: 3329384 NR Description: translation initiation factor 4e [Homo sapiens]
  misc_feature (44)..(221): Homolog of NCBI NO: 37590370 NR Description: Unknown (protein for MGC:73242) [Danio rerio]
  misc_feature (46)..(221): Homolog of NCBI NO: 13624327 NR Description: RIKEN cDNA 2700069E09; DNA segment, human
  misc_feature (1)..(224): Homolog of NCBI NO: 15238740 NR Description: eukaryotic cap-binding protein (gb|AAC17220.1)
  misc_feature (1)..(224): Homolog of NCBI NO: 25453555 NR Description: eukaryotic cap-binding protein [imported] -
MEITERRDDEIRDAKESANIDTIKSQYVTDSFSDERYSRELKDGLHPLRYKFAIWYTRRTPGVRSQTSYEDNIKKIVEFSTVEGFWASYCHLARSSLLPNPTDLHFFKDGIRPLWEDGANCNGGKWIIRFSKVVSARFWEDLLLALVGDQLDDAENICGAVLSVRINEDIISVWNRNASDHQAVMGLRDSIKRHLKLPHAYVMEYKPHDASLRDNSSYRNTWRG

SEQ ID NO: 61164 - protein, 138 aa, Triticum aestivum
  peptide (1)..(138): Ceres Seq. ID no. 12627372
MRSETQKNPQTLTPSSRSMSPTLFPMNATLASSRMVFILYGTSLRFGTHVEHLGSGARLLTRITLRRLLNSALLKGFGPVTVTLLVLLSCLTQQTFISSRMGFAPCGRMVPTAMEESGSYVSPKLSLLASGRICFLRW

SEQ ID NO: 61165 - protein, 120 aa, Triticum aestivum
  peptide (1)..(120): Ceres Seq. ID no. 12627373
MSPTLFPMNATLASSRMVFILYGTSLRFGTHVEHLGSGARLLTRITLRRLLNSALLKGFGPVTVTLLVLLSCLTQQTFISSRMGFAPCGRMVPTAMEESGSYVSPKLSLLASGRICFLRW

SEQ ID NO: 61166 - DNA, 799 bp, Triticum aestivum
  misc_feature (1)..(799): Ceres Seq. ID no. 13664228
acctagaacatcctaatcgaaaaatcagaagaagaagtatctttgttttcgctctcttcttctactttcgatctttgacgattagaaaaggaaagtgatggctgccgttaatgggtaccaaggaaacactccggcggcgtcaaagcaatctgctcctccgactaagactgttgatagccaatctgttctcaaaaggctgcaatctgaactaatgggcttgatgatgggtggtgacccgggaatatcggctttcccagaggaagacaacatattctgttggaaagggacaataacaggaagcaaagatactgtgtttgaaggaactgagtacagactctcactctctttctccaatgactatcctttcaagcctcctaagatcaagttccacactggttgcttccaccccaatgttgatctctacggcaatatctgtttggacattcttcaggataaatggtcgtctgcatacgatgtcaggacaatactactatcgattcagagccttttgggagaaccgaacatcagctcaccattgaacactcaagcagcgcagctctggagcaaccaagaagagtataggaagatggttgagaagctctacaagcctcccagtgcatgatagcttcaggatgtgtcattcctttgctctacaatttgtttctgatcatcaacagttttatctgtagcagtttgtgtcattcatttgctctataatttgtttctgatcttcaacagttttacctgagccaaatattgatattgatgtgagcttttcaaaaattaatcagaatgatcc

SEQ ID NO: 61167 - protein, 174 aa, Triticum aestivum
  peptide (1)..(174): Ceres Seq. ID no. 13664229
  misc_feature (15)..(170): Homolog of NCBI NO: 24663332 NR Description: vihar CG10682-PA [Drosophila melanogaster]
  misc_feature (1)..(170): Homolog of NCBI NO: 31216813 NR Description: ENSANGP00000020629 [Anopheles gambiae]
  misc_feature (22)..(170): Homolog of NCBI NO: 4388942 NR Description: E2-C, An Ubiquitin Conjugating Enzyme Required
  misc_feature (8)..(170): Homolog of NCBI NO: 3915196 NR Description: Ubiquitin-conjugating enzyme E2-C
  misc_feature (9)..(171): Homolog of NCBI NO: 34903234 NR Description: unnamed protein product [Oryza sativa (japonica
  misc_feature (30)..(174): Homolog of NCBI NO: 9454557 NR Description: Putative ubiquitin carrier protein [Arabidopsis
  misc_feature (15)..(174): Homolog of NCBI NO: 25293673 NR Description: hypothetical protein F17J6.3 [imported] -
  misc_feature (1)..(174): Homolog of NCBI NO: 18402475 NR Description: ubiquitin-conjugating enzyme (UBC19) [Arabidopsis
  misc_feature (1)..(174): Homolog of NCBI NO: 21618179 NR Description: E2, ubiquitin-conjugating enzyme, putative
  misc_feature (1)..(174): Homolog of NCBI NO: 18403097 NR Description: ubiquitin-conjugating enzyme (UBC20) [Arabidopsis
MAAVNGYQGNTPAASKQSAPPTKTVDSQSVLKRLQSELMGLMMGGDPGISAFPEEDNIFCWKGTITGSKDTVFEGTEYRLSLSFSNDYPFKPPKIKFHTGCFHPNVDLYGNICLDILQDKWSSAYDVRTILLSIQSLLGEPNISSPLNTQAAQLWSNQEEYRKMVEKLYKPPSA

SEQ ID NO: 61168 - protein, 136 aa, Triticum aestivum
  peptide (1)..(136): Ceres Seq. ID no. 13664230
  misc_feature (1)..(132): Homolog of NCBI NO: 24663332 NR Description: vihar CG10682-PA [Drosophila melanogaster]
  misc_feature (1)..(132): Homolog of NCBI NO: 31216813 NR Description: ENSANGP00000020629 [Anopheles gambiae]
  misc_feature (1)..(132): Homolog of NCBI NO: 4388942 NR Description: E2-C, An Ubiquitin Conjugating Enzyme Required
  misc_feature (1)..(132): Homolog of NCBI NO: 3915196 NR Description: Ubiquitin-conjugating enzyme E2-C
  misc_feature (1)..(133): Homolog of NCBI NO: 34903234 NR Description: unnamed protein product [Oryza sativa (japonica
  misc_feature (1)..(136): Homolog of NCBI NO: 9454557 NR Description: Putative ubiquitin carrier protein [Arabidopsis
  misc_feature (1)..(136): Homolog of NCBI NO: 25293673 NR Description: hypothetical protein F17J6.3 [imported] -
  misc_feature (1)..(136): Homolog of NCBI NO: 18402475 NR Description: ubiquitin-conjugating enzyme (UBC19) [Arabidopsis
  misc_feature (1)..(136): Homolog of NCBI NO: 21618179 NR Description: E2, ubiquitin-conjugating enzyme, putative
  misc_feature (1)..(136): Homolog of NCBI NO: 18403097 NR Description: ubiquitin-conjugating enzyme (UBC20) [Arabidopsis
MGLMMGGDPGISAFPEEDNIFCWKGTITGSKDTVFEGTEYRLSLSFSNDYPFKPPKIKFHTGCFHPNVDLYGNICLDILQDKWSSAYDVRTILLSIQSLLGEPNISSPLNTQAAQLWSNQEEYRKMVEKLYKPPSA

SEQ ID NO: 61169 - protein, 133 aa, Triticum aestivum
  peptide (1)..(133): Ceres Seq. ID no. 13664231
  misc_feature (1)..(129): Homolog of NCBI NO: 24663332 NR Description: vihar CG10682-PA [Drosophila melanogaster]
  misc_feature (1)..(129): Homolog of NCBI NO: 31216813 NR Description: ENSANGP00000020629 [Anopheles gambiae]
  misc_feature (1)..(129): Homolog of NCBI NO: 4388942 NR Description: E2-C, An Ubiquitin Conjugating Enzyme Required
  misc_feature (1)..(129): Homolog of NCBI NO: 3915196 NR Description: Ubiquitin-conjugating enzyme E2-C
  misc_feature (1)..(130): Homolog of NCBI NO: 34903234 NR Description: unnamed protein product [Oryza sativa (japonica
  misc_feature (1)..(133): Homolog of NCBI NO: 9454557 NR Description: Putative ubiquitin carrier protein [Arabidopsis
  misc_feature (1)..(133): Homolog of NCBI NO: 25293673 NR Description: hypothetical protein F17J6.3 [imported] -
  misc_feature (1)..(133): Homolog of NCBI NO: 18402475 NR Description: ubiquitin-conjugating enzyme (UBC19) [Arabidopsis
  misc_feature (1)..(133): Homolog of NCBI NO: 21618179 NR Description: E2, ubiquitin-conjugating enzyme, putative
  misc_feature (1)..(133): Homolog of NCBI NO: 18403097 NR Description: ubiquitin-conjugating enzyme (UBC20) [Arabidopsis
MMGGDPGISAFPEEDNIFCWKGTITGSKDTVFEGTEYRLSLSFSNDYPFKPPKIKFHTGCFHPNVDLYGNICLDILQDKWSSAYDVRTILLSIQSLLGEPNISSPLNTQAAQLWSNQEEYRKMVEKLYKPPSA

SEQ ID NO: 61170 - DNA, 884 bp, Triticum aestivum
  misc_feature (1)..(884): Ceres Seq. ID no. 13661939
cctagaacatcctaatcgaaaagattaagattcactttttattccgatagatcagattcatttcctgaatctgttatataaaattctttctaaagaggaagaaatctcacggttccaacaggaaaaatgggttctgaacagaatgatagcacgagcttcacacaatcatcagagccgaaactttgtgcaaacggatgtggtttctttggttcgccatcaaacatggatctgtgttcgaaatgctaccgagacatatgcgcagaggaagctcaaacagctgttgcaaaagctgccgttgagaaatctttcaagccatcgccatcgcctcctcctcctaccctcttcatagcagagcctgatgtggcgaaaccagagaaagaaaaggcggttgctactgttcttgtggtggccgagccatcttctgcaacaggagaagctacagttcctgaacagaacgaaccaccatctaaacctgcacggccgaaccggtgcctttgttgcaacaagaaggttggtatacttgggtttaagtgcaaatgcgggagcactttctgcggcgaacatcggtaccctgagagacatgattgcagctttgatttcaaagaagctgggcgtggagagattgcaaaagccaatccggttattaaagctgataaacttcaaaggttctgagaaaggctacggtgttggtctctcttttcttttatctcaaattgtatttgaatggaattgggtttctactagtggattgtttccaaaggggggtaacatgatgaatttggttctttaataaactcagtcatctctatttcatgctattcaggtacggattataatctttgtgggtaacttgtaaaatcaatttatcaaagcttcttttggcc

SEQ ID NO: 61171 - protein, 181 aa, Triticum aestivum
  peptide (1)..(181): Ceres Seq. ID no. 15220147
  misc_feature (122)..(162): Pfam Name: AN1-like Zinc finger Pfam Description: AN1-like Zinc finger
  misc_feature (6)..(180): Homolog of NCBI NO: 25082726 NR Description: expressed protein [Arabidopsis thaliana]
  misc_feature (6)..(180): Homolog of NCBI NO: 18403408 NR Description: expressed protein [Arabidopsis thaliana]
  misc_feature (18)..(180): Homolog of NCBI NO: 14596167 NR Description: zinc finger-like protein [Arabidopsis thaliana]
  misc_feature (16)..(180): Homolog of NCBI NO: 15225894 NR Description: zinc finger protein -related [Arabidopsis
  misc_feature (18)..(180): Homolog of NCBI NO: 18404102 NR Description: expressed protein [Arabidopsis thaliana]
  misc_feature (18)..(180): Homolog of NCBI NO: 15231686 NR Description: zinc finger - like protein [Arabidopsis thaliana]
  misc_feature (1)..(180): Homolog of NCBI NO: 15221329 NR Description: expressed protein [Arabidopsis thaliana]
  misc_feature (1)..(180): Homolog of NCBI NO: 8778645 NR Description: F5O11.17 [Arabidopsis thaliana]
  misc_feature (1)..(180): Homolog of NCBI NO: 15234402 NR Description: expressed protein [Arabidopsis thaliana]
  misc_feature (1)..(181): Homolog of NCBI NO: 15235819 NR Description: zinc finger -related protein [Arabidopsis
MGSEQNDSTSFTQSSEPKLCANGCGFFGSPSNMDLCSKCYRDICAEEAQTAVAKAAVEKSFKPSPSPPPPTLFIAEPDVAKPEKEKAVATVLVVAEPSSATGEATVPEQNEPPSKPARPNRCLCCNKKVGILGFKCKCGSTFCGEHRYPERHDCSFDFKEAGRGEIAKANPVIKADKLQRF

SEQ ID NO: 61172 - protein, 149 aa, Triticum aestivum
  peptide (1)..(149): Ceres Seq. ID no. 15220148
  misc_feature (90)..(130): Pfam Name: AN1-like Zinc finger Pfam Description: AN1-like Zinc finger
  misc_feature (1)..(148): Homolog of NCBI NO: 25082726 NR Description: expressed protein [Arabidopsis thaliana]
  misc_feature (1)..(148): Homolog of NCBI NO: 18403408 NR Description: expressed protein [Arabidopsis thaliana]
  misc_feature (1)..(148): Homolog of NCBI NO: 14596167 NR Description: zinc finger-like protein [Arabidopsis thaliana]
  misc_feature (1)..(148): Homolog of NCBI NO: 15225894 NR Description: zinc finger protein -related [Arabidopsis
  misc_feature (1)..(148): Homolog of NCBI NO: 18404102 NR Description: expressed protein [Arabidopsis thaliana]
  misc_feature (1)..(148): Homolog of NCBI NO: 15231686 NR Description: zinc finger - like protein [Arabidopsis thaliana]
  misc_feature (1)..(148): Homolog of NCBI NO: 15221329 NR Description: expressed protein [Arabidopsis thaliana]
  misc_feature (1)..(148): Homolog of NCBI NO: 8778645 NR Description: F5O11.17 [Arabidopsis thaliana]
  misc_feature (1)..(148): Homolog of NCBI NO: 15234402 NR Description: expressed protein [Arabidopsis thaliana]
  misc_feature (1)..(149): Homolog of NCBI NO: 15235819 NR Description: zinc finger -related protein [Arabidopsis
MDLCSKCYRDICAEEAQTAVAKAAVEKSFKPSPSPPPPTLFIAEPDVAKPEKEKAVATVLVVAEPSSATGEATVPEQNEPPSKPARPNRCLCCNKKVGILGFKCKCGSTFCGEHRYPERHDCSFDFKEAGRGEIAKANPVIKADKLQRF

SEQ ID NO: 61173 - protein, 143 aa, Triticum aestivum
  peptide (1)..(143): Ceres Seq. ID no. 15220149
MWRNQRKKRRLLLFLWWPSHLLQQEKLQFLNRTNHHLNLHGRTGAFVATRRLVYLGLSANAGALSAANIGTLRDMIAALISKKLGVERLQKPIRLLKLINFKGSEKGYGVGLSFLLSQIVFEWNWVSTSGLFPKGGNMMNLVL

SEQ ID NO: 61174 - DNA, 932 bp, Triticum aestivum
  misc_feature (1)..(932): Ceres Seq. ID no. 13661681
aaaaaaaacaaacaatcggcagggttcgcgaaaaaaaggaaactcctccctccctcctcccccgcgccgacccgccgccgtcgacagcgcgccccgacgcgatggcccgcaccaagcacccggccgtcaggaagaccaaggcgccgcccaagaagcagctcgggccccgccccgcgcagcggcggcaggagacagatggcgcgggcacgtcggcgacaccgaggcgagccgggcgggcggcggccccagggggggctcaaggggcaactgggcaacccaagcagaggaaaccacaccggttcaggccaggcacggtggcactgcgggagatcaggaggtatcagaagtcggtcgactttctcatcccgtttgcaccatttgtccgtctgatcaaggaggtcaccgacttcttctgtcctgaaatcagccgctggactccccaagcgctcgtcgcgattcaagaggctgcagagtatcacctcgtcgacgtatttgaaagggcaaatcactgtgccatccatgcaaagcgtgttaccgtcatgcaaaaggacatacagcttgcaaggcgtatcggcgggaggaggctttggtgatacttctggaagacgttttctgcatcataggggggaaagactctggtgatactaatgggagatgttttatgtattgggggtgcaaaggcagtgttcatagtggtccaatatgtttgactgtatcgttagaaagtattgtaggtgtatcttcatttagttagctttgtcttcgaagttgatctgattcgttacatgtttgggatcattcgacttcttcattcaggcattgttccatttgaattgattgtggatatgggattttaaatgacttggaatcggttgtggattttccacattattgaaggagcgaaccagaattgcgcgcaagcgttttcatgc

SEQ ID NO: 61175 - protein, 196 aa, Triticum aestivum
  peptide (1)..(196): Ceres Seq. ID no. 15220130
  misc_feature (44)..(194): Pfam Name: Core histone H2A/H2B/H3/H4 Pfam Description: Core histone H2A/H2B/H3/H4
  misc_feature (21)..(196): Homolog of NCBI NO: 18378832 NR Description: histone family [Arabidopsis thaliana]
  misc_feature (21)..(196): Homolog of NCBI NO: 21592479 NR Description: histone, putative [Arabidopsis thaliana]
  misc_feature (34)..(196): Homolog of NCBI NO: 33146142 NR Description: histone H3 like protein [Arabis gemmifera]
  misc_feature (34)..(196): Homolog of NCBI NO: 19338706 NR Description: centromeric histone H3 HTR12 [Arabidopsis arenosa]
  misc_feature (34)..(196): Homolog of NCBI NO: 33146140 NR Description: histone H3 like protein [Arabis gemmifera]
  misc_feature (34)..(196): Homolog of NCBI NO: 19338704 NR Description: centromeric histone H3 HTR12 [Arabidopsis arenosa]
  misc_feature (34)..(196): Homolog of NCBI NO: 33146136 NR Description: histone H3 like protein [Arabis gemmifera]
  misc_feature (34)..(196): Homolog of NCBI NO: 33146144 NR Description: histone H3 like protein [Arabis glabra]
  misc_feature (34)..(196): Homolog of NCBI NO: 21668094 NR Description: centromeric histone h3-like protein [Zea mays]
  misc_feature (34)..(196): Homolog of NCBI NO: 40365140 NR Description: centromeric histone 3 [Oryza sativa (japonica
KKQTIGRVREKKETPPSLLPRADPPPSTARPDAMARTKHPAVRKTKAPPKKQLGPRPAQRRQETDGAGTSATPRRAGRAAAPGGAQGATGQPKQRKPHRFRPGTVALREIRRYQKSVDFLIPFAPFVRLIKEVTDFFCPEISRWTPQALVAIQEAAEYHLVDVFERANHCAIHAKRVTVMQKDIQLARRIGGRRLW

SEQ ID NO: 61176 - protein, 163 aa, Triticum aestivum
  peptide (1)..(163): Ceres Seq. ID no. 15220131
  misc_feature (11)..(161): Pfam Name: Core histone H2A/H2B/H3/H4 Pfam Description: Core histone H2A/H2B/H3/H4
  misc_feature (1)..(163): Homolog of NCBI NO: 18378832 NR Description: histone family [Arabidopsis thaliana]
  misc_feature (1)..(163): Homolog of NCBI NO: 21592479 NR Description: histone, putative [Arabidopsis thaliana]
  misc_feature (1)..(163): Homolog of NCBI NO: 33146142 NR Description: histone H3 like protein [Arabis gemmifera]
  misc_feature (1)..(163): Homolog of NCBI NO: 19338706 NR Description: centromeric histone H3 HTR12 [Arabidopsis arenosa]
  misc_feature (1)..(163): Homolog of NCBI NO: 33146140 NR Description: histone H3 like protein [Arabis gemmifera]
  misc_feature (1)..(163): Homolog of NCBI NO: 19338704 NR Description: centromeric histone H3 HTR12 [Arabidopsis arenosa]
  misc_feature (1)..(163): Homolog of NCBI NO: 33146136 NR Description: histone H3 like protein [Arabis gemmifera]
  misc_feature (1)..(163): Homolog of NCBI NO: 33146144 NR Description: histone H3 like protein [Arabis glabra]
  misc_feature (1)..(163): Homolog of NCBI NO: 21668094 NR Description: centromeric histone h3-like protein [Zea mays]
  misc_feature (1)..(163): Homolog of NCBI NO: 40365140 NR Description: centromeric histone 3 [Oryza sativa (japonica
MARTKHPAVRKTKAPPKKQLGPRPAQRRQETDGAGTSATPRRAGRAAAPGGAQGATGQPKQRKPHRFRPGTVALREIRRYQKSVDFLIPFAPFVRLIKEVTDFFCPEISRWTPQALVAIQEAAEYHLVDVFERANHCAIHAKRVTVMQKDIQLARRIGGRRLW

SEQ ID NO: 61177 - protein, 139 aa, Triticum aestivum
  peptide (1)..(139): Ceres Seq. ID no. 15220132
KKTNNRQGSRKKGNSSLPPPPRRPAAVDSAPRRDGPHQAPGRQEDQGAAQEAARAPPRAAAAGDRWRGHVGDTEASRAGGGPRGGSRGNWATQAEETTPVQARHGGTAGDQEVSEVGRLSHPVCTICPSDQGGHRLLLS

SEQ ID NO: 61178 - DNA, 777 bp, Triticum aestivum
  misc_feature (1)..(777): Ceres Seq. ID no. 13661950
aggattgccgtgttgtttgtccagcaattattcagcgtcgtcggtatgtgtgctctaaaatagcagctgtagggcgttgtttcaactcaggcacactaatggccaagattggggaagaggtcacctggacaggcacacttgattgcgtttgcattgagcgaatatcacgtaaaatcagcaaggctggtattggagggccccttgttaatttggacggggaagttgttggcatggacttctacgatccgaggataggaacccctatcgtgatgtgggaccatgttgaacacattctgcaccatatagaaaagagtgacccctccggcgcggctttctggaaaatggctggggatcccagcacgaggctaaataggtggcctgtgcctgcgccatgttggcgtagccgtgaggacgtggagaaggacaagaaatctgaggaagatgagatgaaccttgagcccccgcccctaccccccagggagagtttctcatgggtcttcaatttctttcaacagaagccgggctctgaaccctcatccagtcacataaaccgcagtaacccattcatatacggattcatagatggaaagaaagttttactgtctatttgatacgtggctgcatttcgttaggatgttggctagttttcacgaggatctgcttgttgctagtcttagcaaatattacatgtgttgctccgcttgctctcttgaattatccagtgtgtgcagccttgtgtaatactcgatggtgatgactttagtttatatattgtcc

SEQ ID NO: 61179 - protein, 202 aa, Triticum aestivum
  peptide (1)..(202): Ceres Seq. ID no. 13661951
  misc_feature (19)..(140): Homolog of NCBI NO: 37535324 NR Description: putative serine protease [Oryza sativa (japonica
  misc_feature (18)..(103): Homolog of NCBI NO: 24431600 NR Description: Putative polyprotein from transposon TNT
  misc_feature (18)..(102): Homolog of NCBI NO: 5803253 NR Description: ESTs AU068856(C50756),AU077979(C61370) correspond a region of the predicted gene.~Similar to serine protease
  misc_feature (19)..(125): Homolog of NCBI NO: 34897514 NR Description: unknown protein [Oryza sativa (japonica
  misc_feature (1)..(142): Homolog of NCBI NO: 34910018 NR Description: P0413G02.10 [Oryza sativa (japonica
DCRVVCPAIIQRRRYVCSKIAAVGRCFNSGTLMAKIGEEVTWTGTLDCVCIERISRKISKAGIGGPLVNLDGEVVGMDFYDPRIGTPIVMWDHVEHILHHIEKSDPSGAAFWKMAGDPSTRLNRWPVPAPCWRSREDVEKDKKSEEDEMNLEPPPLPPRESFSWVFNFFQQKPGSEPSSSHINRSNPFIYGFIDGKKVLLSI

SEQ ID NO: 61180 - protein, 170 aa, Triticum aestivum
  peptide (1)..(170): Ceres Seq. ID no. 13661952
  misc_feature (1)..(108): Homolog of NCBI NO: 37535324 NR Description: putative serine protease [Oryza sativa (japonica
  misc_feature (1)..(71): Homolog of NCBI NO: 24431600 NR Description: Putative polyprotein from transposon TNT
  misc_feature (1)..(70): Homolog of NCBI NO: 5803253 NR Description: ESTs AU068856(C50756),AU077979(C61370) correspond a region of the predicted gene.~Similar to serine protease
  misc_feature (1)..(93): Homolog of NCBI NO: 34897514 NR Description: unknown protein [Oryza sativa (japonica
  misc_feature (1)..(110): Homolog of NCBI NO: 34910018 NR Description: P0413G02.10 [Oryza sativa (japonica
MAKIGEEVTWTGTLDCVCIERISRKISKAGIGGPLVNLDGEVVGMDFYDPRIGTPIVMWDHVEHILHHIEKSDPSGAAFWKMAGDPSTRLNRWPVPAPCWRSREDVEKDKKSEEDEMNLEPPPLPPRESFSWVFNFFQQKPGSEPSSSHINRSNPFIYGFIDGKKVLLSI

SEQ ID NO: 61181 - protein, 126 aa, Triticum aestivum
  peptide (1)..(126): Ceres Seq. ID no. 13661953
  misc_feature (1)..(64): Homolog of NCBI NO: 37535324 NR Description: putative serine protease [Oryza sativa (japonica
  misc_feature (1)..(27): Homolog of NCBI NO: 24431600 NR Description: Putative polyprotein from transposon TNT
  misc_feature (1)..(26): Homolog of NCBI NO: 5803253 NR Description: ESTs AU068856(C50756),AU077979(C61370) correspond a region of the predicted gene.~Similar to serine protease
  misc_feature (1)..(49): Homolog of NCBI NO: 34897514 NR Description: unknown protein [Oryza sativa (japonica
  misc_feature (1)..(66): Homolog of NCBI NO: 34910018 NR Description: P0413G02.10 [Oryza sativa (japonica
MDFYDPRIGTPIVMWDHVEHILHHIEKSDPSGAAFWKMAGDPSTRLNRWPVPAPCWRSREDVEKDKKSEEDEMNLEPPPLPPRESFSWVFNFFQQKPGSEPSSSHINRSNPFIYGFIDGKKVLLSI

SEQ ID NO: 61182 - DNA, 718 bp, Triticum aestivum
  misc_feature (1)..(718): Ceres Seq. ID no. 13661954
agcaggaagctctaacatacaatggatacgaggcagagcgtcgcggcggtggtgaagccgtcgttggatggcggtgccccggccacggcgtcgttccgtctccgtaacggcagcctcaactcggttcgcctccgccgggtgttcgacctgttcgacaagaacggcgacggtcagatcacggtcgacgagctggcgcaggcgctggattcgctcgggctcgtcgccgaccgcgagggcctggcctccactgtgggcgcgtacgtccccgagggcgcggcggggcttcggttccaggacttcgagtgcctccaccgtgagctgggtgacgcgctcttcggcgcgctggacgacgtgcccgaggacggcgaggccggcgcgggcggggacgaggaggagatgaaggaggcgttcaaggtgttcgacgtggacggcgacggcttcatctcggcaaccgagctgcaggaggtgctcaagaagctgggcctccccgagggcagcagcctcgccaccgtgcgccagatgatttgcaacgtcgaccgtaacagcgacggccgcgtcgactttggggagttcaagtgcatgatgaaggggatcacggtgttgggcgcgtgaccatcgaaaccaatcgtgtccgatcgcacgctgcaacaaaccgcacatcctctcgttcatgggtggcgatcagaatcggttcccgtcaatcaagtacaccatctcc

SEQ ID NO: 61183 - protein, 196 aa, Triticum aestivum
  peptide (1)..(196): Ceres Seq. ID no. 13661955
  misc_feature (36)..(64): Pfam Name: EF hand Pfam Description: EF hand
  misc_feature (13)..(190): Homolog of NCBI NO: 18406202 NR Description: calmodulin-like protein (MSS3) [Arabidopsis
  misc_feature (12)..(190): Homolog of NCBI NO: 21740787 NR Description: OSJNBb0091E11.1 [Oryza sativa (japonica
  misc_feature (21)..(193): Homolog of NCBI NO: 1168696 NR Description: Calcium-binding allergen Bet v 3 (Bet v III)
  misc_feature (12)..(193): Homolog of NCBI NO: 1168782 NR Description: Calcium-binding protein CAST
  misc_feature (22)..(193): Homolog of NCBI NO: 15241500 NR Description: calcium-binding protein, putative [Arabidopsis
  misc_feature (9)..(193): Homolog of NCBI NO: 12003380 NR Description: Avr9/Cf-9 rapidly elicited protein 31 [Nicotiana
  misc_feature (19)..(193): Homolog of NCBI NO: 15233402 NR Description: calcium-binding protein, putative [Arabidopsis
  misc_feature (9)..(196): Homolog of NCBI NO: 13194672 NR Description: calmodulin-like protein [Pennisetum ciliare]
  misc_feature (1)..(195): Homolog of NCBI NO: 29467539 NR Description: P0665F09.7 [Oryza sativa (japonica
  misc_feature (4)..(196): Homolog of NCBI NO: 33146667 NR Description: putative Avr9/Cf-9 rapidly elicited protein 31
MDTRQSVAAVVKPSLDGGAPATASFRLRNGSLNSVRLRRVFDLFDKNGDGQITVDELAQALDSLGLVADREGLASTVGAYVPEGAAGLRFQDFECLHRELGDALFGALDDVPEDGEAGAGGDEEEMKEAFKVFDVDGDGFISATELQEVLKKLGLPEGSSLATVRQMICNVDRNSDGRVDFGEFKCMMKGITVLGA

SEQ ID NO: 61184 - protein, 110 aa, Triticum aestivum
  peptide (1)..(110): Ceres Seq. ID no. 13661956
  misc_feature (1)..(110): Homolog of NCBI NO: 34868816 NR Description: similar to splicing coactivator subunit SRm300
MAVPRPRRRSVSVTAASTRFASAGCSTCSTRTATVRSRSTSWRRRWIRSGSSPTARAWPPLWARTSPRARRGFGSRTSSASTVSWVTRSSARWTTCPRTARPARAGTRRR

SEQ ID NO: 61185 - DNA, 817 bp, Triticum aestivum
  misc_feature (1)..(817): Ceres Seq. ID no. 13661628
attacctagaacatcctaatcgaaaagtcgaacgataacgatggtgcttccaggatccttttttgcgcttgactggcccgtctcgcgcaattttggccagcaacccggtgacatttgaagttgaactaaaaactgtgtatcctggagcggagccggatccccaaggcgcattgctctcttgcgtctatgattggcgcgccgtgcaggataccacccctatgttccttggctatgcttgttctgcacagttaagccttgagcaacttcctagagcaatccaggccactatcatgggtgtccacattgttgatggctcatggcctcctaaatatggatgccgggtttcttgctccttgtctgctccagatgatcccactcctagggaagtgttgttgcttgattgttcccgttctgatgctgaaaaaaaaaagccctgttggatcagatggctactttggtctggcaaggaatgttgtttcagctgaactacaatcaacactgaaagttgtcatacaagcccagtcgtggaggcatggtggtgcacagggtcatgtcgagttccctgtccaacaatactgccaaacaagcaagggttcatgtgttgtaggcatgtgtaaggtcgaggttgttgttgcttggtccctccttgtcgagaacaagctgaatctcatgctttgagacgtgagatctactatgtaagagtcagctctagcttgcgactcatcttgacccagatattcgtgtactgactattagcttatcttgtgaaacattgttatgctggtggtttgctagcatgttaagcatttctgttcgg

SEQ ID NO: 61186 - protein, 122 aa, Triticum aestivum
  peptide (1)..(122): Ceres Seq. ID no. 15220702
  misc_feature (12)..(122): Homolog of NCBI NO: 21913313 NR Description: csAtPR5 [Aegilops tauschii]
MAHGLLNMDAGFLAPCLLQMIPLLGKCCCLIVPVLMLKKKSPVGSDGYFGLARNVVSAELQSTLKVVIQAQSWRHGGAQGHVEFPVQQYCQTSKGSCVVGMCKVEVVVAWSLLVENKLNLML

SEQ ID NO: 61187 - protein, 115 aa, Triticum aestivum
  peptide (1)..(115): Ceres Seq. ID no. 15220703
  misc_feature (5)..(115): Homolog of NCBI NO: 21913313 NR Description: csAtPR5 [Aegilops tauschii]
MDAGFLAPCLLQMIPLLGKCCCLIVPVLMLKKKSPVGSDGYFGLARNVVSAELQSTLKVVIQAQSWRHGGAQGHVEFPVQQYCQTSKGSCVVGMCKVEVVVAWSLLVENKLNLML

SEQ ID NO: 61188 - protein, 103 aa, Triticum aestivum
  peptide (1)..(103): Ceres Seq. ID no. 15220704
  misc_feature (1)..(103): Homolog of NCBI NO: 21913313 NR Description: csAtPR5 [Aegilops tauschii]
MIPLLGKCCCLIVPVLMLKKKSPVGSDGYFGLARNVVSAELQSTLKVVIQAQSWRHGGAQGHVEFPVQQYCQTSKGSCVVGMCKVEVVVAWSLLVENKLNLML

SEQ ID NO: 61189 - DNA, 902 bp, Triticum aestivum
  misc_feature (1)..(902): Ceres Seq. ID no. 13661833
agatcccctccaccggggcctccttcgacctcctctcctctcccaatccactgcagccggccggccttcccctcccccctccgaccgctagctgctcacccccctccctcctccgaccgctagctgctcgccccactccctccccgtgagaagcttggtccagcaccgagcggcgccgagagctgtccgcgtcgggcgctgttggcatggagagcagcgcggcggcgcggatggatcctgaggcggcgacggagctggcgcggaagggggtcaccctcctgctcctagacgtgccccagcacaccctcctcggcctcgacacccaggtgttctcggtgagccccaggttcagagggatcaagatggtgcccccaggcccacatttcctccactactgctcccccagcagagcaaaaaggttcaacaaccatgaaatcctagctgaggacgtgcgagactgggatatagccagtgaccgggggcaagggcagcgtgcgcagggtgatcgacgaggactactgcggcccgatgggagtcgtgctcttcaactactgagaggcagacttcaccgtgaagccccgcgaccgcgtcatacagattattgtccaggtgattgcgacgcaggaggtcctcggggtggaggagctcgacgccaccgttcggaggtcaccgaggtggaggacgacgccaccgtccggagttcctcaaggtggaggacctcgacgctttgtacatacatctagagaagtggtctggttaggttggtggtgaaacgctagagaaggtaccaaccttttgatgacgattgtgtgtgtcctcgtgatctcttcgagttgagatgttgaatgttgcatccatgaacactgcaagtgttaagatggttatgtgaaatttattttgct

SEQ ID NO: 61190 - protein, 178 aa, Triticum aestivum
  peptide (1)..(178): Ceres Seq. ID no. 13661834
  misc_feature (9)..(73): Pfam Name: AAR2 protein Pfam Description: AAR2 protein
  misc_feature (5)..(69): Homolog of NCBI NO: 24211598 NR Description: Protein c20orf4 homolog
  misc_feature (5)..(69): Homolog of NCBI NO: 24211562 NR Description: Protein c20orf4 homolog
  misc_feature (5)..(69): Homolog of NCBI NO: 7512778 NR Description: hypothetical protein DKFZp564N1363.1 - human
  misc_feature (1)..(69): Homolog of NCBI NO: 3406621 NR Description: unknown [Oryctolagus cuniculus]
  misc_feature (5)..(69): Homolog of NCBI NO: 18034690 NR Description: chromosome 20 open reading frame 4 [Homo sapiens]
  misc_feature (5)..(69): Homolog of NCBI NO: 4680685 NR Description: CGI-23 protein [Homo sapiens]
  misc_feature (9)..(71): Homolog of NCBI NO: 18408532 NR Description: expressed protein [Arabidopsis thaliana]
  misc_feature (9)..(73): Homolog of NCBI NO: 7657874 NR Description: CePP protein [Brassica napus var. napus]
  misc_feature (9)..(73): Homolog of NCBI NO: 15864559 NR Description: CePP putative protein [Brassica napus]
  misc_feature (5)..(72): Homolog of NCBI NO: 38346780 NR Description: OSJNBa0095H06.5 [Oryza sativa (japonica
MESSAAARMDPEAATELARKGVTLLLLDVPQHTLLGLDTQVFSVSPRFRGIKMVPPGPHFLHYCSPSRAKRFNNHEILAEDVRDWDIASDRGQGQRAQGDRRGLLRPDGSRALQLLRGRLHREAPRPRHTDYCPGDCDAGGPRGGGARRHRSEVTEVEDDATVRSSSRWRTSTLCTYI

SEQ ID NO: 61191 - protein, 170 aa, Triticum aestivum
  peptide (1)..(170): Ceres Seq. ID no. 13661835
  misc_feature (1)..(65): Pfam Name: AAR2 protein Pfam Description: AAR2 protein
  misc_feature (1)..(61): Homolog of NCBI NO: 24211598 NR Description: Protein c20orf4 homolog
  misc_feature (1)..(61): Homolog of NCBI NO: 24211562 NR Description: Protein c20orf4 homolog
  misc_feature (1)..(61): Homolog of NCBI NO: 7512778 NR Description: hypothetical protein DKFZp564N1363.1 - human
  misc_feature (1)..(61): Homolog of NCBI NO: 3406621 NR Description: unknown [Oryctolagus cuniculus]
  misc_feature (1)..(61): Homolog of NCBI NO: 18034690 NR Description: chromosome 20 open reading frame 4 [Homo sapiens]
  misc_feature (1)..(61): Homolog of NCBI NO: 4680685 NR Description: CGI-23 protein [Homo sapiens]
  misc_feature (1)..(63): Homolog of NCBI NO: 18408532 NR Description: expressed protein [Arabidopsis thaliana]
  misc_feature (1)..(65): Homolog of NCBI NO: 7657874 NR Description: CePP protein [Brassica napus var. napus]
  misc_feature (1)..(65): Homolog of NCBI NO: 15864559 NR Description: CePP putative protein [Brassica napus]
  misc_feature (1)..(64): Homolog of NCBI NO: 38346780 NR Description: OSJNBa0095H06.5 [Oryza sativa (japonica
MDPEAATELARKGVTLLLLDVPQHTLLGLDTQVFSVSPRFRGIKMVPPGPHFLHYCSPSRAKRFNNHEILAEDVRDWDIASDRGQGQRAQGDRRGLLRPDGSRALQLLRGRLHREAPRPRHTDYCPGDCDAGGPRGGGARRHRSEVTEVEDDATVRSSSRWRTSTLCTYI

SEQ ID NO: 61192 - protein, 126 aa, Triticum aestivum
  peptide (1)..(126): Ceres Seq. ID no. 13661836
  misc_feature (1)..(17): Homolog of NCBI NO: 24211598 NR Description: Protein c20orf4 homolog
  misc_feature (1)..(17): Homolog of NCBI NO: 24211562 NR Description: Protein c20orf4 homolog
  misc_feature (1)..(17): Homolog of NCBI NO: 7512778 NR Description: hypothetical protein DKFZp564N1363.1 - human
  misc_feature (1)..(17): Homolog of NCBI NO: 3406621 NR Description: unknown [Oryctolagus cuniculus]
  misc_feature (1)..(17): Homolog of NCBI NO: 18034690 NR Description: chromosome 20 open reading frame 4 [Homo sapiens]
  misc_feature (1)..(17): Homolog of NCBI NO: 4680685 NR Description: CGI-23 protein [Homo sapiens]
  misc_feature (1)..(19): Homolog of NCBI NO: 18408532 NR Description: expressed protein [Arabidopsis thaliana]
  misc_feature (1)..(21): Homolog of NCBI NO: 7657874 NR Description: CePP protein [Brassica napus var. napus]
  misc_feature (1)..(21): Homolog of NCBI NO: 15864559 NR Description: CePP putative protein [Brassica napus]
  misc_feature (1)..(20): Homolog of NCBI NO: 38346780 NR Description: OSJNBa0095H06.5 [Oryza sativa (japonica
MVPPGPHFLHYCSPSRAKRFNNHEILAEDVRDWDIASDRGQGQRAQGDRRGLLRPDGSRALQLLRGRLHREAPRPRHTDYCPGDCDAGGPRGGGARRHRSEVTEVEDDATVRSSSRWRTSTLCTYI

SEQ ID NO: 61193 - DNA, 681 bp, Triticum aestivum
  misc_feature (1)..(681): Ceres Seq. ID no. 12624445
aacgacgacggaacacgcagctacactcccacactctcaccagctcctcgccgagcctcttgtcctacgacggtgagcatgggcggaggggacgagcatggcgcgtcggctcggctggagagcatcctcacggactcgtcggcaccgcgggcggagcgcgtgtgggcggcgggggcaatcgagctcgggatgctcttgcggctggccgtcccggcggtgatcatgtacatgatcaacttcctcatgtccatgtccacccagatcttctccggccacctcgggagcctggagctcgccgccgcctccctcggaaacacaggcgtccagatgttcgcctatggcctcatggcgctgcagggcgaaagatgcgcggggaaagctctagggaatatttggagccgcgggaaatagccgatcgccgcgtctttttctcccacttatccaaaatctgacaactaatcctgtgtttagtgctgtgatggtcgctaaagcatgcaataattgcacgtcccacgatccgctcggcacgtgcatgcattcacggttcaattaacctgtcattaatgggcgttgatttgaccaaagagtagcagttgacgtttttttattgccacgagcttggatcctgtgtcactcatggtgttcatttctttaatgaatgatgagtggttgatggactgc

SEQ ID NO: 61194 - protein, 149 aa, Triticum aestivum
  peptide (1)..(149): Ceres Seq. ID no. 12624446
RRRNTQLHSHTLTSSSPSLLSYDGEHGRRGRAWRVGSAGEHPHGLVGTAGGARVGGGGNRARDALAAGRPGGDHVHDQLPHVHVHPDLLRPPREPGARRRLPRKHRRPDVRLWPHGAAGRKMRGESSREYLEPREIADRRVFFSHLSKI

SEQ ID NO: 61195 - protein, 136 aa, Triticum aestivum
  peptide (1)..(136): Ceres Seq. ID no. 12624447
  misc_feature (56)..(129): Homolog of NCBI NO: 34901880 NR Description: putative Multidrug resistance protein norM
  misc_feature (39)..(129): Homolog of NCBI NO: 21553843 NR Description: unknown [Arabidopsis thaliana]
  misc_feature (39)..(129): Homolog of NCBI NO: 18415793 NR Description: putative protein; protein id: At4g21910.1
  misc_feature (39)..(129): Homolog of NCBI NO: 7487826 NR Description: hypothetical protein T8O5.120 - Arabidopsis
  misc_feature (35)..(129): Homolog of NCBI NO: 22655139 NR Description: unknown protein [Arabidopsis thaliana]
  misc_feature (35)..(129): Homolog of NCBI NO: 15221073 NR Description: unknown protein; protein id: At1g11670.1
  misc_feature (38)..(129): Homolog of NCBI NO: 18407368 NR Description: expressed protein
  misc_feature (38)..(129): Homolog of NCBI NO: 15081773 NR Description: At1g61890/F8K4_9 [Arabidopsis thaliana]
  misc_feature (36)..(129): Homolog of NCBI NO: 20466556 NR Description: integral membrane protein, putative [Arabidopsis
  misc_feature (36)..(129): Homolog of NCBI NO: 15233127 NR Description: integral membrane protein, putative
NDDGTRSYTPTLSPAPRRASCPTTVSMGGGDEHGASARLESILTDSSAPRAERVWAAGAIELGMLLRLAVPAVIMYMINFLMSMSTQIFSGHLGSLELAAASLGNTGVQMFAYGLMALQGERCAGKALGNIWSRGK

SEQ ID NO: 61196 - protein, 110 aa, Triticum aestivum
  peptide (1)..(110): Ceres Seq. ID no. 12624448
  misc_feature (30)..(103): Homolog of NCBI NO: 34901880 NR Description: putative Multidrug resistance protein norM
  misc_feature (13)..(103): Homolog of NCBI NO: 21553843 NR Description: unknown [Arabidopsis thaliana]
  misc_feature (13)..(103): Homolog of NCBI NO: 18415793 NR Description: putative protein; protein id: At4g21910.1
  misc_feature (13)..(103): Homolog of NCBI NO: 7487826 NR Description: hypothetical protein T8O5.120 - Arabidopsis
  misc_feature (9)..(103): Homolog of NCBI NO: 22655139 NR Description: unknown protein [Arabidopsis thaliana]
  misc_feature (9)..(103): Homolog of NCBI NO: 15221073 NR Description: unknown protein; protein id: At1g11670.1
  misc_feature (12)..(103): Homolog of NCBI NO: 18407368 NR Description: expressed protein
  misc_feature (12)..(103): Homolog of NCBI NO: 15081773 NR Description: At1g61890/F8K4_9 [Arabidopsis thaliana]
  misc_feature (10)..(103): Homolog of NCBI NO: 20466556 NR Description: integral membrane protein, putative [Arabidopsis
  misc_feature (10)..(103): Homolog of NCBI NO: 15233127 NR Description: integral membrane protein, putative
MGGGDEHGASARLESILTDSSAPRAERVWAAGAIELGMLLRLAVPAVIMYMINFLMSMSTQIFSGHLGSLELAAASLGNTGVQMFAYGLMALQGERCAGKALGNIWSRGK

SEQ ID NO: 61197 - DNA, 1020 bp, Triticum aestivum
  misc_feature (1)..(1020): Ceres Seq. ID no. 12624676
agtttttacttttcaggaggagaagaagaaacaaaacccgaaaccagattcgtctctctgcaaaatcgagacgttgtcggaatcgcacttcttcttcttgttcaatccacaatcagtaggtcgaaattcaagaaagatggtggtgtcgccaaagatagctccatcaatgctgtcttcggactttgcaaatctggcggcagaggccaagcggatggttgatttgggcgctgactggcttcacatggacatcatggacgggcattttgtcccgaatctaaccattggtgctcctgtcatcgagagtttgagaaagcacacaagtgcatatcttgattgccacctaatggtgacgaaccccatggattacgtggagcagatgggtaaagctggggcttctggtttcacattccacgttgaggtggccaaagagaactggcaagaacttgtgagtaagattaagtctgctgggatgaggccaggtgtggctctaaagcctggaacacctgttgaagaagtctatcctctggttgaaggggaaactccagtagaaatggtgctagtgatgacggtggagcctggatttggaggccagaagttcatgcccaacatgatggacaaggtcagggcattgaggcagaagtatccaacgctagatattgaggtggacggagggttaggcccatcgactatagaagcagcggctgcagcaggggccaactgtatcgtagctggaagttcggtgtttggagctccggagtcagggaaagtcatttcccttttgcggaccagtgttgagaaagcccaacccaccacctgagtgcactgcccgtttctaataatatatgcacccaccaaaggcaataataattttacgacaactataatttaagagctgaaacatacaaaaagaatcgttcaaacatttccttagtagtttgatcatattgcacttgtgtaatggaatgtttcgtattgtcaagcaaacttggtcatacagtaagaatgtttttgtaaaatggt

SEQ ID NO: 61198 - protein, 271 aa, Triticum aestivum
  peptide (1)..(271): Ceres Seq. ID no. 12624677
  misc_feature (51)..(251): Pfam Name: Ribulose-phosphate 3 epimerase family Pfam Description: Ribulose-phosphate 3 epimerase family
  misc_feature (51)..(267): Homolog of NCBI NO: 29833422 NR Description: putative ribulose-phosphate 3-epimerase
  misc_feature (51)..(267): Homolog of NCBI NO: 27532955 NR Description: RIKEN cDNA 5730518J08 [Mus musculus]
  misc_feature (52)..(267): Homolog of NCBI NO: 39581355 NR Description: Hypothetical protein CBG15299 [Caenorhabditis
  misc_feature (10)..(267): Homolog of NCBI NO: 7498654 NR Description: hypothetical protein F08F8.4 - Caenorhabditis
  misc_feature (46)..(267): Homolog of NCBI NO: 17552948 NR Description: D-ribulose-5-Phosphate 3-epimerase (24.4 kD)
  misc_feature (47)..(270): Homolog of NCBI NO: 19114917 NR Description: putative ribulose phosphate 3-epimerase
  misc_feature (51)..(268): Homolog of NCBI NO: 28373310 NR Description: Chain A, The Structure Of The Cytosolic
  misc_feature (47)..(271): Homolog of NCBI NO: 6091725 NR Description: putative D-ribulose-5-phosphate 3-epimerase
  misc_feature (48)..(271): Homolog of NCBI NO: 15221735 NR Description: putative D-ribulose-5-phosphate-3-epimerase
  misc_feature (47)..(271): Homolog of NCBI NO: 18395962 NR Description: putative D-ribulose-5-phosphate 3-epimerase
VFTFQEEKKKQNPKPDSSLCKIETLSESHFFFLFNPQSVGRNSRKMVVSPKIAPSMLSSDFANLAAEAKRMVDLGADWLHMDIMDGHFVPNLTIGAPVIESLRKHTSAYLDCHLMVTNPMDYVEQMGKAGASGFTFHVEVAKENWQELVSKIKSAGMRPGVALKPGTPVEEVYPLVEGETPVEMVLVMTVEPGFGGQKFMPNMMDKVRALRQKYPTLDIEVDGGLGPSTIEAAAAAGANCIVAGSSVFGAPESGKVISLLRTSVEKAQPTT

SEQ ID NO: 61199 - protein, 226 aa, Triticum aestivum
  peptide (1)..(226): Ceres Seq. ID no. 12624678
  misc_feature (6)..(206): Pfam Name: Ribulose-phosphate 3 epimerase family Pfam Description: Ribulose-phosphate 3 epimerase family
  misc_feature (6)..(222): Homolog of NCBI NO: 29833422 NR Description: putative ribulose-phosphate 3-epimerase
  misc_feature (6)..(222): Homolog of NCBI NO: 27532955 NR Description: RIKEN cDNA 5730518J08 [Mus musculus]
  misc_feature (7)..(222): Homolog of NCBI NO: 39581355 NR Description: Hypothetical protein CBG15299 [Caenorhabditis
  misc_feature (1)..(222): Homolog of NCBI NO: 7498654 NR Description: hypothetical protein F08F8.4 - Caenorhabditis
  misc_feature (1)..(222): Homolog of NCBI NO: 17552948 NR Description: D-ribulose-5-Phosphate 3-epimerase (24.4 kD)
  misc_feature (2)..(225): Homolog of NCBI NO: 19114917 NR Description: putative ribulose phosphate 3-epimerase
  misc_feature (6)..(223): Homolog of NCBI NO: 28373310 NR Description: Chain A, The Structure Of The Cytosolic
  misc_feature (2)..(226): Homolog of NCBI NO: 6091725 NR Description: putative D-ribulose-5-phosphate 3-epimerase
  misc_feature (3)..(226): Homolog of NCBI NO: 15221735 NR Description: putative D-ribulose-5-phosphate-3-epimerase
  misc_feature (2)..(226): Homolog of NCBI NO: 18395962 NR Description: putative D-ribulose-5-phosphate 3-epimerase
MVVSPKIAPSMLSSDFANLAAEAKRMVDLGADWLHMDIMDGHFVPNLTIGAPVIESLRKHTSAYLDCHLMVTNPMDYVEQMGKAGASGFTFHVEVAKENWQELVSKIKSAGMRPGVALKPGTPVEEVYPLVEGETPVEMVLVMTVEPGFGGQKFMPNMMDKVRALRQKYPTLDIEVDGGLGPSTIEAAAAAGANCIVAGSSVFGAPESGKVISLLRTSVEKAQPTT

SEQ ID NO: 61200 - protein, 216 aa, Triticum aestivum
  peptide (1)..(216): Ceres Seq. ID no. 12624679
  misc_feature (1)..(196): Pfam Name: Ribulose-phosphate 3 epimerase family Pfam Description: Ribulose-phosphate 3 epimerase family
  misc_feature (1)..(212): Homolog of NCBI NO: 29833422 NR Description: putative ribulose-phosphate 3-epimerase
  misc_feature (1)..(212): Homolog of NCBI NO: 27532955 NR Description: RIKEN cDNA 5730518J08 [Mus musculus]
  misc_feature (1)..(212): Homolog of NCBI NO: 39581355 NR Description: Hypothetical protein CBG15299 [Caenorhabditis
  misc_feature (1)..(212): Homolog of NCBI NO: 7498654 NR Description: hypothetical protein F08F8.4 - Caenorhabditis
  misc_feature (1)..(212): Homolog of NCBI NO: 17552948 NR Description: D-ribulose-5-Phosphate 3-epimerase (24.4 kD)
  misc_feature (1)..(215): Homolog of NCBI NO: 19114917 NR Description: putative ribulose phosphate 3-epimerase
  misc_feature (1)..(213): Homolog of NCBI NO: 28373310 NR Description: Chain A, The Structure Of The Cytosolic
  misc_feature (1)..(216): Homolog of NCBI NO: 6091725 NR Description: putative D-ribulose-5-phosphate 3-epimerase
  misc_feature (1)..(216): Homolog of NCBI NO: 15221735 NR Description: putative D-ribulose-5-phosphate-3-epimerase
  misc_feature (1)..(216): Homolog of NCBI NO: 18395962 NR Description: putative D-ribulose-5-phosphate 3-epimerase
MLSSDFANLAAEAKRMVDLGADWLHMDIMDGHFVPNLTIGAPVIESLRKHTSAYLDCHLMVTNPMDYVEQMGKAGASGFTFHVEVAKENWQELVSKIKSAGMRPGVALKPGTPVEEVYPLVEGETPVEMVLVMTVEPGFGGQKFMPNMMDKVRALRQKYPTLDIEVDGGLGPSTIEAAAAAGANCIVAGSSVFGAPESGKVISLLRTSVEKAQPTT

SEQ ID NO: 61201 - DNA, 711 bp, Triticum aestivum
  misc_feature (1)..(711): Ceres Seq. ID no. 14301738
agttcatctacagacaaaggcattccaacctcccactagcagaagaatttctccagttccagaaacacaagaaactaccatgacgagtgccaagacacttgctcggctggccaagaagtggcagagggtggcggctatgggaaggaagaggctcacctggtcgccatcaacgtccaaagaagaagccggagagtcgtgcagcacgccgtgctcgacagcggccggcaagggccactgcgtcgtgtacactgccgatggtgtaaggttcgaggtgcctcttacgttcctcggaacgaccatcttcagcgagctcttgaggatatcccaagaggagtttggcttcacaggtgttgacggtggcagaatcactctgccctgcgacgcatcggtgatggagtatgccatgtgcttgctcaggagaagcgcctccacagagatggaggccgcgttcctcaacaccatggtgatgccatgccactatcatgtggcgccacatctgggagttggccagcgattcggtgtatgcagctcctgattaccatctgcagagatacaggaaaatagaacaaggaaaacagtttatgtgtagcattttgatcttgctagcaaagaagcaatcaaggaagatggacctagtaagagatattgttctttcaatgtatgcatatactttgttccgaagataaatgatcgatcgcagttttttaaaat

SEQ ID NO: 61202 - protein, 177 aa, Triticum aestivum
  peptide (1)..(177): Ceres Seq. ID no. 14301739
  misc_feature (27)..(133): Pfam Name: Auxin responsive protein Pfam Description: Auxin responsive protein
  misc_feature (36)..(151): Homolog of NCBI NO: 25403069 NR Description: probable auxin-induced protein, 50455-50036
  misc_feature (27)..(151): Homolog of NCBI NO: 21593671 NR Description: auxin-induced protein, putative [Arabidopsis
  misc_feature (27)..(165): Homolog of NCBI NO: 38603942 NR Description: At1g29420 [Arabidopsis thaliana]
  misc_feature (27)..(151): Homolog of NCBI NO: 21592571 NR Description: auxin-induced protein, putative [Arabidopsis
  misc_feature (27)..(151): Homolog of NCBI NO: 15218924 NR Description: auxin-induced (indole-3-acetic acid induced)
  misc_feature (27)..(151): Homolog of NCBI NO: 26452075 NR Description: putative auxin-induced protein [Arabidopsis
  misc_feature (27)..(151): Homolog of NCBI NO: 21553494 NR Description: auxin-induced protein, putative [Arabidopsis
  misc_feature (27)..(151): Homolog of NCBI NO: 18397103 NR Description: auxin-induced (indole-3-acetic acid induced)
  misc_feature (27)..(175): Homolog of NCBI NO: 20149052 NR Description: auxin-induced SAUR-like protein [Capsicum annuum]
  misc_feature (27)..(174): Homolog of NCBI NO: 32187718 NR Description: auxin induced protein [Zea mays]
VHLQTKAFQPPTSRRISPVPETQETTMTSAKTLARLAKKWQRVAAMGRKRLTWSPSTSKEEAGESCSTPCSTAAGKGHCVVYTADGVRFEVPLTFLGTTIFSELLRISQEEFGFTGVDGGRITLPCDASVMEYAMCLLRRSASTEMEAAFLNTMVMPCHYHVAPHLGVGQRFGVCSS

SEQ ID NO: 61203 - protein, 151 aa, Triticum aestivum
  peptide (1)..(151): Ceres Seq. ID no. 14301740
  misc_feature (1)..(107): Pfam Name: Auxin responsive protein Pfam Description: Auxin responsive protein
  misc_feature (10)..(125): Homolog of NCBI NO: 25403069 NR Description: probable auxin-induced protein, 50455-50036
  misc_feature (1)..(125): Homolog of NCBI NO: 21593671 NR Description: auxin-induced protein, putative [Arabidopsis
  misc_feature (1)..(139): Homolog of NCBI NO: 38603942 NR Description: At1g29420 [Arabidopsis thaliana]
  misc_feature (1)..(125): Homolog of NCBI NO: 21592571 NR Description: auxin-induced protein, putative [Arabidopsis
  misc_feature (1)..(125): Homolog of NCBI NO: 15218924 NR Description: auxin-induced (indole-3-acetic acid induced)
  misc_feature (1)..(125): Homolog of NCBI NO: 26452075 NR Description: putative auxin-induced protein [Arabidopsis
  misc_feature (1)..(125): Homolog of NCBI NO: 21553494 NR Description: auxin-induced protein, putative [Arabidopsis
  misc_feature (1)..(125): Homolog of NCBI NO: 18397103 NR Description: auxin-induced (indole-3-acetic acid induced)
  misc_feature (1)..(149): Homolog of NCBI NO: 20149052 NR Description: auxin-induced SAUR-like protein [Capsicum annuum]
  misc_feature (1)..(148): Homolog of NCBI NO: 32187718 NR Description: auxin induced protein [Zea mays]
MTSAKTLARLAKKWQRVAAMGRKRLTWSPSTSKEEAGESCSTPCSTAAGKGHCVVYTADGVRFEVPLTFLGTTIFSELLRISQEEFGFTGVDGGRITLPCDASVMEYAMCLLRRSASTEMEAAFLNTMVMPCHYHVAPHLGVGQRFGVCSS

SEQ ID NO: 61204 - protein, 132 aa, Triticum aestivum
  peptide (1)..(132): Ceres Seq. ID no. 14301741
  misc_feature (1)..(88): Pfam Name: Auxin responsive protein Pfam Description: Auxin responsive protein
  misc_feature (1)..(106): Homolog of NCBI NO: 25403069 NR Description: probable auxin-induced protein, 50455-50036
  misc_feature (1)..(106): Homolog of NCBI NO: 21593671 NR Description: auxin-induced protein, putative [Arabidopsis
  misc_feature (1)..(120): Homolog of NCBI NO: 38603942 NR Description: At1g29420 [Arabidopsis thaliana]
  misc_feature (1)..(106): Homolog of NCBI NO: 21592571 NR Description: auxin-induced protein, putative [Arabidopsis
  misc_feature (1)..(106): Homolog of NCBI NO: 15218924 NR Description: auxin-induced (indole-3-acetic acid induced)
  misc_feature (1)..(106): Homolog of NCBI NO: 26452075 NR Description: putative auxin-induced protein [Arabidopsis
  misc_feature (1)..(106): Homolog of NCBI NO: 21553494 NR Description: auxin-induced protein, putative [Arabidopsis
  misc_feature (1)..(106): Homolog of NCBI NO: 18397103 NR Description: auxin-induced (indole-3-acetic acid induced)
  misc_feature (1)..(130): Homolog of NCBI NO: 20149052 NR Description: auxin-induced SAUR-like protein [Capsicum annuum]
  misc_feature (1)..(129): Homolog of NCBI NO: 32187718 NR Description: auxin induced protein [Zea mays]
MGRKRLTWSPSTSKEEAGESCSTPCSTAAGKGHCVVYTADGVRFEVPLTFLGTTIFSELLRISQEEFGFTGVDGGRITLPCDASVMEYAMCLLRRSASTEMEAAFLNTMVMPCHYHVAPHLGVGQRFGVCSS

SEQ ID NO: 61205 - DNA, 1127 bp, Triticum aestivum
  misc_feature (1)..(1127): Ceres Seq. ID no. 14301502
aagaaaaaacgaatcgttcctctccacctccctgacgcgagcgaccaaagtccggcggccgacgcggcaacggcggcggagaaggtgcctgttagatcgactttctacattgccttttgagaaaacatagagggatctttctgccctctgctcttacctgaagctagaatcacggagggggtgctctgataggtctatgcaccctgtgtcgatctcctttcaacccttcactgcaacttcagcgggcaatttttcctcaaggaccactaatgtgaggtctcgctgtgattttatcaagttgctgacagttggaagaagtagtggataccgtgccatgaattccggaccaacttctgcttccaggtctgaaacgaccggggaacaggattatgctgtgggagagaatgatggtgtgatcatagtcgaccacgggtcacggcgacaggaatctaatctcatgctaaacgattttgttgcaatgttcagggcaaggactggctacaggattgttgagcctgctcacatggagctcgctgagcctactattaaagaagcatttggaaaatgtgtccagcaaggagcatcccgcattattgtcagcccatatttcctttcacctggacggcactggaaacaagatattccttctttagcagcagaagcctctaaagagcactctaacgtggcctacattgtcactgctcctcttggattgcatgagcttatggtggatattatgaacgaccgcatcaagtactgcctgaggcacgttgcaggcgatgctgatgagtgtgcagtatgtgctgggactggaaagtgccacctctactcctgacggtgatgacatgtgagttgctcgaaagtctaatcaggtcatcctgtttttggctcattggcagcacagattgatggctgaggccaataattccatcttgttaacccatgctccttgttatctgccatgtaatcagaaaacattgtaacaatgatctcggcggttttattcagcttgtagatttagagtgttttcagtagtctgaacaagatatcatgacaagagagtgtaaatttgtcatgcaaatcaaacactgcttgctatgcactaccgcaagaaaaaaactgttacc

SEQ ID NO: 61206 - protein, 212 aa, Triticum aestivum
  peptide (1)..(212): Ceres Seq. ID no. 14301503
  misc_feature (76)..(188): Pfam Name: CbiX Pfam Description: CbiX
  misc_feature (60)..(206): Homolog of NCBI NO: 40642725 NR Description: ferrochelatase [Bacillus megaterium]
  misc_feature (72)..(186): Homolog of NCBI NO: 30020268 NR Description: CbiX protein [Bacillus cereus ATCC 14579]
  misc_feature (72)..(194): Homolog of NCBI NO: 15614059 NR Description: BH1496~unknown conserved protein [Bacillus
  misc_feature (72)..(186): Homolog of NCBI NO: 21400014 NR Description: CbiX, CbiX [Bacillus anthracis A2012]
  misc_feature (73)..(189): Homolog of NCBI NO: 23054392 NR Description: hypothetical protein [Geobacter metallireducens]
  misc_feature (73)..(189): Homolog of NCBI NO: 39998091 NR Description: cbiX protein [Geobacter sulfurreducens PCA]
  misc_feature (58)..(110): Homolog of NCBI NO: 25405354 NR Description: hypothetical protein F14I3.20 [imported] -
  misc_feature (109)..(212): Homolog of NCBI NO: 25405354 NR Description: hypothetical protein F14I3.20 [imported] -
  misc_feature (58)..(212): Homolog of NCBI NO: 21618095 NR Description: unknown [Arabidopsis thaliana]
  misc_feature (58)..(212): Homolog of NCBI NO: 18402963 NR Description: expressed protein [Arabidopsis thaliana]
MHPVSISFQPFTATSAGNFSSRTTNVRSRCDFIKLLTVGRSSGYRAMNSGPTSASRSETTGEQDYAVGENDGVIIVDHGSRRQESNLMLNDFVAMFRARTGYRIVEPAHMELAEPTIKEAFGKCVQQGASRIIVSPYFLSPGRHWKQDIPSLAAEASKEHSNVAYIVTAPLGLHELMVDIMNDRIKYCLRHVAGDADECAVCAGTGKCHLYS

SEQ ID NO: 61207 - protein, 166 aa, Triticum aestivum
  peptide (1)..(166): Ceres Seq. ID no. 14301504
  misc_feature (30)..(142): Pfam Name: CbiX Pfam Description: CbiX
  misc_feature (14)..(160): Homolog of NCBI NO: 40642725 NR Description: ferrochelatase [Bacillus megaterium]
  misc_feature (26)..(140): Homolog of NCBI NO: 30020268 NR Description: CbiX protein [Bacillus cereus ATCC 14579]
  misc_feature (26)..(148): Homolog of NCBI NO: 15614059 NR Description: BH1496~unknown conserved protein [Bacillus
  misc_feature (26)..(140): Homolog of NCBI NO: 21400014 NR Description: CbiX, CbiX [Bacillus anthracis A2012]
  misc_feature (27)..(143): Homolog of NCBI NO: 23054392 NR Description: hypothetical protein [Geobacter metallireducens]
  misc_feature (27)..(143): Homolog of NCBI NO: 39998091 NR Description: cbiX protein [Geobacter sulfurreducens PCA]
  misc_feature (12)..(64): Homolog of NCBI NO: 25405354 NR Description: hypothetical protein F14I3.20 [imported] -
  misc_feature (63)..(166): Homolog of NCBI NO: 25405354 NR Description: hypothetical protein F14I3.20 [imported] -
  misc_feature (12)..(166): Homolog of NCBI NO: 21618095 NR Description: unknown [Arabidopsis thaliana]
  misc_feature (12)..(166): Homolog of NCBI NO: 18402963 NR Description: expressed protein [Arabidopsis thaliana]
MNSGPTSASRSETTGEQDYAVGENDGVIIVDHGSRRQESNLMLNDFVAMFRARTGYRIVEPAHMELAEPTIKEAFGKCVQQGASRIIVSPYFLSPGRHWKQDIPSLAAEASKEHSNVAYIVTAPLGLHELMVDIMNDRIKYCLRHVAGDADECAVCAGTGKCHLYS

SEQ ID NO: 61208 - protein, 125 aa, Triticum aestivum
  peptide (1)..(125): Ceres Seq. ID no. 14301505
  misc_feature (1)..(101): Pfam Name: CbiX Pfam Description: CbiX
  misc_feature (1)..(119): Homolog of NCBI NO: 40642725 NR Description: ferrochelatase [Bacillus megaterium]
  misc_feature (1)..(99): Homolog of NCBI NO: 30020268 NR Description: CbiX protein [Bacillus cereus ATCC 14579]
  misc_feature (1)..(107): Homolog of NCBI NO: 15614059 NR Description: BH1496~unknown conserved protein [Bacillus
  misc_feature (1)..(99): Homolog of NCBI NO: 21400014 NR Description: CbiX, CbiX [Bacillus anthracis A2012]
  misc_feature (1)..(102): Homolog of NCBI NO: 23054392 NR Description: hypothetical protein [Geobacter metallireducens]
  misc_feature (1)..(102): Homolog of NCBI NO: 39998091 NR Description: cbiX protein [Geobacter sulfurreducens PCA]
  misc_feature (1)..(23): Homolog of NCBI NO: 25405354 NR Description: hypothetical protein F14I3.20 [imported] -
  misc_feature (22)..(125): Homolog of NCBI NO: 25405354 NR Description: hypothetical protein F14I3.20 [imported] -
  misc_feature (1)..(125): Homolog of NCBI NO: 21618095 NR Description: unknown [Arabidopsis thaliana]
  misc_feature (1)..(125): Homolog of NCBI NO: 18402963 NR Description: expressed protein [Arabidopsis thaliana]
MLNDFVAMFRARTGYRIVEPAHMELAEPTIKEAFGKCVQQGASRIIVSPYFLSPGRHWKQDIPSLAAEASKEHSNVAYIVTAPLGLHELMVDIMNDRIKYCLRHVAGDADECAVCAGTGKCHLYS

SEQ ID NO: 61209 - DNA, 892 bp, Triticum aestivum
  misc_feature (1)..(892): Ceres Seq. ID no. 14301727
aatcaaaaaaaaaaatcaaccacttcatcatcatcatcgtctcagatttcgaaaaatggcagcgaagatctcccagcttgcgtgtttctcctccaccaaccgccaattccacttccagaaccgatcgtttccaagccttaggttccgtcccgagtcttttgtagttagaagcgttgttgatgggaacagctcggaaacaccagcttctctgagctatgcagctgaggtttcgaaacctttcgttgagaaaacatctacagtggatgaaactactacgggtaaagaggttatcacagagtcggtagaggaacatgttgccacaacacagcctaaaagagcagcgaagattcatgacttctgttttggcattccttatggtggtctggttatgagtggaggattgcttggatttgcgttttcacgaaatcttacaagtttaagtactggggttctctatggtggtggccttctagctcttagtacgttgagcatgaagatttggcgacagggaaagtctagtttcccttatattctaggtcaagcagtgctttcagctgtcgtcttctggaagaacttcacatcttactctatgactaagaagctgtttcctgccgggctatttgctgtcgtcagtgctgccatgttgtgtttctattcgtacgtggtgctctctggaggaaacccacctccaaagaaacttaaaccatctgctactactagtccttcatactgaagaaacttcacataggttagattcaaagatgaagatcttctcttttggtggctcttgtgcgttgcattcctggtgtaattttatacttttgacttttgaggcaacaactgtgacctgttctttccaatgtcgtaattgaaagttttgtttaatggtgac

SEQ ID NO: 61210 - protein, 243 aa, Triticum aestivum
  peptide (1)..(243): Ceres Seq. ID no. 14301728
  misc_feature (119)..(222): Pfam Name: Uncharacterised protein family (UPF0136) Pfam Description: Uncharacterised protein family (UPF0136)
  misc_feature (97)..(220): Homolog of NCBI NO: 21554522 NR Description: putative non-green plastid inner envelope
  misc_feature (97)..(220): Homolog of NCBI NO: 18404784 NR Description: non-green plastid inner envelope membrane protein
  misc_feature (97)..(220): Homolog of NCBI NO: 25365973 NR Description: hypothetical protein At2g38550 [imported] -
  misc_feature (97)..(232): Homolog of NCBI NO: 7488560 NR Description: inner envelope membrane protein precursor,
  misc_feature (116)..(232): Homolog of NCBI NO: 34896628 NR Description: hypothetical protein [Oryza sativa]
  misc_feature (116)..(231): Homolog of NCBI NO: 18403201 NR Description: expressed protein [Arabidopsis thaliana]
  misc_feature (116)..(232): Homolog of NCBI NO: 15232290 NR Description: expressed protein [Arabidopsis thaliana]
  misc_feature (57)..(240): Homolog of NCBI NO: 38344745 NR Description: OSJNBa0089K21.3 [Oryza sativa (japonica
  misc_feature (19)..(243): Homolog of NCBI NO: 11290570 NR Description: hypothetical protein F28O9.130 - Arabidopsis
  misc_feature (19)..(243): Homolog of NCBI NO: 18410685 NR Description: expressed protein [Arabidopsis thaliana]
IKKKNQPLHHHHRLRFRKMAAKISQLACFSSTNRQFHFQNRSFPSLRFRPESFVVRSVVDGNSSETPASLSYAAEVSKPFVEKTSTVDETTTGKEVITESVEEHVATTQPKRAAKIHDFCFGIPYGGLVMSGGLLGFAFSRNLTSLSTGVLYGGGLLALSTLSMKIWRQGKSSFPYILGQAVLSAVVFWKNFTSYSMTKKLFPAGLFAVVSAAMLCFYSYVVLSGGNPPPKKLKPSATTSPSY

SEQ ID NO: 61211 - protein, 225 aa, Triticum aestivum
  peptide (1)..(225): Ceres Seq. ID no. 14301729
  misc_feature (101)..(204): Pfam Name: Uncharacterised protein family (UPF0136) Pfam Description: Uncharacterised protein family (UPF0136)
  misc_feature (79)..(202): Homolog of NCBI NO: 21554522 NR Description: putative non-green plastid inner envelope
  misc_feature (79)..(202): Homolog of NCBI NO: 18404784 NR Description: non-green plastid inner envelope membrane protein
  misc_feature (79)..(202): Homolog of NCBI NO: 25365973 NR Description: hypothetical protein At2g38550 [imported] -
  misc_feature (79)..(214): Homolog of NCBI NO: 7488560 NR Description: inner envelope membrane protein precursor,
  misc_feature (98)..(214): Homolog of NCBI NO: 34896628 NR Description: hypothetical protein [Oryza sativa]
  misc_feature (98)..(213): Homolog of NCBI NO: 18403201 NR Description: expressed protein [Arabidopsis thaliana]
  misc_feature (98)..(214): Homolog of NCBI NO: 15232290 NR Description: expressed protein [Arabidopsis thaliana]
  misc_feature (39)..(222): Homolog of NCBI NO: 38344745 NR Description: OSJNBa0089K21.3 [Oryza sativa (japonica
  misc_feature (1)..(225): Homolog of NCBI NO: 11290570 NR Description: hypothetical protein F28O9.130 - Arabidopsis
  misc_feature (1)..(225): Homolog of NCBI NO: 18410685 NR Description: expressed protein [Arabidopsis thaliana]
MAAKISQLACFSSTNRQFHFQNRSFPSLRFRPESFVVRSVVDGNSSETPASLSYAAEVSKPFVEKTSTVDETTTGKEVITESVEEHVATTQPKRAAKIHDFCFGIPYGGLVMSGGLLGFAFSRNLTSLSTGVLYGGGLLALSTLSMKIWRQGKSSFPYILGQAVLSAVVFWKNFTSYSMTKKLFPAGLFAVVSAAMLCFYSYVVLSGGNPPPKKLKPSATTSPSY

SEQ ID NO: 61212 - DNA, 1467 bp, Triticum aestivum
  misc_feature (1)..(1467): Ceres Seq. ID no. 14302754
atcgcctcatcccgctctccggtaatacacgttctctgcactcctctcgtgcgagaatggctgcaagcattctgtcccacgttgtctccgacctctgcatcggcaagccggcggtgcgtgtgctgccgccgtcgactccaatcgcggcggccctcgccacgctccgcgctggtgccgacccgttcgtcttcgtggacgctgcacccccggacgcgaagaagacggccgtgttgtccgtcgtcaaggtcagcgtcgcggagatcctgtgttacgtctgcggcgacggtggcaacctcagcgaccccgcggccgcgctcggccggcccgtttccgtgctcacggccgtggtgggcgatcacggcgtcactcgccaagtggatccacagacgagcctgctcgacgccatcgacgcgctgctggccaacaactcgcacagcctggtcgtcccgctccacgcccgggcccgaaagaagcaccaccacgtctccgccggctactgcgtgctgacgcagcaagacatcgtccggcacctcttcggctccatctccctcttctccccggtcgccgcgctctccgtgtcctccctcggcctcgtgcgccgggacgacgtgcacgccgtccacgtcgacgacgacgcgctcgacgccatccctctcctgcggaggtccatcgggcaaggcaccgccgtggccgtcgtggcggacgacgacgcgctcgtcggagagatctgcccgggcgtgctcggctcgtgcgacgacgtcgagtccgtgtccgcggccttcgccacgctctccgccggcgacgccatgacgtacatcgactgctacttctcgccgcccgagttcctgctccgctccatcagagccgagctcacgggcaaagggcttcatgccatgtgcgacctcatggatgccgcctacacaacggacgttggagctctgtcgtcgtcatcaacgtcatctgatgaggagtgtttgccattggcgcctgcgagacgcgcgaggaagatgtcgtcgggaagcttccggtggcggtcgacggaggacgtggcggcgtgtcatgctgagagttcgctggtcgccgtcatggcccaagcgcttgcgcaccgagtcgggcatgtttgggtcgtcgatgagctcagcggcgctctagtcggagtcgtcagctgcgccgatgtgcttgctgtgctccgggaccatctccgcccagagtgatatgcagatgatttgtgatcgatcctatagcctgcggatgtgtaagcatagcttagagctcggcgatttcccgtcgtgccgccctgctacgactgttggagacctgctgctgttttttttaggatcggcccagcttttttttagaacatgttggttccagtttttatttttgtttttgattttgagggtgtaaccaagttttatattcatcgtaagccaggaatacatctcggatcatgaggttgaccaagcc

SEQ ID NO: 61213 - protein, 403 aa, Triticum aestivum
  peptide (1)..(403): Ceres Seq. ID no. 14302755
  misc_feature (197)..(252): Pfam Name: CBS domain Pfam Description: CBS domain
  misc_feature (326)..(396): Homolog of NCBI NO: 15218643 NR Description: CBS domain containing protein [Arabidopsis
  misc_feature (165)..(281): Homolog of NCBI NO: 15218643 NR Description: CBS domain containing protein [Arabidopsis
  misc_feature (19)..(402): Homolog of NCBI NO: 19386732 NR Description: P0678F11.21 [Oryza sativa (japonica
  misc_feature (25)..(400): Homolog of NCBI NO: 32487397 NR Description: OSJNBb0017I01.11 [Oryza sativa (japonica
  misc_feature (19)..(387): Homolog of NCBI NO: 7486257 NR Description: hypothetical protein F27G19.60 - Arabidopsis
  misc_feature (19)..(157): Homolog of NCBI NO: 15238832 NR Description: expressed protein [Arabidopsis thaliana]
  misc_feature (145)..(385): Homolog of NCBI NO: 15238832 NR Description: expressed protein [Arabidopsis thaliana]
  misc_feature (19)..(400): Homolog of NCBI NO: 30687603 NR Description: expressed protein [Arabidopsis thaliana]
  misc_feature (19)..(400): Homolog of NCBI NO: 27754524 NR Description: unknown protein [Arabidopsis thaliana]
  misc_feature (19)..(401): Homolog of NCBI NO: 37535750 NR Description: unknown protein [Oryza sativa (japonica
RLIPLSGNTRSLHSSRARMAASILSHVVSDLCIGKPAVRVLPPSTPIAAALATLRAGADPFVFVDAAPPDAKKTAVLSVVKVSVAEILCYVCGDGGNLSDPAAALGRPVSVLTAVVGDHGVTRQVDPQTSLLDAIDALLANNSHSLVVPLHARARKKHHHVSAGYCVLTQQDIVRHLFGSISLFSPVAALSVSSLGLVRRDDVHAVHVDDDALDAIPLLRRSIGQGTAVAVVADDDALVGEICPGVLGSCDDVESVSAAFATLSAGDAMTYIDCYFSPPEFLLRSIRAELTGKGLHAMCDLMDAAYTTDVGALSSSSTSSDEECLPLAPARRARKMSSGSFRWRSTEDVAACHAESSLVAVMAQALAHRVGHVWVVDELSGALVGVVSCADVLAVLRDHLRPE

SEQ ID NO: 61214 - protein, 385 aa, Triticum aestivum
  peptide (1)..(385): Ceres Seq. ID no. 14302756
  misc_feature (179)..(234): Pfam Name: CBS domain Pfam Description: CBS domain
  misc_feature (308)..(378): Homolog of NCBI NO: 15218643 NR Description: CBS domain containing protein [Arabidopsis
  misc_feature (147)..(263): Homolog of NCBI NO: 15218643 NR Description: CBS domain containing protein [Arabidopsis
  misc_feature (1)..(384): Homolog of NCBI NO: 19386732 NR Description: P0678F11.21 [Oryza sativa (japonica
  misc_feature (7)..(382): Homolog of NCBI NO: 32487397 NR Description: OSJNBb0017I01.11 [Oryza sativa (japonica
  misc_feature (1)..(369): Homolog of NCBI NO: 7486257 NR Description: hypothetical protein F27G19.60 - Arabidopsis
  misc_feature (1)..(139): Homolog of NCBI NO: 15238832 NR Description: expressed protein [Arabidopsis thaliana]
  misc_feature (127)..(367): Homolog of NCBI NO: 15238832 NR Description: expressed protein [Arabidopsis thaliana]
  misc_feature (1)..(382): Homolog of NCBI NO: 30687603 NR Description: expressed protein [Arabidopsis thaliana]
  misc_feature (1)..(382): Homolog of NCBI NO: 27754524 NR Description: unknown protein [Arabidopsis thaliana]
  misc_feature (1)..(383): Homolog of NCBI NO: 37535750 NR Description: unknown protein [Oryza sativa (japonica
MAASILSHVVSDLCIGKPAVRVLPPSTPIAAALATLRAGADPFVFVDAAPPDAKKTAVLSVVKVSVAEILCYVCGDGGNLSDPAAALGRPVSVLTAVVGDHGVTRQVDPQTSLLDAIDALLANNSHSLVVPLHARARKKHHHVSAGYCVLTQQDIVRHLFGSISLFSPVAALSVSSLGLVRRDDVHAVHVDDDALDAIPLLRRSIGQGTAVAVVADDDALVGEICPGVLGSCDDVESVSAAFATLSAGDAMTYIDCYFSPPEFLLRSIRAELTGKGLHAMCDLMDAAYTTDVGALSSSSTSSDEECLPLAPARRARKMSSGSFRWRSTEDVAACHAESSLVAVMAQALAHRVGHVWVVDELSGALVGVVSCADVLAVLRDHLRPE

SEQ ID NO: 61215 - DNA, 853 bp, Triticum aestivum
  misc_feature (1)..(853): Ceres Seq. ID no. 13661969
aatggtaagagagagtatgggagaagagtccgaggcttttgccacgacggcgccgttagctccagtgaccggtgagcgaaaagtaaggaacgacttggaggaaacattaccaaaaccatatttggcaagagcactagtagctccagatacagagcatccgaatggatcagaaggtcatgacagcaaaggcatgagtgttatgcaacaacatgttgcttttttcgaccaaaacggcgatggaatcgtctatccttgggagacttatgcgggattccgtgacctcggtttcaacccaatctcttctgttttttgggccatattcataaactttgcgtttagctacgttacacttccgagttggttgccatcaccactattgcctgtttatatcgacaacattcacaaagccaagcatgggagtgattcaagcacctatgataccgaaggaaggtacgtcccggttaatctcgagaacatctttagcaaatatgcgttaacggctccaaataaaataacattaaaagagctttggaacttaaccgagggaaaccgaatggcaatcgatccttttggatggcttgcgaataaagttgaatggctactagtctatcttcttgcaaaggatgaggaagggttcgtgtctaaagaagctgtgagaggtgtctttgatgcaagtttctttgaatactgtgctaaaaagaataaagagaaggccgattctcgcaagcaagactaagcatttaatttgcttatcttttaaatttgtccgtttgtattattatgctctcaatcttaattaggaaaaggacagaaaacaaaaactctatgtggaataaaacgtttgtgttcttgg

SEQ ID NO: 61216 - protein, 244 aa, Triticum aestivum
  peptide (1)..(244): Ceres Seq. ID no. 13661970
  misc_feature (59)..(232): Pfam Name: Caleosin related protein Pfam Description: Caleosin related protein
  misc_feature (6)..(244): Homolog of NCBI NO: 15226103 NR Description: RD20 protein [Arabidopsis thaliana]
MVRESMGEESEAFATTAPLAPVTGERKVRNDLEETLPKPYLARALVAPDTEHPNGSEGHDSKGMSVMQQHVAFFDQNGDGIVYPWETYAGFRDLGFNPISSVFWAIFINFAFSYVTLPSWLPSPLLPVYIDNIHKAKHGSDSSTYDTEGRYVPVNLENIFSKYALTAPNKITLKELWNLTEGNRMAIDPFGWLANKVEWLLVYLLAKDEEGFVSKEAVRGVFDASFFEYCAKKNKEKADSRKQD

SEQ ID NO: 61217 - protein, 239 aa, Triticum aestivum
  peptide (1)..(239): Ceres Seq. ID no. 13661971
  misc_feature (54)..(227): Pfam Name: Caleosin related protein Pfam Description: Caleosin related protein
  misc_feature (1)..(239): Homolog of NCBI NO: 15226103 NR Description: RD20 protein [Arabidopsis thaliana]
MGEESEAFATTAPLAPVTGERKVRNDLEETLPKPYLARALVAPDTEHPNGSEGHDSKGMSVMQQHVAFFDQNGDGIVYPWETYAGFRDLGFNPISSVFWAIFINFAFSYVTLPSWLPSPLLPVYIDNIHKAKHGSDSSTYDTEGRYVPVNLENIFSKYALTAPNKITLKELWNLTEGNRMAIDPFGWLANKVEWLLVYLLAKDEEGFVSKEAVRGVFDASFFEYCAKKNKEKADSRKQD

SEQ ID NO: 61218 - protein, 181 aa, Triticum aestivum
  peptide (1)..(181): Ceres Seq. ID no. 13661972
  misc_feature (1)..(169): Pfam Name: Caleosin related protein Pfam Description: Caleosin related protein
  misc_feature (1)..(181): Homolog of NCBI NO: 15226103 NR Description: RD20 protein [Arabidopsis thaliana]
MSVMQQHVAFFDQNGDGIVYPWETYAGFRDLGFNPISSVFWAIFINFAFSYVTLPSWLPSPLLPVYIDNIHKAKHGSDSSTYDTEGRYVPVNLENIFSKYALTAPNKITLKELWNLTEGNRMAIDPFGWLANKVEWLLVYLLAKDEEGFVSKEAVRGVFDASFFEYCAKKNKEKADSRKQD

SEQ ID NO: 61219 - DNA, 586 bp, Triticum aestivum
  misc_feature (1)..(586): Ceres Seq. ID no. 12623423
cctaccgacaaaagtagtggtgatcgcactgctcggtatggcagccaatgttcctcttggcatctggagggagcacaccacgaagttttcagtgcaatggtttgcggcggtccatgctgcagtgcctttcatagggatgctgaggaagtccatcctgatgccgaagagtgccatggcccttaccatagctgcctcaatattgggtcagacaattggttcaagagctgaacgtatcagattgaagagggcaaaattagcagcagagggccatggccatgaacatgctacccggattgaagctccggtgagcctgaaaactgggagctcaggtgctgtccagctctgggacccgctcggccttagggtcaaaggcggcgtgtctccaaccctggttccgactgttggtgccatgtattgatgagatgatcatgcttcgttgcggcggctgtgataattgtatcaagagtttcagaaattgtttcttgtattcattgttattgtgtcttgtaaaggattactggctacattggattcttctccccacatgagtttgggtgcaatcaataaatttcaccgtgtcctttgg

SEQ ID NO: 61220 - protein, 138 aa, Triticum aestivum
  peptide (1)..(138): Ceres Seq. ID no. 12623424
  misc_feature (1)..(81): Homolog of NCBI NO: 30694759 NR Description: expressed protein [Arabidopsis thaliana]
  misc_feature (1)..(81): Homolog of NCBI NO: 21954084 NR Description: unknown protein [Arabidopsis thaliana]
  misc_feature (1)..(81): Homolog of NCBI NO: 21595083 NR Description: unknown [Arabidopsis thaliana]
  misc_feature (1)..(127): Homolog of NCBI NO: 15234866 NR Description: putative protein
  misc_feature (1)..(125): Homolog of NCBI NO: 34897958 NR Description: contains ESTs AU068434(C30250)~similar to Oryza sativa chromosome 7,
  misc_feature (1)..(127): Homolog of NCBI NO: 34899856 NR Description: OJ1714_H10.10 [Oryza sativa (japonica
  misc_feature (1)..(127): Homolog of NCBI NO: 33146734 NR Description: unknown protein [Oryza sativa (japonica
  misc_feature (1)..(133): Homolog of NCBI NO: 37537220 NR Description: unknown protein [Oryza sativa (japonica
LPTKVVVIALLGMAANVPLGIWREHTTKFSVQWFAAVHAAVPFIGMLRKSILMPKSAMALTIAASILGQTIGSRAERIRLKRAKLAAEGHGHEHATRIEAPVSLKTGSSGAVQLWDPLGLRVKGGVSPTLVPTVGAMY

SEQ ID NO: 61221 - protein, 126 aa, Triticum aestivum
  peptide (1)..(126): Ceres Seq. ID no. 12623425
  misc_feature (1)..(69): Homolog of NCBI NO: 30694759 NR Description: expressed protein [Arabidopsis thaliana]
  misc_feature (1)..(69): Homolog of NCBI NO: 21954084 NR Description: unknown protein [Arabidopsis thaliana]
  misc_feature (1)..(69): Homolog of NCBI NO: 21595083 NR Description: unknown [Arabidopsis thaliana]
  misc_feature (1)..(115): Homolog of NCBI NO: 15234866 NR Description: putative protein
  misc_feature (1)..(113): Homolog of NCBI NO: 34897958 NR Description: contains ESTs AU068434(C30250)~similar to Oryza sativa chromosome 7,
  misc_feature (1)..(115): Homolog of NCBI NO: 34899856 NR Description: OJ1714_H10.10 [Oryza sativa (japonica
  misc_feature (1)..(115): Homolog of NCBI NO: 33146734 NR Description: unknown protein [Oryza sativa (japonica
  misc_feature (1)..(121): Homolog of NCBI NO: 37537220 NR Description: unknown protein [Oryza sativa (japonica
MAANVPLGIWREHTTKFSVQWFAAVHAAVPFIGMLRKSILMPKSAMALTIAASILGQTIGSRAERIRLKRAKLAAEGHGHEHATRIEAPVSLKTGSSGAVQLWDPLGLRVKGGVSPTLVPTVGAMY

SEQ ID NO: 61222 - protein, 93 aa, Triticum aestivum
  peptide (1)..(93): Ceres Seq. ID no. 12623426
  misc_feature (1)..(36): Homolog of NCBI NO: 30694759 NR Description: expressed protein [Arabidopsis thaliana]
  misc_feature (1)..(36): Homolog of NCBI NO: 21954084 NR Description: unknown protein [Arabidopsis thaliana]
  misc_feature (1)..(36): Homolog of NCBI NO: 21595083 NR Description: unknown [Arabidopsis thaliana]
  misc_feature (1)..(82): Homolog of NCBI NO: 15234866 NR Description: putative protein
  misc_feature (1)..(80): Homolog of NCBI NO: 34897958 NR Description: contains ESTs AU068434(C30250)~similar to Oryza sativa chromosome 7,
  misc_feature (1)..(82): Homolog of NCBI NO: 34899856 NR Description: OJ1714_H10.10 [Oryza sativa (japonica
  misc_feature (1)..(82): Homolog of NCBI NO: 33146734 NR Description: unknown protein [Oryza sativa (japonica
  misc_feature (1)..(88): Homolog of NCBI NO: 37537220 NR Description: unknown protein [Oryza sativa (japonica
MLRKSILMPKSAMALTIAASILGQTIGSRAERIRLKRAKLAAEGHGHEHATRIEAPVSLKTGSSGAVQLWDPLGLRVKGGVSPTLVPTVGAMY

SEQ ID NO: 61223 - DNA, 1102 bp, Triticum aestivum
  misc_feature (1)..(1102): Ceres Seq. ID no. 13664173
cctagaacatcctaatcgaaaaaccatttcccccaacacagaacagaattgaacaaagctagcaatcactcataggtggccaccatggacgtggcctcggtgcttctccccttcgtcctggcgctggtggcgatcccgatcttgctcgcgctacacgactggccacgcctcccaccgggcccgtgcccgtggccggtggtgggcaacctgcgccagatcaagcccgtgcggtgccgctgcttccaggagtgggcggagcggtatgggccaatcttctctgtgtggttcggctcctccctcaccgtcgtcgtctccacgccagagctggcaaaggaggtgctcaaggaccacgaccagcagctcgccaaccgcacccgcaaccgctccacccaacgcttcagccgcaacggccaggacctcgtctgggccgactacggcccgcactacatcaaggtgcgcaagctgtgcaatctcgagctcttcacgcagaagcgactcgaggcgctccgccccatccgggaggacgaggtcaccgccatggtctcgtccgtccaccgcgccgccaccggccccggtaatgaaggaaagccactggttgtcaggagtcaccttgccatggtgtctttcaacaatataacaaggctagtttttgggaagcggttcatgwrtdmaasayrdtracagttrgaacgaagaagggcaggagttcaagagtattgtcaacaacggtatcaaaattggtgcatctctctctattgctgaatatgtttggtacttgagatggttgtttccacttaatgaggagctttacaagacccacaatgagagaagggatcagctgaccaagaagatcatagaagagcatgcgaaggccctcaaggagagtggtagcaagcatcatttcgtggatgcactgttgactctcagagaacagtatgacctcagtgatgacacagttttcggacttctatgggtatgatggatgcccctttatatttaattaatatatcttcctacagtacattttgcttttagtgtcataagatgagatgtcgtgctaatttttaatgtggaataaaatatcaatgccttgtcagtgctc

SEQ ID NO: 61224 - protein, 198 aa, Triticum aestivum
  peptide (1)..(198): Ceres Seq. ID no. 15220282
  misc_feature (30)..(194): Pfam Name: Cytochrome P450 Pfam Description: Cytochrome P450
  misc_feature (11)..(194): Homolog of NCBI NO: 30688445 NR Description: cytochrome P450 98A3 [Arabidopsis thaliana]
  misc_feature (11)..(194): Homolog of NCBI NO: 22651521 NR Description: p-coumaroyl shikimate 3'-hydroxylase isoform 2
  misc_feature (3)..(194): Homolog of NCBI NO: 22651519 NR Description: p-coumaroyl shikimate 3'-hydroxylase isoform 1
  misc_feature (1)..(194): Homolog of NCBI NO: 40641242 NR Description: cytochrome P450 [Triticum aestivum]
  misc_feature (1)..(194): Homolog of NCBI NO: 5915857 NR Description: Cytochrome P450 98A1
  misc_feature (1)..(194): Homolog of NCBI NO: 40641238 NR Description: cytochrome P450 [Triticum aestivum]
  misc_feature (1)..(194): Homolog of NCBI NO: 40641240 NR Description: cytochrome P450 [Triticum aestivum]
  misc_feature (195)..(195): Xaa is any aa, unknown or other
  misc_feature (196)..(196): Xaa is any aa, unknown or other
  misc_feature (197)..(197): Xaa is any aa, unknown or other
  misc_feature (198)..(198): Xaa is any aa, unknown or other
MDVASVLLPFVLALVAIPILLALHDWPRLPPGPCPWPVVGNLRQIKPVRCRCFQEWAERYGPIFSVWFGSSLTVVVSTPELAKEVLKDHDQQLANRTRNRSTQRFSRNGQDLVWADYGPHYIKVRKLCNLELFTQKRLEALRPIREDEVTAMVSSVHRAATGPGNEGKPLVVRSHLAMVSFNNITRLVFGKRFMXXXX

SEQ ID NO: 61225 - protein, 124 aa, Triticum aestivum
  peptide (1)..(124): Ceres Seq. ID no. 15220283
  misc_feature (3)..(90): Pfam Name: Thymidine kinase from herpesvirus Pfam Description: Thymidine kinase from herpesvirus
MGQSSLCGSAPPSPSSSPRQSWQRRCSRTTTSSSPTAPATAPPNASAATARTSSGPTTARTTSRCASCAISSSSRRSDSRRSAPSGRTRSPPWSRPSTAPPPAPVMKESHWLSGVTLPWCLSTI

SEQ ID NO: 61226 - DNA, 625 bp, Triticum aestivum
  misc_feature (1)..(625): Ceres Seq. ID no. 12624483
acacgcccaacagctccacacatcgccacggtcttcttggctcctccgtccacagctagccagcccctccgctccgctccaccaccagcagccaaatggcgaagctgctggcggccggcgtcgcgttcctcctggccctcgccgcagcggcggcgctggccccgtctccggcctcggccttgaagggcgccggcgggctaggcctcggcggcgcggctgcggccgtggttatgcggcggggcgggcggacgtgccggggcacggtgggcgagtgcatggagtacttcggcgtggacggcgagggcgagagcgaggtggcggcgatggccggcaagcggcgggtgctgcaggacgggtccgggtacatcggctacgacgcgctgcggcgggacaacgtgccgtgctcgcagcgcggtgcctcctactacaactgccagcccggagccgaggccaacccctactcccgcggatgcagcgccatcacccagtgcaggggctgatccccttcattaaaccctgcttcattccttcttaccacctgcatgcctcatcaattagtattgctatctatctgtaacgtaatgtaatgtaatgtaattacaagaagaagatcaaacacttcttg

SEQ ID NO: 61227 - protein, 191 aa, Triticum aestivum
  peptide (1)..(191): Ceres Seq. ID no. 12624484
HAQQLHTSPRSSWLLRPQLASPSAPLHHQQPNGEAAGGRRRVPPGPRRSGGAGPVSGLGLEGRRRARPRRRGCGRGYAAGRADVPGHGGRVHGVLRRGRRGRERGGGDGRQAAGAAGRVRVHRLRRAAAGQRAVLAARCLLLQLPARSRGQPLLPRMQRHHPVQGLIPFIKPCFIPSYHLHASSISIAIYL

SEQ ID NO: 61228 - protein, 134 aa, Triticum aestivum
  peptide (1)..(134): Ceres Seq. ID no. 12624485
  misc_feature (69)..(134): Pfam Name: Rapid ALkalinization Factor (RALF) Pfam Description: Rapid ALkalinization Factor (RALF)
  misc_feature (14)..(133): Homolog of NCBI NO: 18397246 NR Description: expressed protein
  misc_feature (88)..(134): Homolog of NCBI NO: 37532832 NR Description: hypothetical protein [Oryza sativa (japonica
  misc_feature (37)..(133): Homolog of NCBI NO: 15218637 NR Description: hypothetical protein; protein id: At1g02900.1
  misc_feature (53)..(133): Homolog of NCBI NO: 18414528 NR Description: Expressed protein
  misc_feature (36)..(133): Homolog of NCBI NO: 16566316 NR Description: RALF precursor [Nicotiana tabacum]
  misc_feature (11)..(133): Homolog of NCBI NO: 28628203 NR Description: rapid alkalinization factor 1 precursor
  misc_feature (14)..(134): Homolog of NCBI NO: 34915062 NR Description: P0025H06.15 [Oryza sativa (japonica
  misc_feature (21)..(134): Homolog of NCBI NO: 34907152 NR Description: P0506E04.27 [Oryza sativa (japonica
  misc_feature (55)..(134): Homolog of NCBI NO: 34915066 NR Description: P0025H06.17 [Oryza sativa (japonica
  misc_feature (1)..(134): Homolog of NCBI NO: 34902918 NR Description: unnamed protein product [Oryza sativa (japonica
MAKLLAAGVAFLLALAAAAALAPSPASALKGAGGLGLGGAAAAVVMRRGGRTCRGTVGECMEYFGVDGEGESEVAAMAGKRRVLQDGSGYIGYDALRRDNVPCSQRGASYYNCQPGAEANPYSRGCSAITQCRG

SEQ ID NO: 61229 - DNA, 875 bp, Triticum aestivum
  misc_feature (1)..(875): Ceres Seq. ID no. 12624490
ttcgacgaggacgaacaacagtgcaacaaagaagtactctgcttttggatcaagaactcgagaacagagaggagaatcgatggccacgttcgcgacgtcaacggcggcagtgatgggatcggctcgccctggccgggtggccgggcctcggcggtgcgtggtggcgcgcgcgtccgccatgatggcggcaccggcgccggtggcggccgggaggacgcactacgaggtgctcggtgtgagtgccagggcgagcaggggggagatcaaggaggcgtaccggcgtctggccagggaggtgcacccggacgctgctggtggcggcggcgacgaggggttcatccggcttcacgcggcctacgccacgctggccgaccctgacgagcgcgcgcgctacgaccgggacgtggcctgccgcaccgccgggatgatgatgcggcggccggccgcggccgggccggcgttccggcggaggacgtgggagaccgaccagtgctggtaggaggggcggacacacgacgacacgtggttgctcagttctcccgttcccggccggcggccgtctggttcgatcaggcacggcgtcgaggttgtcgatggtcgccaggaaggaaaccgcgtcgtctgacgtgcgccgtccgatcagtgttggccggtccagatctaacgacgcggatgcgggagagctgtgaactgcgacgcgacgagaggcattttttgaagatctcttgcgttcgaccagcaaatgattagctactgcctgtaaattaatggcctgggaaatgttatagctctctgtggttatagaaggaaatatttaccccctccatgtcatagttttttgtttgccaagtaaggattaaagggttactaacttc

SEQ ID NO: 61230 - protein, 165 aa, Triticum aestivum
  peptide (1)..(165): Ceres Seq. ID no. 12624491
  misc_feature (74)..(135): Pfam Name: DnaJ domain Pfam Description: DnaJ domain
  misc_feature (71)..(133): Homolog of NCBI NO: 17229939 NR Description: DnaJ protein [Nostoc sp. PCC 7120]
  misc_feature (69)..(133): Homolog of NCBI NO: 22972332 NR Description: hypothetical protein [Chloroflexus aurantiacus]
  misc_feature (69)..(133): Homolog of NCBI NO: 144832 NR Description: dnaJ
  misc_feature (71)..(158): Homolog of NCBI NO: 29833781 NR Description: putative heat shock protein DnaJ
  misc_feature (28)..(148): Homolog of NCBI NO: 34894012 NR Description: P0672D08.16 [Oryza sativa (japonica
  misc_feature (74)..(165): Homolog of NCBI NO: 9843641 NR Description: J11 protein [Arabidopsis thaliana]
  misc_feature (55)..(165): Homolog of NCBI NO: 15231204 NR Description: DnaJ protein, putative
  misc_feature (74)..(165): Homolog of NCBI NO: 15233446 NR Description: DnaJ-like protein; protein id: At4g36040.1
  misc_feature (64)..(165): Homolog of NCBI NO: 15227919 NR Description: putative DnaJ protein
  misc_feature (23)..(165): Homolog of NCBI NO: 7488763 NR Description: DnaJ protein homolog - kidney bean (fragment)
STRTNNSATKKYSAFGSRTREQRGESMATFATSTAAVMGSARPGRVAGPRRCVVARASAMMAAPAPVAAGRTHYEVLGVSARASRGEIKEAYRRLAREVHPDAAGGGGDEGFIRLHAAYATLADPDERARYDRDVACRTAGMMMRRPAAAGPAFRRRTWETDQCW

SEQ ID NO: 61231 - protein, 139 aa, Triticum aestivum
  peptide (1)..(139): Ceres Seq. ID no. 12624492
  misc_feature (48)..(109): Pfam Name: DnaJ domain Pfam Description: DnaJ domain
  misc_feature (45)..(107): Homolog of NCBI NO: 17229939 NR Description: DnaJ protein [Nostoc sp. PCC 7120]
  misc_feature (43)..(107): Homolog of NCBI NO: 22972332 NR Description: hypothetical protein [Chloroflexus aurantiacus]
  misc_feature (43)..(107): Homolog of NCBI NO: 144832 NR Description: dnaJ
  misc_feature (45)..(132): Homolog of NCBI NO: 29833781 NR Description: putative heat shock protein DnaJ
  misc_feature (2)..(122): Homolog of NCBI NO: 34894012 NR Description: P0672D08.16 [Oryza sativa (japonica
  misc_feature (48)..(139): Homolog of NCBI NO: 9843641 NR Description: J11 protein [Arabidopsis thaliana]
  misc_feature (29)..(139): Homolog of NCBI NO: 15231204 NR Description: DnaJ protein, putative
  misc_feature (48)..(139): Homolog of NCBI NO: 15233446 NR Description: DnaJ-like protein; protein id: At4g36040.1
  misc_feature (38)..(139): Homolog of NCBI NO: 15227919 NR Description: putative DnaJ protein
  misc_feature (1)..(139): Homolog of NCBI NO: 7488763 NR Description: DnaJ protein homolog - kidney bean (fragment)
MATFATSTAAVMGSARPGRVAGPRRCVVARASAMMAAPAPVAAGRTHYEVLGVSARASRGEIKEAYRRLAREVHPDAAGGGGDEGFIRLHAAYATLADPDERARYDRDVACRTAGMMMRRPAAAGPAFRRRTWETDQCW

SEQ ID NO: 61232 - protein, 128 aa, Triticum aestivum
  peptide (1)..(128): Ceres Seq. ID no. 12624493
  misc_feature (37)..(98): Pfam Name: DnaJ domain Pfam Description: DnaJ domain
  misc_feature (34)..(96): Homolog of NCBI NO: 17229939 NR Description: DnaJ protein [Nostoc sp. PCC 7120]
  misc_feature (32)..(96): Homolog of NCBI NO: 22972332 NR Description: hypothetical protein [Chloroflexus aurantiacus]
  misc_feature (32)..(96): Homolog of NCBI NO: 144832 NR Description: dnaJ
  misc_feature (34)..(121): Homolog of NCBI NO: 29833781 NR Description: putative heat shock protein DnaJ
  misc_feature (1)..(111): Homolog of NCBI NO: 34894012 NR Description: P0672D08.16 [Oryza sativa (japonica
  misc_feature (37)..(128): Homolog of NCBI NO: 9843641 NR Description: J11 protein [Arabidopsis thaliana]
  misc_feature (18)..(128): Homolog of NCBI NO: 15231204 NR Description: DnaJ protein, putative
  misc_feature (37)..(128): Homolog of NCBI NO: 15233446 NR Description: DnaJ-like protein; protein id: At4g36040.1
  misc_feature (27)..(128): Homolog of NCBI NO: 15227919 NR Description: putative DnaJ protein
  misc_feature (1)..(128): Homolog of NCBI NO: 7488763 NR Description: DnaJ protein homolog - kidney bean (fragment)
MGSARPGRVAGPRRCVVARASAMMAAPAPVAAGRTHYEVLGVSARASRGEIKEAYRRLAREVHPDAAGGGGDEGFIRLHAAYATLADPDERARYDRDVACRTAGMMMRRPAAAGPAFRRRTWETDQCW

SEQ ID NO: 61233 - DNA, 990 bp, Triticum aestivum
  misc_feature (1)..(990): Ceres Seq. ID no. 13661987
atatctcaccccccgctccattgatagttcgtctcatcttagcttaatatccatggcagcaaagatggcgaagaacgtggacaagccactcttcacggcgacgttcaacgtccaggccagctccaccgactatgtcaccttcatcaccggcatccgcaacaagctccgcaacccggggcaatcctcccacaaccgccccgtgctaccgccgatcgagcccaacgtcccgccgagcaggtggttccacatcgtgctcaagacatcgccggccaacaccgggctcacactcgccacccgcgccgacaacctctattgggagggcttcaagagcagcgacggcacctggtgggagctcacccccggccttatccccggtgccacctatgtcgggtttggcggcacctaccgcgacctcctcggcgacaccgacaagctgaccaacgttgccctcggccggcagcagatggccgacgcggtgactgcgctccacgggcgcaccaaggccgacaagacctccggcccgaagcagcagcaggcgagggaagcggtgacgacgctgctcctcatggtgcacgaggccacgcggttccagaccgtgtcggggttcgtggctggcctgctgcaccccaagacggtggagaagaagagcgggaagatctccaacgagctaaaggcccaggtgaacgggtggcaggacctgtccgaagcgctgttgaagacggatgcgaagcccccggcgggaaagccgccagcaaagttcacgccgatcgagaagatgggtgtgaggacggcagagcaggcggccgccaccctggggatcctactgttcgtccaggtgcccggtgggatgacagtggctcaggcgctggagctgtttcataagagtggggggaaataggtagttgtgcaggtatatctgcatgggtatcgtataagtcaaataaacatgtcacagagtgactaaatgatataaataaataaacatgtcgc

SEQ ID NO: 61234 - protein, 298 aa, Triticum aestivum
  peptide (1)..(298): Ceres Seq. ID no. 13661988
  misc_feature (26)..(282): Pfam Name: Ribosome inactivating protein Pfam Description: Ribosome inactivating protein
  misc_feature (29)..(167): Homolog of NCBI NO: 132600 NR Description: Ribosome-inactivating protein precursor (rRNA
  misc_feature (15)..(274): Homolog of NCBI NO: 7442155 NR Description: rRNA N-glycosidase (EC 3.2.2.22) - maize
  misc_feature (15)..(274): Homolog of NCBI NO: 7331166 NR Description: ribosome-inactivating protein [Zea mays]
  misc_feature (182)..(298): Homolog of NCBI NO: 167034 NR Description: ribosome-inactivating protein
  misc_feature (29)..(293): Homolog of NCBI NO: 34896052 NR Description: unnamed protein product [Oryza sativa (japonica
  misc_feature (29)..(293): Homolog of NCBI NO: 34896138 NR Description: putative protein synthesis inhibitor II
  misc_feature (18)..(298): Homolog of NCBI NO: 132577 NR Description: Protein synthesis inhibitor I
  misc_feature (19)..(298): Homolog of NCBI NO: 132580 NR Description: Protein synthesis inhibitor II
  misc_feature (19)..(298): Homolog of NCBI NO: 7442154 NR Description: protein synthesis inhibitor - rye
  misc_feature (22)..(298): Homolog of NCBI NO: 479388 NR Description: tritin - wheat
YLTPRSIDSSSHLSLISMAAKMAKNVDKPLFTATFNVQASSTDYVTFITGIRNKLRNPGQSSHNRPVLPPIEPNVPPSRWFHIVLKTSPANTGLTLATRADNLYWEGFKSSDGTWWELTPGLIPGATYVGFGGTYRDLLGDTDKLTNVALGRQQMADAVTALHGRTKADKTSGPKQQQAREAVTTLLLMVHEATRFQTVSGFVAGLLHPKTVEKKSGKISNELKAQVNGWQDLSEALLKTDAKPPAGKPPAKFTPIEKMGVRTAEQAAATLGILLFVQVPGGMTVAQALELFHKSGGK

SEQ ID NO: 61235 - protein, 281 aa, Triticum aestivum
  peptide (1)..(281): Ceres Seq. ID no. 13661989
  misc_feature (9)..(265): Pfam Name: Ribosome inactivating protein Pfam Description: Ribosome inactivating protein
  misc_feature (12)..(150): Homolog of NCBI NO: 132600 NR Description: Ribosome-inactivating protein precursor (rRNA
  misc_feature (1)..(257): Homolog of NCBI NO: 7442155 NR Description: rRNA N-glycosidase (EC 3.2.2.22) - maize
  misc_feature (1)..(257): Homolog of NCBI NO: 7331166 NR Description: ribosome-inactivating protein [Zea mays]
  misc_feature (165)..(281): Homolog of NCBI NO: 167034 NR Description: ribosome-inactivating protein
  misc_feature (12)..(276): Homolog of NCBI NO: 34896052 NR Description: unnamed protein product [Oryza sativa (japonica
  misc_feature (12)..(276): Homolog of NCBI NO: 34896138 NR Description: putative protein synthesis inhibitor II
  misc_feature (1)..(281): Homolog of NCBI NO: 132577 NR Description: Protein synthesis inhibitor I
  misc_feature (2)..(281): Homolog of NCBI NO: 132580 NR Description: Protein synthesis inhibitor II
  misc_feature (2)..(281): Homolog of NCBI NO: 7442154 NR Description: protein synthesis inhibitor - rye
  misc_feature (5)..(281): Homolog of NCBI NO: 479388 NR Description: tritin - wheat
MAAKMAKNVDKPLFTATFNVQASSTDYVTFITGIRNKLRNPGQSSHNRPVLPPIEPNVPPSRWFHIVLKTSPANTGLTLATRADNLYWEGFKSSDGTWWELTPGLIPGATYVGFGGTYRDLLGDTDKLTNVALGRQQMADAVTALHGRTKADKTSGPKQQQAREAVTTLLLMVHEATRFQTVSGFVAGLLHPKTVEKKSGKISNELKAQVNGWQDLSEALLKTDAKPPAGKPPAKFTPIEKMGVRTAEQAAATLGILLFVQVPGGMTVAQALELFHKSGGK

SEQ ID NO: 61236 - protein, 277 aa, Triticum aestivum
  peptide (1)..(277): Ceres Seq. ID no. 13661990
  misc_feature (5)..(261): Pfam Name: Ribosome inactivating protein Pfam Description: Ribosome inactivating protein
  misc_feature (8)..(146): Homolog of NCBI NO: 132600 NR Description: Ribosome-inactivating protein precursor (rRNA
  misc_feature (1)..(253): Homolog of NCBI NO: 7442155 NR Description: rRNA N-glycosidase (EC 3.2.2.22) - maize
  misc_feature (1)..(253): Homolog of NCBI NO: 7331166 NR Description: ribosome-inactivating protein [Zea mays]
  misc_feature (161)..(277): Homolog of NCBI NO: 167034 NR Description: ribosome-inactivating protein
  misc_feature (8)..(272): Homolog of NCBI NO: 34896052 NR Description: unnamed protein product [Oryza sativa (japonica
  misc_feature (8)..(272): Homolog of NCBI NO: 34896138 NR Description: putative protein synthesis inhibitor II
  misc_feature (1)..(277): Homolog of NCBI NO: 132577 NR Description: Protein synthesis inhibitor I
  misc_feature (1)..(277): Homolog of NCBI NO: 132580 NR Description: Protein synthesis inhibitor II
  misc_feature (1)..(277): Homolog of NCBI NO: 7442154 NR Description: protein synthesis inhibitor - rye
  misc_feature (1)..(277): Homolog of NCBI NO: 479388 NR Description: tritin - wheat
MAKNVDKPLFTATFNVQASSTDYVTFITGIRNKLRNPGQSSHNRPVLPPIEPNVPPSRWFHIVLKTSPANTGLTLATRADNLYWEGFKSSDGTWWELTPGLIPGATYVGFGGTYRDLLGDTDKLTNVALGRQQMADAVTALHGRTKADKTSGPKQQQAREAVTTLLLMVHEATRFQTVSGFVAGLLHPKTVEKKSGKISNELKAQVNGWQDLSEALLKTDAKPPAGKPPAKFTPIEKMGVRTAEQAAATLGILLFVQVPGGMTVAQALELFHKSGGK

SEQ ID NO: 61237 - DNA, 712 bp, Triticum aestivum
  misc_feature (1)..(712): Ceres Seq. ID no. 12624501
cagacattgctggccacttgcccaacagcttcttcgtctcgaattcctcctgcaagctagagtagtagcgcacggagacgagatctagagggaacaccggcggcccttggccttgggggagggagatctagggatggtgggggtgagcgccgggacgggggcaatgggctccctcctcgccaagctcaccgcgcttctcagcgacgagtacaagctcctgaagcgcgtccgaaaggagatcgagttcctcaagtgcgagctcgagaggatgcggatcctgttggagaggctggcggacatggaggggaggctcgacggcctggccaggggctggagagacagcgtgcgcgacctcagctacgacatggaagactgcatcgaccgcttcatggaccggcttggcagcggcgacgccaaacccaagttcatgaagaggacggcgcgccggctcgagactctgtgggcgcgccatgacatcgcgacccagatcaaggagctcatggctcgcgtcatggaggaaatgagcggcgtgacagatactgcatttttcctaactcttgcacttgttgttgttgttgttgaggatcttaactcttgcacttgtatgtatttctggattttttttagaaaaggaggatgacccccggcctctgcatctgggagatgcatacggccactttattgattattctggagaaccatacaaagtatt

SEQ ID NO: 61238 - protein, 168 aa, Triticum aestivum
  peptide (1)..(168): Ceres Seq. ID no. 12624502
  misc_feature (4)..(127): Homolog of NCBI NO: 37530808 NR Description: putative disease resistance protein
  misc_feature (4)..(127): Homolog of NCBI NO: 20514810 NR Description: Putative disease resistance protein
  misc_feature (5)..(129): Homolog of NCBI NO: 40253777 NR Description: disease resistance protein RPM1-like
  misc_feature (4)..(127): Homolog of NCBI NO: 37530848 NR Description: putative disease resistance protein RPM1
  misc_feature (4)..(128): Homolog of NCBI NO: 38636973 NR Description: putative RGH1A [Oryza sativa (japonica
  misc_feature (9)..(128): Homolog of NCBI NO: 40253375 NR Description: putative disease resistance protein RPM1
  misc_feature (1)..(129): Homolog of NCBI NO: 38636971 NR Description: putative NBS-LRR disease resistance protein
  misc_feature (4)..(128): Homolog of NCBI NO: 31126724 NR Description: putative CC-NBS-LRR resistance protein
  misc_feature (5)..(128): Homolog of NCBI NO: 4680207 NR Description: disease resistance protein RPM1 homolog [Sorghum
  misc_feature (1)..(128): Homolog of NCBI NO: 40253400 NR Description: putative MLA1 [Oryza sativa (japonica
MVGVSAGTGAMGSLLAKLTALLSDEYKLLKRVRKEIEFLKCELERMRILLERLADMEGRLDGLARGWRDSVRDLSYDMEDCIDRFMDRLGSGDAKPKFMKRTARRLETLWARHDIATQIKELMARVMEEMSGVTDTAFFLTLALVVVVVEDLNSCTCMYFWIFFRKGG

SEQ ID NO: 61239 - protein, 158 aa, Triticum aestivum
  peptide (1)..(158): Ceres Seq. ID no. 12624503
  misc_feature (1)..(117): Homolog of NCBI NO: 37530808 NR Description: putative disease resistance protein
  misc_feature (1)..(117): Homolog of NCBI NO: 20514810 NR Description: Putative disease resistance protein
  misc_feature (1)..(119): Homolog of NCBI NO: 40253777 NR Description: disease resistance protein RPM1-like
  misc_feature (1)..(117): Homolog of NCBI NO: 37530848 NR Description: putative disease resistance protein RPM1
  misc_feature (1)..(118): Homolog of NCBI NO: 38636973 NR Description: putative RGH1A [Oryza sativa (japonica
  misc_feature (1)..(118): Homolog of NCBI NO: 40253375 NR Description: putative disease resistance protein RPM1
  misc_feature (1)..(119): Homolog of NCBI NO: 38636971 NR Description: putative NBS-LRR disease resistance protein
  misc_feature (1)..(118): Homolog of NCBI NO: 31126724 NR Description: putative CC-NBS-LRR resistance protein
  misc_feature (1)..(118): Homolog of NCBI NO: 4680207 NR Description: disease resistance protein RPM1 homolog [Sorghum
  misc_feature (1)..(118): Homolog of NCBI NO: 40253400 NR Description: putative MLA1 [Oryza sativa (japonica
MGSLLAKLTALLSDEYKLLKRVRKEIEFLKCELERMRILLERLADMEGRLDGLARGWRDSVRDLSYDMEDCIDRFMDRLGSGDAKPKFMKRTARRLETLWARHDIATQIKELMARVMEEMSGVTDTAFFLTLALVVVVVEDLNSCTCMYFWIFFRKGG

SEQ ID NO: 61240 - protein, 123 aa, Triticum aestivum
  peptide (1)..(123): Ceres Seq. ID no. 12624504
  misc_feature (1)..(82): Homolog of NCBI NO: 37530808 NR Description: putative disease resistance protein
  misc_feature (1)..(82): Homolog of NCBI NO: 20514810 NR Description: Putative disease resistance protein
  misc_feature (1)..(84): Homolog of NCBI NO: 40253777 NR Description: disease resistance protein RPM1-like
  misc_feature (1)..(82): Homolog of NCBI NO: 37530848 NR Description: putative disease resistance protein RPM1
  misc_feature (1)..(83): Homolog of NCBI NO: 38636973 NR Description: putative RGH1A [Oryza sativa (japonica
  misc_feature (1)..(83): Homolog of NCBI NO: 40253375 NR Description: putative disease resistance protein RPM1
  misc_feature (1)..(84): Homolog of NCBI NO: 38636971 NR Description: putative NBS-LRR disease resistance protein
  misc_feature (1)..(83): Homolog of NCBI NO: 31126724 NR Description: putative CC-NBS-LRR resistance protein
  misc_feature (1)..(83): Homolog of NCBI NO: 4680207 NR Description: disease resistance protein RPM1 homolog [Sorghum
  misc_feature (1)..(83): Homolog of NCBI NO: 40253400 NR Description: putative MLA1 [Oryza sativa (japonica
MRILLERLADMEGRLDGLARGWRDSVRDLSYDMEDCIDRFMDRLGSGDAKPKFMKRTARRLETLWARHDIATQIKELMARVMEEMSGVTDTAFFLTLALVVVVVEDLNSCTCMYFWIFFRKGG

SEQ ID NO: 61241 - DNA, 911 bp, Triticum aestivum
  misc_feature (1)..(911): Ceres Seq. ID no. 12623607
aacaagcgagcgaacacacagcatcgtcgcacgccattgcttagtagccagggaaaaagagaagccgatctgattctgctctcatcacacacaccgccatgccggggagagaagacgaagccttcgctgacgaggagagctcgcagtgcagcagcggctgccagtccggctggaccctgtacctggagcattccgggtcaggccagcagcaacgtcgcacgctgccatacgtgcagcccggcgacgtcctgaggcagatgctgccgccggtggaatactccgacgacgaggaggaggattctatggtctccgacgcgtcctccggcctgccgccgcacctgcgcggcgaagaggaggagctgctgcaagtgcaaggtcagaccagcatgctttcacagcagcgtcggtcggccttcggcggcgaccaatgccactccggctggggtggcagtcgtcacagcgcgagcctctctggctcccgttccttcatctccacgaggtctcgtagttcgggcgatatgaggagcaggaagaagaggagggccgtcgtccaacggcaggatgagccggcgacgcgtcgccatggtgtcttcgacgacgacgacgatctccacgacaccgcgagttcgtccgacgtcattgctcccgcggcagtggtggaagctatgaaggatggtatggacctgcagccaagctgcgccttctcggttcgaagcaccggcatgcagggtctcgcgatgctgcaccataactcatgaagtagctagctagggaacgagaacggccttcttttgtcggccgcatgtataaccagatcgcccatagcctcacacgtcacctagcttgtttgtttccaagttatatgtacgtatgcaaatcgtccgtactcgagacaagaaccaacagttttg

SEQ ID NO: 61242 - protein, 219 aa, Triticum aestivum
  peptide (1)..(219): Ceres Seq. ID no. 12623608
  misc_feature (12)..(209): Homolog of NCBI NO: 38347493 NR Description: OSJNBa0091C07.3 [Oryza sativa (japonica
MPGREDEAFADEESSQCSSGCQSGWTLYLEHSGSGQQQRRTLPYVQPGDVLRQMLPPVEYSDDEEEDSMVSDASSGLPPHLRGEEEELLQVQGQTSMLSQQRRSAFGGDQCHSGWGGSRHSASLSGSRSFISTRSRSSGDMRSRKKRRAVVQRQDEPATRRHGVFDDDDDLHDTASSSDVIAPAAVVEAMKDGMDLQPSCAFSVRSTGMQGLAMLHHNS

SEQ ID NO: 61243 - protein, 166 aa, Triticum aestivum
  peptide (1)..(166): Ceres Seq. ID no. 12623609
  misc_feature (1)..(156): Homolog of NCBI NO: 38347493 NR Description: OSJNBa0091C07.3 [Oryza sativa (japonica
MLPPVEYSDDEEEDSMVSDASSGLPPHLRGEEEELLQVQGQTSMLSQQRRSAFGGDQCHSGWGGSRHSASLSGSRSFISTRSRSSGDMRSRKKRRAVVQRQDEPATRRHGVFDDDDDLHDTASSSDVIAPAAVVEAMKDGMDLQPSCAFSVRSTGMQGLAMLHHNS

SEQ ID NO: 61244 - protein, 151 aa, Triticum aestivum
  peptide (1)..(151): Ceres Seq. ID no. 12623610
  misc_feature (1)..(141): Homolog of NCBI NO: 38347493 NR Description: OSJNBa0091C07.3 [Oryza sativa (japonica
MVSDASSGLPPHLRGEEEELLQVQGQTSMLSQQRRSAFGGDQCHSGWGGSRHSASLSGSRSFISTRSRSSGDMRSRKKRRAVVQRQDEPATRRHGVFDDDDDLHDTASSSDVIAPAAVVEAMKDGMDLQPSCAFSVRSTGMQGLAMLHHNS

SEQ ID NO: 61245 - DNA, 760 bp, Triticum aestivum
  misc_feature (1)..(760): Ceres Seq. ID no. 13661991
atgaaattagaagctttaagttcctctctgttctcaacttgtcaccgaagattacaaacagggtctctcataaatggccgctaggtttcttagtttgagacgagctttgtctgtctacctcactaaccaacaacctcgtgttcctctgtttcaagcaggtaagcttgcgcaatcaaagtcactcttgagcagagattatgcttatgggggattactacagaggcactttagtgaaactgcagcaaccaatggctgctgcaactcttcaaactctgctgcggaacttaccaaagctccctccacctcccctgcaacagcctatgaggagctgattgtgaagtacaagtcccagttgaaaataaacccgaggcatgacttcatgatggtctttacttgcaaggtctgtgagacgaggtcgatgaagatggcgagcagagagtcttacgagaagggagttgtggtggtacgatgcgaaggatgtgataatctacatttgattgcagaccgtcgtggttggtttggagagccggggagcgtggaggagtttcttgctgctcaaggggaagagttcaagaaaggatccatggattctcttagccttacagttgaagacttggctggagagaagatgtccagtgaatagagcaacaagctcttcgttgctttagctattaggacttgaaccctgcagagaaaataaaatattttatatatttttattttaatttttgagacaaattaagatacataatatttggct

SEQ ID NO: 61246 - protein, 189 aa, Triticum aestivum
  peptide (1)..(189): Ceres Seq. ID no. 15220150
  misc_feature (104)..(165): Pfam Name: DNL zinc finger Pfam Description: DNL zinc finger
  misc_feature (103)..(189): Homolog of NCBI NO: 6324019 NR Description: Protein required for cell viability; Ynl310cp
  misc_feature (106)..(168): Homolog of NCBI NO: 17553552 NR Description: Protein required for cell viability like
  misc_feature (95)..(169): Homolog of NCBI NO: 19113862 NR Description: hypothetical protein [Schizosaccharomyces pombe]
  misc_feature (104)..(165): Homolog of NCBI NO: 24642261 NR Description: CG12379-PA [Drosophila melanogaster]
  misc_feature (95)..(179): Homolog of NCBI NO: 34853079 NR Description: similar to CG12379-PA [Rattus norvegicus]
  misc_feature (103)..(181): Homolog of NCBI NO: 23485607 NR Description: Drosophila melanogaster CG12379 gene product
  misc_feature (84)..(181): Homolog of NCBI NO: 23509418 NR Description: hypothetical protein [Plasmodium falciparum 3D7]
  misc_feature (95)..(168): Homolog of NCBI NO: 31212801 NR Description: ENSANGP00000021116 [Anopheles gambiae]
  misc_feature (95)..(179): Homolog of NCBI NO: 12835133 NR Description: unnamed protein product [Mus musculus]
  misc_feature (1)..(189): Homolog of NCBI NO: 29028810 NR Description: At3g54830 [Arabidopsis thaliana]
MAARFLSLRRALSVYLTNQQPRVPLFQAGKLAQSKSLLSRDYAYGGLLQRHFSETAATNGCCNSSNSAAELTKAPSTSPATAYEELIVKYKSQLKINPRHDFMMVFTCKVCETRSMKMASRESYEKGVVVVRCEGCDNLHLIADRRGWFGEPGSVEEFLAAQGEEFKKGSMDSLSLTVEDLAGEKMSSE

SEQ ID NO: 61247 - DNA, 525 bp, Triticum aestivum
  misc_feature (1)..(525): Ceres Seq. ID no. 13664178
atcactacttcttcatctccattcaaaatttctatcctcagcttctactaggaagcacactcgtgagacatggccgccgcagtttccaccgtcggtgccatcaacagagctccgttgagcttgaacgggtcaggagcaggagctgcttcagtcccagctacgaccttcttgggaaagaaagttgtaaccgcgtcgagattcgcacagaacaacaagaagagcaacggatcattcaaggtggttgccgtgaaagaagacaaacaaaccgatggagacagatggaggggacttgcctacgacatctctgatgatcaacaagacatcaccagaggcaaaggtatggttgactcagtcttccaagctcctatgggaaccggaactcacmrcgccgtccttagctcctatgagtacctcagccaaggtcttaagcagtacaacttggacaacatgatggatgggctttacattgcccctgctttcatggacaagcttgttgttcacatcaccragnacttcttgactttg

SEQ ID NO: 61248 - protein, 152 aa, Triticum aestivum
  peptide (1)..(152): Ceres Seq. ID no. 13664179
  misc_feature (1)..(151): Homolog of NCBI NO: 3914605 NR Description: Ribulose bisphosphate carboxylase/oxygenase
  misc_feature (1)..(151): Homolog of NCBI NO: 32481067 NR Description: Rubisco activase beta form precursor [Larrea
  misc_feature (1)..(151): Homolog of NCBI NO: 32481065 NR Description: Rubisco activase alpha form precursor [Larrea
  misc_feature (1)..(151): Homolog of NCBI NO: 12620881 NR Description: ribulose-1,5-bisphosphate carboxylase/oxygenase
  misc_feature (1)..(151): Homolog of NCBI NO: 23308421 NR Description: At2g39730/T5I7.3 [Arabidopsis thaliana]
  misc_feature (1)..(151): Homolog of NCBI NO: 30687999 NR Description: auxin-regulated protein [Arabidopsis thaliana]
  misc_feature (1)..(151): Homolog of NCBI NO: 30687995 NR Description: auxin-regulated protein [Arabidopsis thaliana]
  misc_feature (1)..(151): Homolog of NCBI NO: 18405145 NR Description: auxin-regulated protein [Arabidopsis thaliana]
  misc_feature (1)..(151): Homolog of NCBI NO: 15450379 NR Description: At2g39730/T5I7.3 [Arabidopsis thaliana]
  misc_feature (1)..(151): Homolog of NCBI NO: 81660 NR Description: ribulose-bisphosphate carboxylase activase (EC
  misc_feature (106)..(106): Xaa is any aa, unknown or other
  misc_feature (147)..(147): Xaa is any aa, unknown or other
  misc_feature (148)..(148): Xaa is any aa, unknown or other
MAAAVSTVGAINRAPLSLNGSGAGAASVPATTFLGKKVVTASRFAQNNKKSNGSFKVVAVKEDKQTDGDRWRGLAYDISDDQQDITRGKGMVDSVFQAPMGTGTHXAVLSSYEYLSQGLKQYNLDNMMDGLYIAPAFMDKLVVHITXXFLTL

SEQ ID NO: 61249 - protein, 101 aa, Triticum aestivum
  peptide (1)..(101): Ceres Seq. ID no. 13664180
HYFFISIQNFYPQLLLGSTLVRHGRRSFHRRCHQQSSVELERVRSRSCFSPSYDLLGKESCNRVEIRTEQQEEQRIIQGGCRERRQTNRWRQMEGTCLRHL

SEQ ID NO: 61250 - DNA, 531 bp, Triticum aestivum
  misc_feature (1)..(531): Ceres Seq. ID no. 12784493
acacaactggtcctacaacgcgcgaacacacacaaacccaagcacatagtaacatcacagatcggcatggcgcacttccaggaggtggactactgctcggaggaggtgagggcggtgggcaacccggcccgccgcggctgcggcggcgtgcaggagcacatcgtcagggagacgttcgtgcaggagttcgacaccgccggccgccgccacggccaccacggccgcggctccggccacttcgaggtgcgcgagagcaggctcgaggaggacgtcaacacctgcaccggcgagttccacgagcgcaaggagaacttcgtcgtcagggccgatgactgagcttacacgtaacggagcacactaccatgtgtgtatatgtcagcagcatatgtatgtgtgatgttgcgcacagtcgtatagcgtatgcatgcgtgcgtgcttggcggccatcagcccctatcgcgcgcgcgtgcagcgcttaaataagcgctctaatcgtgaaccagaataaagcttctcgtgattattattccg

SEQ ID NO: 61251 - protein, 111 aa, Triticum aestivum
  peptide (1)..(111): Ceres Seq. ID no. 12784494
  misc_feature (22)..(110): Homolog of NCBI NO: 34906856 NR Description: P0470A12.5 [Oryza sativa (japonica
TQLVLQRANTHKPKHIVTSQIGMAHFQEVDYCSEEVRAVGNPARRGCGGVQEHIVRETFVQEFDTAGRRHGHHGRGSGHFEVRESRLEEDVNTCTGEFHERKENFVVRADD

SEQ ID NO: 61252 - protein, 109 aa, Triticum aestivum
  peptide (1)..(109): Ceres Seq. ID no. 12784495
TTGPTTREHTQTQAHSNITDRHGALPGGGLLLGGGEGGGQPGPPRLRRRAGAHRQGDVRAGVRHRRPPPRPPRPRLRPLRGAREQARGGRQHLHRRVPRAQGELRRQGR

SEQ ID NO: 61253 - protein, 89 aa, Triticum aestivum
  peptide (1)..(89): Ceres Seq. ID no. 12784496
  misc_feature (1)..(88): Homolog of NCBI NO: 34906856 NR Description: P0470A12.5 [Oryza sativa (japonica
MAHFQEVDYCSEEVRAVGNPARRGCGGVQEHIVRETFVQEFDTAGRRHGHHGRGSGHFEVRESRLEEDVNTCTGEFHERKENFVVRADD

SEQ ID NO: 61254 - DNA, 1137 bp, Triticum aestivum
  misc_feature (1)..(1137): Ceres Seq. ID no. 13661426
cctttcgatttcttcgcttgtggcgagtcacagcgttccaatttcccagcacttaactcgcccgacctacccaccaaccaccccgcgtcgagactgaccagactgaattgatcgataataaatcagcacgctgcacgcgctgggggtctgagtcagaggaggaagaagatcgaggagcagctgattcgttcgcacaaagcgccgggatcagatccatctctccgcgcgggatgtctgaggtggcggcgatggcggggcaggcgtacatgagacagctctccaagcaccctctccgcaccaaggccatcacctccggggtgctggcgggctgcagcgacgccgtcgcccagaagatctccggcgtcaagaggctccagctcaggaggctcctcctcataatgctctatggatttgcatacgcaggaccattcggtcattttttccacaagcttatggacaagattttcaagggacagaagaaaggaaaagaaactacagccaagaaggtcatagtggagcagctaactgtatcaccatggaacaatatgatgttcatgatgtactacggtctggtagttgaagggaggccattcgggcaagtaaagagcaaggtcaagaaggactttgcaaacatccaattgacagcttggaagttctggccaatagttagctggatcaactatgagtacatgccactccagctccgagttcttttcgccagctccgttgcatcatgctgggcagtgtttctgaacctgaaagcagcaagatccattgccggcgctagtaagaatgcatagaagaaggttggaaggaaggggctagtgctacattgtatttctagctaattaagtatccactagcgattttctcagttcatttttatcgctcagtttgtatttatgtttctatttgaaccccttgagcatcgagaacctagagttaatgtttcaactaagtatgccagtatgtcaatgtgaagagtccctttcttgccaccgggaaaaaaaccctacaaagcaaaaattatcctctacaaggtaccatgtttgttattcctttgggaggaaaatagggactttactgggatctgacgcgtggaaataaatgaacatgctctgaggtttgtagaagctc

SEQ ID NO: 61255 - protein, 189 aa, Triticum aestivum
  peptide (1)..(189): Ceres Seq. ID no. 13661427
  misc_feature (112)..(182): Pfam Name: Mpv17 / PMP22 family Pfam Description: Mpv17 / PMP22 family
  misc_feature (1)..(174): Homolog of NCBI NO: 8923892 NR Description: peroxisomal membrane protein 2, 22kDa
  misc_feature (2)..(174): Homolog of NCBI NO: 6679577 NR Description: peroxisomal membrane protein 2
  misc_feature (2)..(174): Homolog of NCBI NO: 10954089 NR Description: 22 kDa peroxisomal membrane protein PMP22 [Mus
  misc_feature (9)..(188): Homolog of NCBI NO: 28828632 NR Description: hypothetical protein [Dictyostelium discoideum]
  misc_feature (12)..(183): Homolog of NCBI NO: 21553640 NR Description: contains similarity to 22 kDa peroxisomal
  misc_feature (12)..(183): Homolog of NCBI NO: 18422298 NR Description: peroxisomal membrane protein family (22 kDa)
  misc_feature (11)..(181): Homolog of NCBI NO: 31215743 NR Description: ENSANGP00000012562 [Anopheles gambiae]
  misc_feature (28)..(166): Homolog of NCBI NO: 7485192 NR Description: hypothetical protein d13195c - Arabidopsis
  misc_feature (10)..(189): Homolog of NCBI NO: 15233520 NR Description: peroxisomal membrane protein (22-kDa)(PMP22)
  misc_feature (28)..(189): Homolog of NCBI NO: 30682784 NR Description: expressed protein [Arabidopsis thaliana]
MSEVAAMAGQAYMRQLSKHPLRTKAITSGVLAGCSDAVAQKISGVKRLQLRRLLLIMLYGFAYAGPFGHFFHKLMDKIFKGQKKGKETTAKKVIVEQLTVSPWNNMMFMMYYGLVVEGRPFGQVKSKVKKDFANIQLTAWKFWPIVSWINYEYMPLQLRVLFASSVASCWAVFLNLKAARSIAGASKNA

SEQ ID NO: 61256 - protein, 183 aa, Triticum aestivum
  peptide (1)..(183): Ceres Seq. ID no. 13661428
  misc_feature (106)..(176): Pfam Name: Mpv17 / PMP22 family Pfam Description: Mpv17 / PMP22 family
  misc_feature (1)..(168): Homolog of NCBI NO: 8923892 NR Description: peroxisomal membrane protein 2, 22kDa
  misc_feature (1)..(168): Homolog of NCBI NO: 6679577 NR Description: peroxisomal membrane protein 2
  misc_feature (1)..(168): Homolog of NCBI NO: 10954089 NR Description: 22 kDa peroxisomal membrane protein PMP22 [Mus
  misc_feature (3)..(182): Homolog of NCBI NO: 28828632 NR Description: hypothetical protein [Dictyostelium discoideum]
  misc_feature (6)..(177): Homolog of NCBI NO: 21553640 NR Description: contains similarity to 22 kDa peroxisomal
  misc_feature (6)..(177): Homolog of NCBI NO: 18422298 NR Description: peroxisomal membrane protein family (22 kDa)
  misc_feature (5)..(175): Homolog of NCBI NO: 31215743 NR Description: ENSANGP00000012562 [Anopheles gambiae]
  misc_feature (22)..(160): Homolog of NCBI NO: 7485192 NR Description: hypothetical protein d13195c - Arabidopsis
  misc_feature (4)..(183): Homolog of NCBI NO: 15233520 NR Description: peroxisomal membrane protein (22-kDa)(PMP22)
  misc_feature (22)..(183): Homolog of NCBI NO: 30682784 NR Description: expressed protein [Arabidopsis thaliana]
MAGQAYMRQLSKHPLRTKAITSGVLAGCSDAVAQKISGVKRLQLRRLLLIMLYGFAYAGPFGHFFHKLMDKIFKGQKKGKETTAKKVIVEQLTVSPWNNMMFMMYYGLVVEGRPFGQVKSKVKKDFANIQLTAWKFWPIVSWINYEYMPLQLRVLFASSVASCWAVFLNLKAARSIAGASKNA

SEQ ID NO: 61257 - protein, 177 aa, Triticum aestivum
  peptide (1)..(177): Ceres Seq. ID no. 13661429
  misc_feature (100)..(170): Pfam Name: Mpv17 / PMP22 family Pfam Description: Mpv17 / PMP22 family
  misc_feature (1)..(162): Homolog of NCBI NO: 8923892 NR Description: peroxisomal membrane protein 2, 22kDa
  misc_feature (1)..(162): Homolog of NCBI NO: 6679577 NR Description: peroxisomal membrane protein 2
  misc_feature (1)..(162): Homolog of NCBI NO: 10954089 NR Description: 22 kDa peroxisomal membrane protein PMP22 [Mus
  misc_feature (1)..(176): Homolog of NCBI NO: 28828632 NR Description: hypothetical protein [Dictyostelium discoideum]
  misc_feature (1)..(171): Homolog of NCBI NO: 21553640 NR Description: contains similarity to 22 kDa peroxisomal
  misc_feature (1)..(171): Homolog of NCBI NO: 18422298 NR Description: peroxisomal membrane protein family (22 kDa)
  misc_feature (1)..(169): Homolog of NCBI NO: 31215743 NR Description: ENSANGP00000012562 [Anopheles gambiae]
  misc_feature (16)..(154): Homolog of NCBI NO: 7485192 NR Description: hypothetical protein d13195c - Arabidopsis
  misc_feature (1)..(177): Homolog of NCBI NO: 15233520 NR Description: peroxisomal membrane protein (22-kDa)(PMP22)
  misc_feature (16)..(177): Homolog of NCBI NO: 30682784 NR Description: expressed protein [Arabidopsis thaliana]
MRQLSKHPLRTKAITSGVLAGCSDAVAQKISGVKRLQLRRLLLIMLYGFAYAGPFGHFFHKLMDKIFKGQKKGKETTAKKVIVEQLTVSPWNNMMFMMYYGLVVEGRPFGQVKSKVKKDFANIQLTAWKFWPIVSWINYEYMPLQLRVLFASSVASCWAVFLNLKAARSIAGASKNA

SEQ ID NO: 61258 - DNA, 1185 bp, Triticum aestivum
  misc_feature (1)..(1185): Ceres Seq. ID no. 13661430
ctcaagctcaaatcccttaccctcctcgcgtgccctcccttatccccttcaccatggccacctccgccatgacactcgccatggccgcggccacggacgcctccctctttcaccccacgttcctctcccaacacaagctcaccccggcggccgccttcctcccactcattttctctcgcgcgccgctcctccgctccacccgcccccgcgccccccttacgcccctcgtcgcctcctccgacgccgccgaggcgggcctcgactgggccgacgcggaggaagccgaagagacggtgacggaggaggagcccgcggtggcggcctccggtggggatgcggggtacgcagccgagcctcccgaggaggctaaggtgtacgtcgggaacctgccgtatgatgtggacagcgagcggctcgcccagctcttcgaccaggccggcgtcgtcgaggtcgccgaggtcatttacaacagagagtcatgccagagccgtggatttggatttgttaccatgagtactattgaggaagctgacaaagccatcgagacgttcaaccgctacgacatcagcggaaggcttctgaacgtaaacagggcagctcaaaggggctcccgtgttgagagacctcctcgacagtttgcatcttctttcagggcttatgttggtaacctgccatggcaagcggaagactctaggttggtgcaattgttcagcgagcatggggaagtagttaacgctacagttgtgtacgacagagaaactgggcgttcacgaggatttggttttgtaactatggcttcaaaggaagatcttgacagtgctatttcagcgcttgatggacaggagatggatggccgtccactccgagtgaacgttgccgcggagcgaccgcagcgagggttctgatgcagaggagagcgggtgtttcttttggacacacgagaacaacactgctgaaatgttactgcggaagactgaagcatgtcaccacttaaaaatcctgcactggcctcctgatgttgggctatctcctcccatcccatattcttttttcatgcttccgtttgctgttgatgtcatcatgttactttcttgtcaacaccgtaagttcaacttttcaagtaggctactgtaatgatgtcctagtgttctcatgataatcgaagaaggttttgttggtaatgct

SEQ ID NO: 61259 - protein, 300 aa, Triticum aestivum
  peptide (1)..(300): Ceres Seq. ID no. 13661431
  misc_feature (218)..(289): Pfam Name: RNA recognition motif. (a.k.a. RRM, RBD, or RNP domain) Pfam Description: RNA recognition motif. (a.k.a. RRM, RBD, or RNP
  misc_feature (62)..(300): Homolog of NCBI NO: 1076251 NR Description: RNA-binding protein - common ice plant
  misc_feature (18)..(298): Homolog of NCBI NO: 133246 NR Description: 28 kDa ribonucleoprotein, chloroplast precursor
  misc_feature (15)..(300): Homolog of NCBI NO: 681908 NR Description: cp31 [Arabidopsis thaliana]
  misc_feature (11)..(298): Homolog of NCBI NO: 133248 NR Description: 31 kDa ribonucleoprotein, chloroplast precursor
  misc_feature (12)..(300): Homolog of NCBI NO: 1076305 NR Description: RNA-binding protein cp31 precursor - Arabidopsis
  misc_feature (79)..(298): Homolog of NCBI NO: 19032260 NR Description: RNA-binding protein precursor [Persea americana]
  misc_feature (90)..(300): Homolog of NCBI NO: 100903 NR Description: nucleic acid-binding protein - maize
  misc_feature (17)..(300): Homolog of NCBI NO: 7446356 NR Description: Ps16 protein - wheat
  misc_feature (17)..(300): Homolog of NCBI NO: 7446358 NR Description: cp31AHv protein - barley
  misc_feature (18)..(300): Homolog of NCBI NO: 7446359 NR Description: nucleic acid-binding protein - barley
QAQIPYPPRVPSLIPFTMATSAMTLAMAAATDASLFHPTFLSQHKLTPAAAFLPLIFSRAPLLRSTRPRAPLTPLVASSDAAEAGLDWADAEEAEETVTEEEPAVAASGGDAGYAAEPPEEAKVYVGNLPYDVDSERLAQLFDQAGVVEVAEVIYNRESCQSRGFGFVTMSTIEEADKAIETFNRYDISGRLLNVNRAAQRGSRVERPPRQFASSFRAYVGNLPWQAEDSRLVQLFSEHGEVVNATVVYDRETGRSRGFGFVTMASKEDLDSAISALDGQEMDGRPLRVNVAAERPQRGF

SEQ ID NO: 61260 - protein, 283 aa, Triticum aestivum
  peptide (1)..(283): Ceres Seq. ID no. 13661432
  misc_feature (201)..(272): Pfam Name: RNA recognition motif. (a.k.a. RRM, RBD, or RNP domain) Pfam Description: RNA recognition motif. (a.k.a. RRM, RBD, or RNP
  misc_feature (45)..(283): Homolog of NCBI NO: 1076251 NR Description: RNA-binding protein - common ice plant
  misc_feature (1)..(281): Homolog of NCBI NO: 133246 NR Description: 28 kDa ribonucleoprotein, chloroplast precursor
  misc_feature (1)..(283): Homolog of NCBI NO: 681908 NR Description: cp31 [Arabidopsis thaliana]
  misc_feature (1)..(281): Homolog of NCBI NO: 133248 NR Description: 31 kDa ribonucleoprotein, chloroplast precursor
  misc_feature (1)..(283): Homolog of NCBI NO: 1076305 NR Description: RNA-binding protein cp31 precursor - Arabidopsis
  misc_feature (62)..(281): Homolog of NCBI NO: 19032260 NR Description: RNA-binding protein precursor [Persea americana]
  misc_feature (73)..(283): Homolog of NCBI NO: 100903 NR Description: nucleic acid-binding protein - maize
  misc_feature (1)..(283): Homolog of NCBI NO: 7446356 NR Description: Ps16 protein - wheat
  misc_feature (1)..(283): Homolog of NCBI NO: 7446358 NR Description: cp31AHv protein - barley
  misc_feature (1)..(283): Homolog of NCBI NO: 7446359 NR Description: nucleic acid-binding protein - barley
MATSAMTLAMAAATDASLFHPTFLSQHKLTPAAAFLPLIFSRAPLLRSTRPRAPLTPLVASSDAAEAGLDWADAEEAEETVTEEEPAVAASGGDAGYAAEPPEEAKVYVGNLPYDVDSERLAQLFDQAGVVEVAEVIYNRESCQSRGFGFVTMSTIEEADKAIETFNRYDISGRLLNVNRAAQRGSRVERPPRQFASSFRAYVGNLPWQAEDSRLVQLFSEHGEVVNATVVYDRETGRSRGFGFVTMASKEDLDSAISALDGQEMDGRPLRVNVAAERPQRGF

SEQ ID NO: 61261 - protein, 278 aa, Triticum aestivum
  peptide (1)..(278): Ceres Seq. ID no. 13661433
  misc_feature (196)..(267): Pfam Name: RNA recognition motif. (a.k.a. RRM, RBD, or RNP domain) Pfam Description: RNA recognition motif. (a.k.a. RRM, RBD, or RNP
  misc_feature (40)..(278): Homolog of NCBI NO: 1076251 NR Description: RNA-binding protein - common ice plant
  misc_feature (1)..(276): Homolog of NCBI NO: 133246 NR Description: 28 kDa ribonucleoprotein, chloroplast precursor
  misc_feature (1)..(278): Homolog of NCBI NO: 681908 NR Description: cp31 [Arabidopsis thaliana]
  misc_feature (1)..(276): Homolog of NCBI NO: 133248 NR Description: 31 kDa ribonucleoprotein, chloroplast precursor
  misc_feature (1)..(278): Homolog of NCBI NO: 1076305 NR Description: RNA-binding protein cp31 precursor - Arabidopsis
  misc_feature (57)..(276): Homolog of NCBI NO: 19032260 NR Description: RNA-binding protein precursor [Persea americana]
  misc_feature (68)..(278): Homolog of NCBI NO: 100903 NR Description: nucleic acid-binding protein - maize
  misc_feature (1)..(278): Homolog of NCBI NO: 7446356 NR Description: Ps16 protein - wheat
  misc_feature (1)..(278): Homolog of NCBI NO: 7446358 NR Description: cp31AHv protein - barley
  misc_feature (1)..(278): Homolog of NCBI NO: 7446359 NR Description: nucleic acid-binding protein - barley
MTLAMAAATDASLFHPTFLSQHKLTPAAAFLPLIFSRAPLLRSTRPRAPLTPLVASSDAAEAGLDWADAEEAEETVTEEEPAVAASGGDAGYAAEPPEEAKVYVGNLPYDVDSERLAQLFDQAGVVEVAEVIYNRESCQSRGFGFVTMSTIEEADKAIETFNRYDISGRLLNVNRAAQRGSRVERPPRQFASSFRAYVGNLPWQAEDSRLVQLFSEHGEVVNATVVYDRETGRSRGFGFVTMASKEDLDSAISALDGQEMDGRPLRVNVAAERPQRGF

SEQ ID NO: 61262 - DNA, 799 bp, Triticum aestivum
  misc_feature (1)..(799): Ceres Seq. ID no. 12624653
aacgagaaagattgttcctgtctccgacgacaaacgagacctctgctgcgacaccctttgagatagatagatagagagaaaaaatgggtttcttctcttttctcggaagagttctcttcgcttctctattcatcctctccgcctggcaaatgttcaatgactttggaactgacggtggtccagcagctaaagagttggctccaaagcttcatctgaccaaagcacatctctcttccagattaggagttgcattgcctgacattgaggtgaaacaagtggtatgggcaattgttggtctgaaaggacttggaggcttactctttgttgttggcaacgtctttggtgcctatcttctggctgtctacttggtggtcgttagccccatcctatatgatttctacaactttggacctcaggaccgcgagttctctcttctgtttaccgagttcttgcagagcgttgcgcttcttggggcattgctattttttatcggaatgaagaattcgacgactaccagctcctcctcctccgccaagaggaacctgaagaagaggacaccaaagcctaaagctgcttagagttcttctatttacaacagcttctgatgtcttcaagctctaccttcatgttgcttccttacaatttttgcttctttttctactctgtgggattctagagttagccacatttttgtgtttcctatattttactttgggttctaaaagagttttccccttttttatcagagtatactaccctacacttggctgctattcttaagtatctgacaaagctaatt

SEQ ID NO: 61263 - protein, 164 aa, Triticum aestivum
  peptide (1)..(164): Ceres Seq. ID no. 12624654
  misc_feature (1)..(138): Pfam Name: HR-like lesion-inducing Pfam Description: HR-like lesion-inducing
  misc_feature (1)..(24): Homolog of NCBI NO: 37534824 NR Description: putative RNA-binding protein
  misc_feature (24)..(163): Homolog of NCBI NO: 37534824 NR Description: putative RNA-binding protein
  misc_feature (1)..(162): Homolog of NCBI NO: 7489144 NR Description: hypothetical protein (clone NF22) - common
  misc_feature (1)..(163): Homolog of NCBI NO: 15236497 NR Description: elicitor like protein
  misc_feature (1)..(158): Homolog of NCBI NO: 40287494 NR Description: putative lesion-inducing protein [Capsicum annuum]
  misc_feature (1)..(162): Homolog of NCBI NO: 38346190 NR Description: OSJNBa0027O01.6 [Oryza sativa (japonica
  misc_feature (1)..(162): Homolog of NCBI NO: 27261473 NR Description: Unknown protein [Oryza sativa (japonica
  misc_feature (1)..(164): Homolog of NCBI NO: 15239873 NR Description: Nicotiana lesion-inducing like
  misc_feature (1)..(164): Homolog of NCBI NO: 21592798 NR Description: Nicotiana lesion-inducing like [Arabidopsis
  misc_feature (1)..(164): Homolog of NCBI NO: 15219714 NR Description: unknown protein
MGFFSFLGRVLFASLFILSAWQMFNDFGTDGGPAAKELAPKLHLTKAHLSSRLGVALPDIEVKQVVWAIVGLKGLGGLLFVVGNVFGAYLLAVYLVVVSPILYDFYNFGPQDREFSLLFTEFLQSVALLGALLFFIGMKNSTTTSSSSSAKRNLKKRTPKPKAA

SEQ ID NO: 61264 - protein, 142 aa, Triticum aestivum
  peptide (1)..(142): Ceres Seq. ID no. 12624655
  misc_feature (1)..(116): Pfam Name: HR-like lesion-inducing Pfam Description: HR-like lesion-inducing
  misc_feature (9)..(141): Homolog of NCBI NO: 3885517 NR Description: similar to Nicotiana HR lesion-inducing ORF
  misc_feature (2)..(141): Homolog of NCBI NO: 37534824 NR Description: putative RNA-binding protein
  misc_feature (1)..(140): Homolog of NCBI NO: 7489144 NR Description: hypothetical protein (clone NF22) - common
  misc_feature (1)..(141): Homolog of NCBI NO: 15236497 NR Description: elicitor like protein
  misc_feature (1)..(136): Homolog of NCBI NO: 40287494 NR Description: putative lesion-inducing protein [Capsicum annuum]
  misc_feature (1)..(140): Homolog of NCBI NO: 38346190 NR Description: OSJNBa0027O01.6 [Oryza sativa (japonica
  misc_feature (1)..(140): Homolog of NCBI NO: 27261473 NR Description: Unknown protein [Oryza sativa (japonica
  misc_feature (1)..(142): Homolog of NCBI NO: 15239873 NR Description: Nicotiana lesion-inducing like
  misc_feature (1)..(142): Homolog of NCBI NO: 21592798 NR Description: Nicotiana lesion-inducing like [Arabidopsis
  misc_feature (1)..(142): Homolog of NCBI NO: 15219714 NR Description: unknown protein
MFNDFGTDGGPAAKELAPKLHLTKAHLSSRLGVALPDIEVKQVVWAIVGLKGLGGLLFVVGNVFGAYLLAVYLVVVSPILYDFYNFGPQDREFSLLFTEFLQSVALLGALLFFIGMKNSTTTSSSSSAKRNLKKRTPKPKAA

SEQ ID NO: 61265 - DNA, 715 bp, Triticum aestivum
  misc_feature (1)..(715): Ceres Seq. ID no. 13661894
aggataaggtaaaggaagcaggcaaggcgagacgagagcgtagcagtcagcgtgagcaagagagatggcagcaggaacggcctgggcgggatgccatctcgcccacctcccccaaattcccatctcggtcagcatccccgtgaccggcgctgccgctagcagcaggaggaggaggtgcggcttagcggcggcggcgggggcagcagcagcagcagcgacagacgggcgggtgctgggccggcgccccgtggaggacgtgtacaaggtgcgcgtggtgcgcggcgcggcggcgcaggagcgggtggaggcgctgcgggcgatggagacgtggtcgacgtggcgcacgaggggccgctgccacctggcctgggactggcaggtggaccagctcgtgtacatcgtcgccggcgaggtccgcgtgctccccgccggggccaccaccggcgaggagtacatgcacttcgtggccggcgacctggtccggtaccccaagtggctggaggcggacctccacttcgacgggccctacgaggagcgctaccgcttcctcgcctacggcgacgacaactgaaccgcggcgccccctcctagctagctcctttagtccttctactactagttcactgaagctttcgttcgagttctagccatatagtatttccttttgtttactatatactcctagcctgggacaataaggagtatttcctagtcg

SEQ ID NO: 61266 - protein, 168 aa, Triticum aestivum
  peptide (1)..(168): Ceres Seq. ID no. 13661895
  misc_feature (77)..(158): Pfam Name: Protein of unknown function (DUF861) Pfam Description: Protein of unknown function (DUF861)
  misc_feature (60)..(167): Homolog of NCBI NO: 21592432 NR Description: unknown [Arabidopsis thaliana]
  misc_feature (60)..(167): Homolog of NCBI NO: 18403036 NR Description: expressed protein [Arabidopsis thaliana]
  misc_feature (60)..(167): Homolog of NCBI NO: 15225202 NR Description: expressed protein [Arabidopsis thaliana]
MAAGTAWAGCHLAHLPQIPISVSIPVTGAAASSRRRRCGLAAAAGAAAAAATDGRVLGRRPVEDVYKVRVVRGAAAQERVEALRAMETWSTWRTRGRCHLAWDWQVDQLVYIVAGEVRVLPAGATTGEEYMHFVAGDLVRYPKWLEADLHFDGPYEERYRFLAYGDDN

SEQ ID NO: 61267 - DNA, 807 bp, Triticum aestivum
  misc_feature (1)..(807): Ceres Seq. ID no. 13664337
attcctcttccttcccgagattctctgtaggaaaacgataatccaaacgggataaacttaatcagtcttgtttgctcagattcttagagatcgtgtgattgaaagacccatgactctgttcccgattctaaccgcctcgtttctcttcctcttctgcgttccgttcaccaccgcatctgcagacgacgatttgccgacggcgtacactctcctccaaagctacaacttccccgtcggcattctccccaaaggagtcttgtcctacgatctggacgaatccacggggaagttccacgcctatttcgacaagtcgtgcagcttcgccctccaaggctcttaccaattggattacaaatcgaccatctccggcgtcatatcggagaacaagatcacgaagctcaccggcgtgaaggtgaaagttttattcttgtggctcaacatcgtggaggttatcagggacggagacgagctcgagttctccgtcgggatcacgtcggcgaacttcgcgatcgaggagttttacgagtcgcctcagtgtggatgcgggttcgattgcaacggattgaagtcggagaatttgggaagaaaccctcttgtctcttcggtctgaaggtgcttagcttattcacttgtaattaatttatgtgaatgagggggacttttcttacagaacctgaactctttggaggctttggttctttgtttcaacaattgctttgctttgtatctgttcttaagaagatcgttggattaatcaaccaatgtattgtactcttccaaaagtaataaaacggtgcatacattcgg

SEQ ID NO: 61268 - protein, 166 aa, Triticum aestivum
  peptide (1)..(166): Ceres Seq. ID no. 15220310
  misc_feature (11)..(149): Pfam Name: Protein of unknown function, DUF538 Pfam Description: Protein of unknown function, DUF538
  misc_feature (1)..(166): Homolog of NCBI NO: 28273404 NR Description: unknown protein [Oryza sativa (japonica
  misc_feature (1)..(143): Homolog of NCBI NO: 18420052 NR Description: expressed protein [Arabidopsis thaliana]
  misc_feature (31)..(165): Homolog of NCBI NO: 28273408 NR Description: unknown protein [Oryza sativa (japonica
  misc_feature (6)..(143): Homolog of NCBI NO: 34912320 NR Description: P0451D05.23 [Oryza sativa (japonica
  misc_feature (12)..(149): Homolog of NCBI NO: 21553750 NR Description: unknown [Arabidopsis thaliana]
  misc_feature (12)..(149): Homolog of NCBI NO: 18379012 NR Description: expressed protein [Arabidopsis thaliana]
  misc_feature (11)..(152): Homolog of NCBI NO: 15235335 NR Description: expressed protein [Arabidopsis thaliana]
  misc_feature (1)..(165): Homolog of NCBI NO: 18411923 NR Description: expressed protein [Arabidopsis thaliana]
  misc_feature (1)..(165): Homolog of NCBI NO: 21554037 NR Description: unknown [Arabidopsis thaliana]
  misc_feature (1)..(166): Homolog of NCBI NO: 18379014 NR Description: expressed protein [Arabidopsis thaliana]
MTLFPILTASFLFLFCVPFTTASADDDLPTAYTLLQSYNFPVGILPKGVLSYDLDESTGKFHAYFDKSCSFALQGSYQLDYKSTISGVISENKITKLTGVKVKVLFLWLNIVEVIRDGDELEFSVGITSANFAIEEFYESPQCGCGFDCNGLKSENLGRNPLVSSV

SEQ ID NO: 61269 - DNA, 861 bp, Triticum aestivum
  misc_feature (1)..(861): Ceres Seq. ID no. 13661664
ataaagcaagctagctttcttggtgaacaagccactgctattacgaaccagacccacttgtgaaggccacgtttatttctgcgtgttatacgacgatngaggcagagctgatacgttggccagctggccaggtctgccttattgctctgatactcctccgtgattctcaccctgctaacatcaaccaagaggggaatttattgccagcggaagtgatgatggtagatggttcatatgggagaaaagaacaggaaggcttgttaaaatgcttgcaggggatggagctgttgtgaactgtatacagtctcatccctatgattgtgctgttgcaacgagtggaattgacaatacaataaagttatggacaccggatgcagaaggtacttctatggttgatggaccagaaattgatgtgttaagtgccatagagaacaaccagaagaagttatgccgcaaccgtgaaactttgttgccttttgagtttttggaacgatttggggcgcatgaatttgctgaaggaagcttgcatcctttagagtgtgcgcagacttgatatactattgcttgggttgctgaggaaaagggaggacatttaatccaagatacaagcagccagtgtctaggtaaacatgagattgcaaggttgtgttgcaatcgtagccagtgttttgcacaccttgcttagataatattgcaggggcgctggtattaagttgttgcttgagatgtgaatagacagtaaaggctgtttgttggtgcattcacttgtacagattgtagaaaagcgaagtcttgtaataagtaaatcatctgtacatgcttccataatagagccgtctgctgtgacgtttttctggggcg

SEQ ID NO: 61270 - protein, 95 aa, Triticum aestivum
  peptide (1)..(95): Ceres Seq. ID no. 13661665
  misc_feature (1)..(70): Homolog of NCBI NO: 21618316 NR Description: unknown [Arabidopsis thaliana]
  misc_feature (1)..(48): Homolog of NCBI NO: 37536570 NR Description: putative WD-40 repeat protein
  misc_feature (1)..(61): Homolog of NCBI NO: 22095349 NR Description: KIAA1037 protein [Homo sapiens]
  misc_feature (1)..(64): Homolog of NCBI NO: 34871778 NR Description: similar to KIAA1037 protein [Rattus norvegicus]
  misc_feature (1)..(64): Homolog of NCBI NO: 40556280 NR Description: KIAA1037 protein [Mus musculus]
  misc_feature (1)..(61): Homolog of NCBI NO: 10435814 NR Description: unnamed protein product [Homo sapiens]
  misc_feature (1)..(76): Homolog of NCBI NO: 24654819 NR Description: CG5124-PA [Drosophila melanogaster]
  misc_feature (1)..(76): Homolog of NCBI NO: 16076860 NR Description: SD07783p [Drosophila melanogaster]
  misc_feature (1)..(95): Homolog of NCBI NO: 18416416 NR Description: transducin / WD-40 repeat protein family
  misc_feature (1)..(95): Homolog of NCBI NO: 11358295 NR Description: hypothetical protein T30N20_210 - Arabidopsis
MLAGDGAVVNCIQSHPYDCAVATSGIDNTIKLWTPDAEGTSMVDGPEIDVLSAIENNQKKLCRNRETLLPFEFLERFGAHEFAEGSLHPLECAQT

SEQ ID NO: 61271 - protein, 54 aa, Triticum aestivum
  peptide (1)..(54): Ceres Seq. ID no. 13661666
  misc_feature (1)..(27): Homolog of NCBI NO: 458692 NR Description: homologous to mouse gene PC326:GenBank Accession
  misc_feature (1)..(29): Homolog of NCBI NO: 21618316 NR Description: unknown [Arabidopsis thaliana]
  misc_feature (1)..(20): Homolog of NCBI NO: 22095349 NR Description: KIAA1037 protein [Homo sapiens]
  misc_feature (1)..(23): Homolog of NCBI NO: 34871778 NR Description: similar to KIAA1037 protein [Rattus norvegicus]
  misc_feature (1)..(23): Homolog of NCBI NO: 40556280 NR Description: KIAA1037 protein [Mus musculus]
  misc_feature (1)..(20): Homolog of NCBI NO: 10435814 NR Description: unnamed protein product [Homo sapiens]
  misc_feature (1)..(35): Homolog of NCBI NO: 24654819 NR Description: CG5124-PA [Drosophila melanogaster]
  misc_feature (1)..(35): Homolog of NCBI NO: 16076860 NR Description: SD07783p [Drosophila melanogaster]
  misc_feature (1)..(54): Homolog of NCBI NO: 18416416 NR Description: transducin / WD-40 repeat protein family
  misc_feature (1)..(54): Homolog of NCBI NO: 11358295 NR Description: hypothetical protein T30N20_210 - Arabidopsis
MVDGPEIDVLSAIENNQKKLCRNRETLLPFEFLERFGAHEFAEGSLHPLECAQT

SEQ ID NO: 61272 - DNA, 641 bp, Triticum aestivum
  misc_feature (1)..(641): Ceres Seq. ID no. 13598209
atcctaatcgaaaaatagtcgcgcagcgcaccccctacagccccgtgctctggcatacatacagtgtggtcatagtggtgaactgagaagagctactgcgaacaaggcacgccggagatcgagatgggctgcgacgacaagtgcgggtgcgccgtgccgtgccccggcggcacgggctgcaggtgcacctcggcgaggagcggcgcggcggcgggggagcacacgacgtgcgggtgcggcgagcactgtggatgcaacccgtgcgcgtgcgggcgcgaggggacgccgtccgggcgggcgaacaggagggccaactgctcctgcggcgcggcctgcaactgcgcttcatgcggctcggcgaccgcctgatcgatggccgacgcgtcgacgcgccactagtcgtgagctgatgcacaagtagtagagctagctaccgagttagccataaataagtgccgctgtgccgtgatcagtcatatgtggacgtgtcgtgtgtatttacctacgtactcgcatcagtgtgtaagaacgaataaatagtttatgtgtgctattttctcctttcctaaatgtacttgaagtcttttggcttgttacaagttttacttgttgcaaaataattatagttctacgattttctt

SEQ ID NO: 61273 - protein, 81 aa, Triticum aestivum
  peptide (1)..(81): Ceres Seq. ID no. 15222264
  misc_feature (2)..(78): Pfam Name: Plant PEC family metallothionein Pfam Description: Plant PEC family metallothionein
  misc_feature (3)..(78): Homolog of NCBI NO: 4105810 NR Description: PGPS/NH21 [Petunia x hybrida]
  misc_feature (1)..(79): Homolog of NCBI NO: 1169469 NR Description: EC protein homolog (Zinc-metallothionein class
  misc_feature (1)..(81): Homolog of NCBI NO: 37536538 NR Description: putative zinc-metallothionein
  misc_feature (1)..(78): Homolog of NCBI NO: 29786355 NR Description: metallothionein-like protein type 4
  misc_feature (1)..(81): Homolog of NCBI NO: 232026 NR Description: EC protein III (Zinc-metallothionein class II)
  misc_feature (1)..(81): Homolog of NCBI NO: 232025 NR Description: EC protein I/II (Zinc-metallothionein class II)
MGCDDKCGCAVPCPGGTGCRCTSARSGAAAGEHTTCGCGEHCGCNPCACGREGTPSGRANRRANCSCGAACNCASCGSATA

SEQ ID NO: 61274 - protein, 52 aa, Triticum aestivum
  peptide (1)..(52): Ceres Seq. ID no. 15222265
MQPVRVRARGDAVRAGEQEGQLLLRRGLQLRFMRLGDRLIDGRRVDAPLVVS

SEQ ID NO: 61275 - DNA, 742 bp, Triticum aestivum
  misc_feature (1)..(742): Ceres Seq. ID no. 14303027
tgtgttagctgtagatgttgaaagtgaagccttgtgcagtgttctttggatcttgtctaagccatgtgctacctttctgtggagatcgacaatgttgatgcccagtgtggtctgcagtggtattcaggaatcagggtgacgcatttatcttgtttgtatactgatgatggtcttttaattttgcagatgtgaaggatattaagtgtgtgattaattttgatttcccgacaactatcgaggattatattcataggataggtcgcactggccgtgccggtgctaccgggatggcattcacgttcttcacacattccaatgcaaaatattcaaggaatctcgttaagatcttgcgcgaagctgggcaggttgtgaatccagcgttagaagctatgtccaagtctgctggttctatgggaggaggaggtaatttccggtcaaggggccgaggtgggtttggtggtggtgggtatggtggtaaccgttctggatcaaattccattccagtacgtagaagatactaagacacaaacatgaaggtcaattctgatgctggaaaagacagagcgatgaagttttatctgtatacattaggcattaaattaaatgcatttttggggaatttctttgaaatccttctactgttagaagatcaaaacaaaagtcattcttgatatttttgtaccggagctcaaatggaaggaactcatgtatcagcgaccttggagattagaatagtcttgtc

SEQ ID NO: 61276 - protein, 77 aa, Triticum aestivum
  peptide (1)..(77): Ceres Seq. ID no. 14303028
  misc_feature (1)..(70): Homolog of NCBI NO: 24644485 NR Description: Rm62 CG10279-PC [Drosophila melanogaster]
  misc_feature (1)..(70): Homolog of NCBI NO: 24644483 NR Description: Rm62 CG10279-PE [Drosophila melanogaster]
  misc_feature (1)..(70): Homolog of NCBI NO: 24644481 NR Description: Rm62 CG10279-PD [Drosophila melanogaster]
  misc_feature (1)..(77): Homolog of NCBI NO: 40738604 NR Description: hypothetical protein AN5931.2 [Aspergillus
  misc_feature (1)..(76): Homolog of NCBI NO: 32416134 NR Description: hypothetical protein [Neurospora crassa]
  misc_feature (1)..(75): Homolog of NCBI NO: 19113315 NR Description: p68-like protein. [Schizosaccharomyces pombe]
  misc_feature (1)..(75): Homolog of NCBI NO: 5270 NR Description: p68 protein [Schizosaccharomyces pombe]
  misc_feature (1)..(68): Homolog of NCBI NO: 5669638 NR Description: ethylene-responsive RNA helicase [Lycopersicon
  misc_feature (1)..(72): Homolog of NCBI NO: 10177293 NR Description: ATP-dependent RNA helicase-like protein
  misc_feature (1)..(77): Homolog of NCBI NO: 39653663 NR Description: DEAD box RNA helicase [Zea mays]
MAFTFFTHSNAKYSRNLVKILREAGQVVNPALEAMSKSAGSMGGGGNFRSRGRGGFGGGGYGGNRSGSNSIPVRRRY

SEQ ID NO: 61277 - protein, 46 aa, Triticum aestivum
  peptide (1)..(46): Ceres Seq. ID no. 14303029
  misc_feature (1)..(46): Homolog of NCBI NO: 3986287 NR Description: DjVLGB [Dugesia japonica]
MKVNSDAGKDRAMKFYLYTLGIKLNAFLGNFFEILLLLEDQNKSHS

SEQ ID NO: 61278 - protein, 45 aa, Triticum aestivum
  peptide (1)..(45): Ceres Seq. ID no. 14303030
VLAVDVESEALCSVLWILSKPCATFLWRSTMLMPSVVCSGIQESG

SEQ ID NO: 61279 - DNA, 734 bp, Triticum aestivum
  misc_feature (1)..(734): Ceres Seq. ID no. 13661668
aatgatggatgcgatgaaaaagatagataaggataaggtgaaagctgcgctggagaaacggaggaagtcgaaaggcgatgctggtaggaaagtggacgtcatggatgatcatgacctgattgagagggagctggaacatggcgtggagttggctgccgaggacgagaaaaaacacgacagaaggcagagctggccccaccccgcgcaccgggaggatcaccagaacacggctcgcaaggcggagaacaccgaagagggcgagctgtccctggatggccaggaataccgctctcctggccccgacaaccggaagaggaaggacgcgcacgagcacaggagcaatgaccgcagcgccgagagagacatcaagaggccgaggccatgagatgaagtattcattgtggggggtgatcagcggtgacggactgagaactggtgttttgagcgccagtgcgtgatacctagtttttgcatcgcgggaacatacaggtgcttgtttgcctatgttgggagatttgaaatgtactgtactgtaacttgaaaagatgaggagtatgtacatgttcaggttatggaacattcggcagcagtttggtgtcgaggaacgataggaaagaggctgcatggcctgcacccgaaggctatataaataactttttaaatacatggatttgaagcaaatttggattgggacatttatatggatttgaaacaaatttgattggcacatttct

SEQ ID NO: 61280 - protein, 127 aa, Triticum aestivum
  peptide (1)..(127): Ceres Seq. ID no. 13661669
  misc_feature (7)..(106): Homolog of NCBI NO: 9759604 NR Description: contains similarity to cyclin~gene_id:K18C1.7
  misc_feature (7)..(106): Homolog of NCBI NO: 30694715 NR Description: cyclin family [Arabidopsis thaliana]
MMDAMKKIDKDKVKAALEKRRKSKGDAGRKVDVMDDHDLIERELEHGVELAAEDEKKHDRRQSWPHPAHREDHQNTARKAENTEEGELSLDGQEYRSPGPDNRKRKDAHEHRSNDRSAERDIKRPRP

SEQ ID NO: 61281 - protein, 126 aa, Triticum aestivum
  peptide (1)..(126): Ceres Seq. ID no. 13661670
  misc_feature (6)..(105): Homolog of NCBI NO: 9759604 NR Description: contains similarity to cyclin~gene_id:K18C1.7
  misc_feature (6)..(105): Homolog of NCBI NO: 30694715 NR Description: cyclin family [Arabidopsis thaliana]
MDAMKKIDKDKVKAALEKRRKSKGDAGRKVDVMDDHDLIERELEHGVELAAEDEKKHDRRQSWPHPAHREDHQNTARKAENTEEGELSLDGQEYRSPGPDNRKRKDAHEHRSNDRSAERDIKRPRP

SEQ ID NO: 61282 - protein, 123 aa, Triticum aestivum
  peptide (1)..(123): Ceres Seq. ID no. 13661671
  misc_feature (3)..(102): Homolog of NCBI NO: 9759604 NR Description: contains similarity to cyclin~gene_id:K18C1.7
  misc_feature (3)..(102): Homolog of NCBI NO: 30694715 NR Description: cyclin family [Arabidopsis thaliana]
MKKIDKDKVKAALEKRRKSKGDAGRKVDVMDDHDLIERELEHGVELAAEDEKKHDRRQSWPHPAHREDHQNTARKAENTEEGELSLDGQEYRSPGPDNRKRKDAHEHRSNDRSAERDIKRPRP

SEQ ID NO: 61283 - DNA, 1015 bp, Triticum aestivum
  misc_feature (1)..(1015): Ceres Seq. ID no. 13664283
tcgtcccttggtgactgaagagaagagtttaagcaaagaatggcagcacaagcgcttgtgtcttcttcacttacttcctctgttcagactgctagacagatatncggcgcaaaaccagctgtgtccgtatcacagaggaaggtttccttggttgttaaggctgcctcaactccacctgccaagcaaggagcaaacaggcaattgtggtttgcatcatcacagagtctctcttacttggatggcagcttacctggcgactttggattcgatccgcttggtctttcagacccaganngtactggaggcttcatcgagccgagatggctagcctacggagagatcatcaacgggaggttcgctatgttgggtgcacctggagctatagcacctgagattctaggaaaggccggtctgattcctgcagacactgctcttccctggttccaaaccggtgtgattccacctgcagggacatacagctactgggcagacccttacacactctttgttctcgagatggctttgatgggatttgccgagcacaggaggttgcaggactggtacaacccaggatctatgggtaaacaatacttcttgggtctagagaaaggtttcgcgggttcaggtgacccggcttaccccggtggaccattcttcaaccctcttgggtttggaaaagacgagaagtcgatgaaggagttgaaactcaaggaggtcaagaacggtagactggcaatgctcgccatcctaggctattttgtgcagggactagtgaccggtgtggggccttaccagaaccttcttgatcatttggcggatcccgtcaacaacaatgtcttgaccagcctcaagttccactgagatgatcatatatcgtattcatcacatggtgttttatgttggtttcccattctcttgtatcctacaatcttgtttgtttctcttggtaccatcagtttctctgtgttgtaacaccctgtgtaaacatattcgtcttttgtaagaaataatggcc

SEQ ID NO: 61284 - protein, 273 aa, Triticum aestivum
  peptide (1)..(273): Ceres Seq. ID no. 13664284
  misc_feature (61)..(244): Pfam Name: Chlorophyll A-B binding protein Pfam Description: Chlorophyll A-B binding protein
  misc_feature (109)..(273): Homolog of NCBI NO: 37780998 NR Description: chlorophyll a/b binding protein [Vitis vinifera]
  misc_feature (11)..(269): Homolog of NCBI NO: 40714511 NR Description: light-harvesting chlorophyll-a/b protein of
  misc_feature (72)..(264): Homolog of NCBI NO: 7271947 NR Description: chlorophyll a/b-binding protein type III [Alonsoa
  misc_feature (1)..(273): Homolog of NCBI NO: 99487 NR Description: chlorophyll a/b-binding protein (clone pINEab 43)
  misc_feature (1)..(273): Homolog of NCBI NO: 7443229 NR Description: probable chlorophyll a/b-binding protein type III
  misc_feature (1)..(273): Homolog of NCBI NO: 115813 NR Description: Chlorophyll A-B binding protein 8, chloroplast
  misc_feature (1)..(273): Homolog of NCBI NO: 82080 NR Description: chlorophyll a/b-binding protein type III
  misc_feature (1)..(273): Homolog of NCBI NO: 21554335 NR Description: PSI type III chlorophyll a/b-binding protein,
  misc_feature (1)..(273): Homolog of NCBI NO: 430947 NR Description: PSI type III chlorophyll a/b-binding protein
  misc_feature (1)..(273): Homolog of NCBI NO: 15219941 NR Description: light-harvesting chlorophyll a/b binding protein
  misc_feature (22)..(22): Xaa is any aa, unknown or other
  misc_feature (85)..(85): Xaa is any aa, unknown or other
  misc_feature (86)..(86): Xaa is any aa, unknown or other
MAAQALVSSSLTSSVQTARQIXGAKPAVSVSQRKVSLVVKAASTPPAKQGANRQLWFASSQSLSYLDGSLPGDFGFDPLGLSDPXXTGGFIEPRWLAYGEIINGRFAMLGAPGAIAPEILGKAGLIPADTALPWFQTGVIPPAGTYSYWADPYTLFVLEMALMGFAEHRRLQDWYNPGSMGKQYFLGLEKGFAGSGDPAYPGGPFFNPLGFGKDEKSMKELKLKEVKNGRLAMLAILGYFVQGLVTGVGPYQNLLDHLADPVNNNVLTSLKFH

SEQ ID NO: 61285 - protein, 166 aa, Triticum aestivum
  peptide (1)..(166): Ceres Seq. ID no. 13664285
  misc_feature (1)..(137): Pfam Name: Chlorophyll A-B binding protein Pfam Description: Chlorophyll A-B binding protein
  misc_feature (2)..(166): Homolog of NCBI NO: 37780998 NR Description: chlorophyll a/b binding protein [Vitis vinifera]
  misc_feature (1)..(162): Homolog of NCBI NO: 40714511 NR Description: light-harvesting chlorophyll-a/b protein of
  misc_feature (1)..(157): Homolog of NCBI NO: 7271947 NR Description: chlorophyll a/b-binding protein type III [Alonsoa
  misc_feature (1)..(166): Homolog of NCBI NO: 99487 NR Description: chlorophyll a/b-binding protein (clone pINEab 43)
  misc_feature (1)..(166): Homolog of NCBI NO: 7443229 NR Description: probable chlorophyll a/b-binding protein type III
  misc_feature (1)..(166): Homolog of NCBI NO: 115813 NR Description: Chlorophyll A-B binding protein 8, chloroplast
  misc_feature (1)..(166): Homolog of NCBI NO: 82080 NR Description: chlorophyll a/b-binding protein type III
  misc_feature (1)..(166): Homolog of NCBI NO: 21554335 NR Description: PSI type III chlorophyll a/b-binding protein,
  misc_feature (1)..(166): Homolog of NCBI NO: 430947 NR Description: PSI type III chlorophyll a/b-binding protein
  misc_feature (1)..(166): Homolog of NCBI NO: 15219941 NR Description: light-harvesting chlorophyll a/b binding protein
MLGAPGAIAPEILGKAGLIPADTALPWFQTGVIPPAGTYSYWADPYTLFVLEMALMGFAEHRRLQDWYNPGSMGKQYFLGLEKGFAGSGDPAYPGGPFFNPLGFGKDEKSMKELKLKEVKNGRLAMLAILGYFVQGLVTGVGPYQNLLDHLADPVNNNVLTSLKFH

SEQ ID NO: 61286 - DNA, 665 bp, Triticum aestivum
  misc_feature (1)..(665): Ceres Seq. ID no. 12623695
atttagaaatctatgtaattacttttaggcttaaaaagttggagacaatattttggagaaaaaaaaaagcataaatccttctttacggaaagtttttcattagtcaaaattcatcataatgtataaagtatttgattggaaaaagaaatagcttttggtagataaattgtatctgtggctaccaaaacgtatttcctttatgtaatgatgattatatttgttctttttgtttctgattctttctatccggcgaccgcgcagtgcttttgtggctattgacagcagcgtgcataaagacgggacggccacagatagcgagacgagccatcgacctggcggagtcacggttgttgaaagacggttggccggagtactacgacggaaaatcgggaaggtttattggaaaacaggcgaggaagtttcagacatggtccatcgctggttacttggtcgccaagatgatgttggaagatccttctcatcttggaatgatctcattggaagaggacaaacagaccaaacctgtcattaagagatctcattcttggacttgataatgcttgtcaatctttgagaatattcggctaagacttgttagtttctaaattttgttttacaatttatttagtttgtgtttaattatcctatatcttttcacttttccc

SEQ ID NO: 61287 - protein, 34 aa, Triticum aestivum
  peptide (1)..(34): Ceres Seq. ID no. 12623696
MVHRWLLGRQDDVGRSFSSWNDLIGRGQTDQTCH

SEQ ID NO: 61288 - protein, 31 aa, Triticum aestivum
  peptide (1)..(31): Ceres Seq. ID no. 12623697
  misc_feature (1)..(27): Homolog of NCBI NO: 17228314 NR Description: putative invertase [Nostoc sp. PCC 7120]
  misc_feature (1)..(31): Homolog of NCBI NO: 38344939 NR Description: OSJNBa0084A10.15 [Oryza sativa (japonica
  misc_feature (1)..(30): Homolog of NCBI NO: 30693221 NR Description: invertase -related [Arabidopsis thaliana]
  misc_feature (1)..(31): Homolog of NCBI NO: 15236209 NR Description: invertase - like protein
  misc_feature (1)..(31): Homolog of NCBI NO: 15218303 NR Description: neutral invertase, putative; protein id:
  misc_feature (1)..(31): Homolog of NCBI NO: 25354737 NR Description: neutral invertase like protein [imported] -
  misc_feature (1)..(31): Homolog of NCBI NO: 18413234 NR Description: neutral invertase like protein
  misc_feature (1)..(31): Homolog of NCBI NO: 7487359 NR Description: hypothetical protein T22J18.18 - Arabidopsis
  misc_feature (1)..(31): Homolog of NCBI NO: 21594008 NR Description: putative invertase [Arabidopsis thaliana]
  misc_feature (1)..(31): Homolog of NCBI NO: 18395144 NR Description: putative invertase
MMLEDPSHLGMISLEEDKQTKPVIKRSHSWT

SEQ ID NO: 61289 - protein, 30 aa, Triticum aestivum
  peptide (1)..(30): Ceres Seq. ID no. 12623698
  misc_feature (1)..(26): Homolog of NCBI NO: 17228314 NR Description: putative invertase [Nostoc sp. PCC 7120]
  misc_feature (1)..(30): Homolog of NCBI NO: 38344939 NR Description: OSJNBa0084A10.15 [Oryza sativa (japonica
  misc_feature (1)..(29): Homolog of NCBI NO: 30693221 NR Description: invertase -related [Arabidopsis thaliana]
  misc_feature (1)..(30): Homolog of NCBI NO: 15236209 NR Description: invertase - like protein
  misc_feature (1)..(30): Homolog of NCBI NO: 15218303 NR Description: neutral invertase, putative; protein id:
  misc_feature (1)..(30): Homolog of NCBI NO: 25354737 NR Description: neutral invertase like protein [imported] -
  misc_feature (1)..(30): Homolog of NCBI NO: 18413234 NR Description: neutral invertase like protein
  misc_feature (1)..(30): Homolog of NCBI NO: 7487359 NR Description: hypothetical protein T22J18.18 - Arabidopsis
  misc_feature (1)..(30): Homolog of NCBI NO: 21594008 NR Description: putative invertase [Arabidopsis thaliana]
  misc_feature (1)..(30): Homolog of NCBI NO: 18395144 NR Description: putative invertase
MLEDPSHLGMISLEEDKQTKPVIKRSHSWT

SEQ ID NO: 61290 - DNA, 856 bp, Triticum aestivum
  misc_feature (1)..(856): Ceres Seq. ID no. 13662695
cagctgccaccctgcccagttgctgttgcgcagcctccttcctctagtctcccctcttctccccctgttgccatctccaacctaatctttctcttctcgcggtctgcccgacggattccaaaagggctcgctcattcgggggaaaagctgttcgccgtggctcccagtctcatccatttcttgtctcttccaggaatctgtgaaattttgtgcctttaaaggcaatccagggtctggtcctgagctgtcggggctctatgtctaagtgggaacctgtcacatttgaggaatctcttagctttgttaagagagttaaggcccgtgactacttgttatacctgtcactgctcaatgtgctcacccggagtgatcagatccctctggaagcttacaacgagcttttacttcttttccgggatcacggagacctgctagaggagctagggaagttcagacccctcccctctttcccaagcactgtgtacagccacaacacaatctggatgttcatattccttatgccctttctgctcctgagccttctcctcgcgtttgagaagccgttggatagcttccttctccgataacccgtcgcgagctaaagatcagcactacgatgaaaatgaccggacacggaatgcgtgcatggactgctgtcttgtgatatcccctcagagcccattgccttattggtgcttttgtgatcatgttcatccttttgtgatccgcccgcataccggtgcgcggatagtatctctgaatctctcggaaggacagactaaatcgattgttttggcttgttcaagacaaacttcagtgtacaattgacaaactaaatgaaagagtttagttttac

SEQ ID NO: 61291 - protein, 109 aa, Triticum aestivum
  peptide (1)..(109): Ceres Seq. ID no. 13662696
  misc_feature (24)..(67): Pfam Name: Paired amphipathic helix repeat Pfam Description: Paired amphipathic helix repeat
  misc_feature (2)..(103): Homolog of NCBI NO: 34894158 NR Description: putative co-repressor protein
MSKWEPVTFEESLSFVKRVKARDYLLYLSLLNVLTRSDQIPLEAYNELLLLFRDHGDLLEELGKFRPLPSFPSTVYSHNTIWMFIFLMPFLLLSLLLAFEKPLDSFLLR

SEQ ID NO: 61292 - protein, 72 aa, Triticum aestivum
  peptide (1)..(72): Ceres Seq. ID no. 13662697
QLPPCPVAVAQPPSSSLPSSPPVAISNLIFLFSRSARRIPKGLAHSGEKLFAVAPSLIHFLSLPGICEILCL

SEQ ID NO: 61293 - protein, 60 aa, Triticum aestivum
  peptide (1)..(60): Ceres Seq. ID no. 13662698
MDCCLVISPQSPLPYWCFCDHVHPFVIRPHTGARIVSLNLSEGQTKSIVLACSRQTSVYN

SEQ ID NO: 61294 - DNA, 1339 bp, Triticum aestivum
  misc_feature (1)..(1339): Ceres Seq. ID no. 13661504
atcaccagtaaagcagtaagcaattccactcccgccgccacctccctctactccggcgctctctcggacgctccggcatacatacgtacttacaagcggaagcagccagagccagccatgtgccccggggcgccggtcgcggcggcggcgtcggacaagagcgtgtgcgtgatggacgcgtccggcccgctgggccaggcgctcgtgcaccgcctcctccgccggggctacaccgtccacgccgccacctacggccgctcgctcgacgcgctcgcgctgctcgccgccgccggccacgacgaggaccggctcaagctcttccgcgccgaccccttcgactaccactccatcgccgacgccgtccgcggctgctccggcctcttctgcatgttcaacacccacgaggaccaggccggctgcgacgaggtgatggtggaggtggaggtccgggcggcgcagaacgtgctggaggcgtgcgcgcagacggtgaccatggagcgggtggtcttcacctcctccgtcaccgccgtcgtctggaaggacgacgaccacaagcccgtcgacgccttcgacgagcggaactggagcgacctcaacctctgcaggaagcgcaagttgtggcatgcgctggccaagacgctgtcggagaagacggcctgggccttggccatggacagaggggtggacatggtggccatcaacgccggcctgctcaccgggccggggctctcctccgcccacccctgcctcaagggggtccccgagatgtacgagcacggcgtcctcgtcaccgtcgacgccgacttcctcgccgacgcccacgtggccgcctacgagtgccccacggccttcggccgctacctctgcttcaacaacgtcgtgtgccggcccgaggacgccctccagttcgcccagatgctcaccccgtccgctccatgctacccgccgagtgatgagctgaaggtgatcccacaaaggattcagaacaagaagctgaacaacctgatggtggagtttgccagtgccatatacggggacttggattagagaatcactagttcattgatttacatctcaagggcagctagggttgtattctttatgtacctaaatatctgtattctttttcctcctgaaaagggaaatatggttggtcagatgtacaaatctgtacaaggccaagcatgccgcatgtattccaccactcttaccaggatggtaggagcatttgagccagtgcttagcaatgtagtagtaatccttaggtccaacaaaagggaaaataagtccacagttatgttactactgccttgtacagcagcattatatgaatatgatg

SEQ ID NO: 61295 - protein, 348 aa, Triticum aestivum
  peptide (1)..(348): Ceres Seq. ID no. 13661505
  misc_feature (53)..(339): Homolog of NCBI NO: 9964087 NR Description: cinnamoyl CoA reductase [Lolium perenne]
  misc_feature (53)..(342): Homolog of NCBI NO: 17978649 NR Description: cinnamoyl-CoA reductase [Pinus taeda]
  misc_feature (43)..(339): Homolog of NCBI NO: 3242328 NR Description: cinnamoyl-CoA reductase [Zea mays]
  misc_feature (43)..(339): Homolog of NCBI NO: 3341511 NR Description: cinnamoyl-CoA reductase [Saccharum officinarum]
  misc_feature (52)..(342): Homolog of NCBI NO: 21553548 NR Description: cinnamoyl-CoA reductase-like protein [Arabidopsis
  misc_feature (52)..(342): Homolog of NCBI NO: 15234751 NR Description: cinnamoyl-CoA reductase-related [Arabidopsis
  misc_feature (56)..(336): Homolog of NCBI NO: 21553382 NR Description: putative cinnamoyl CoA reductase [Arabidopsis
  misc_feature (56)..(336): Homolog of NCBI NO: 18400407 NR Description: cinnamoyl-CoA reductase-related [Arabidopsis
  misc_feature (56)..(336): Homolog of NCBI NO: 25412171 NR Description: probable cinnamoyl CoA reductase [imported] -
  misc_feature (53)..(348): Homolog of NCBI NO: 37537132 NR Description: putative cinnamoyl-CoA reductase
ITSKAVSNSTPAATSLYSGALSDAPAYIRTYKRKQPEPAMCPGAPVAAAASDKSVCVMDASGPLGQALVHRLLRRGYTVHAATYGRSLDALALLAAAGHDEDRLKLFRADPFDYHSIADAVRGCSGLFCMFNTHEDQAGCDEVMVEVEVRAAQNVLEACAQTVTMERVVFTSSVTAVVWKDDDHKPVDAFDERNWSDLNLCRKRKLWHALAKTLSEKTAWALAMDRGVDMVAINAGLLTGPGLSSAHPCLKGVPEMYEHGVLVTVDADFLADAHVAAYECPTAFGRYLCFNNVVCRPEDALQFAQMLTPSAPCYPPSDELKVIPQRIQNKKLNNLMVEFASAIYGDLD

SEQ ID NO: 61296 - protein, 309 aa, Triticum aestivum
  peptide (1)..(309): Ceres Seq. ID no. 13661506
  misc_feature (14)..(300): Homolog of NCBI NO: 9964087 NR Description: cinnamoyl CoA reductase [Lolium perenne]
  misc_feature (14)..(303): Homolog of NCBI NO: 17978649 NR Description: cinnamoyl-CoA reductase [Pinus taeda]
  misc_feature (4)..(300): Homolog of NCBI NO: 3242328 NR Description: cinnamoyl-CoA reductase [Zea mays]
  misc_feature (4)..(300): Homolog of NCBI NO: 3341511 NR Description: cinnamoyl-CoA reductase [Saccharum officinarum]
  misc_feature (13)..(303): Homolog of NCBI NO: 21553548 NR Description: cinnamoyl-CoA reductase-like protein [Arabidopsis
  misc_feature (13)..(303): Homolog of NCBI NO: 15234751 NR Description: cinnamoyl-CoA reductase-related [Arabidopsis
  misc_feature (17)..(297): Homolog of NCBI NO: 21553382 NR Description: putative cinnamoyl CoA reductase [Arabidopsis
  misc_feature (17)..(297): Homolog of NCBI NO: 18400407 NR Description: cinnamoyl-CoA reductase-related [Arabidopsis
  misc_feature (17)..(297): Homolog of NCBI NO: 25412171 NR Description: probable cinnamoyl CoA reductase [imported] -
  misc_feature (14)..(309): Homolog of NCBI NO: 37537132 NR Description: putative cinnamoyl-CoA reductase
MCPGAPVAAAASDKSVCVMDASGPLGQALVHRLLRRGYTVHAATYGRSLDALALLAAAGHDEDRLKLFRADPFDYHSIADAVRGCSGLFCMFNTHEDQAGCDEVMVEVEVRAAQNVLEACAQTVTMERVVFTSSVTAVVWKDDDHKPVDAFDERNWSDLNLCRKRKLWHALAKTLSEKTAWALAMDRGVDMVAINAGLLTGPGLSSAHPCLKGVPEMYEHGVLVTVDADFLADAHVAAYECPTAFGRYLCFNNVVCRPEDALQFAQMLTPSAPCYPPSDELKVIPQRIQNKKLNNLMVEFASAIYGDLD

SEQ ID NO: 61297 - protein, 291 aa, Triticum aestivum
  peptide (1)..(291): Ceres Seq. ID no. 13661507
  misc_feature (1)..(282): Homolog of NCBI NO: 9964087 NR Description: cinnamoyl CoA reductase [Lolium perenne]
  misc_feature (1)..(285): Homolog of NCBI NO: 17978649 NR Description: cinnamoyl-CoA reductase [Pinus taeda]
  misc_feature (1)..(282): Homolog of NCBI NO: 3242328 NR Description: cinnamoyl-CoA reductase [Zea mays]
  misc_feature (1)..(282): Homolog of NCBI NO: 3341511 NR Description: cinnamoyl-CoA reductase [Saccharum officinarum]
  misc_feature (1)..(285): Homolog of NCBI NO: 21553548 NR Description: cinnamoyl-CoA reductase-like protein [Arabidopsis
  misc_feature (1)..(285): Homolog of NCBI NO: 15234751 NR Description: cinnamoyl-CoA reductase-related [Arabidopsis
  misc_feature (1)..(279): Homolog of NCBI NO: 21553382 NR Description: putative cinnamoyl CoA reductase [Arabidopsis
  misc_feature (1)..(279): Homolog of NCBI NO: 18400407 NR Description: cinnamoyl-CoA reductase-related [Arabidopsis
  misc_feature (1)..(279): Homolog of NCBI NO: 25412171 NR Description: probable cinnamoyl CoA reductase [imported] -
  misc_feature (1)..(291): Homolog of NCBI NO: 37537132 NR Description: putative cinnamoyl-CoA reductase
MDASGPLGQALVHRLLRRGYTVHAATYGRSLDALALLAAAGHDEDRLKLFRADPFDYHSIADAVRGCSGLFCMFNTHEDQAGCDEVMVEVEVRAAQNVLEACAQTVTMERVVFTSSVTAVVWKDDDHKPVDAFDERNWSDLNLCRKRKLWHALAKTLSEKTAWALAMDRGVDMVAINAGLLTGPGLSSAHPCLKGVPEMYEHGVLVTVDADFLADAHVAAYECPTAFGRYLCFNNVVCRPEDALQFAQMLTPSAPCYPPSDELKVIPQRIQNKKLNNLMVEFASAIYGDLD

SEQ ID NO: 61298 - DNA, 994 bp, Triticum aestivum
  misc_feature (1)..(994): Ceres Seq. ID no. 12623816
catgtcccttgccgccgcagcctccccgtcctcgtcccgcttcctgttgccctccacggccgcccgccgccggttcctccaccacctcctcgccgcgcccgcgcccccgaggccgccgcagcttcggcgctgctccccgtaccactggatggcgcaattttgggctgaaggatcactggagaagaacaacgctctggttgaatacctgaaacagtatggtgttgttcgaaccgataaagtggcagaagttatggaaactatcgaccgagccttatttgtaccggagggctttaccccttacaccgacagtcctatgcctattggttacaatgcaacaatatctgctcctcacatgcacgcaacctgcttagaactgttgaaggattatttacagccaggcatgcatgctctggacgttggatcaggcagtggttacttgactgcttgctttgcaatgatggtcggaccagaaggtcgcgcagtggggattgaacacattcctgaactcgttgttgcttctactgaaaatgtcgaacggagtgctgcagcagcactaatgaaggatggttcactttcttttcatgtttcagatggaaggcttggctggccggatgcggcgccatacgatgctattcatgtgggcgcagcggcacctgagatccctcggccactgctggagcagctgaagcctggcgggcggatggtcatacccgttggcacatactctcaggacctgcaggtgattgacaagagcgccgacggatccaccagcgtccgcaacgatgcctctgttcgctacgtccctctgaccagccgctctgctcagctgcaggacagctgagatccttcgctctggatctggaaatgtgtgtgtatatatgtgagtgccgatgatctttgtctaccaatgtggcgtctgatgttttagatggtttggttttgtataatgcttactgctggttgatgttgcttagaatatgtgaatacgtgttgt

SEQ ID NO: 61299 - protein, 279 aa, Triticum aestivum
  peptide (1)..(279): Ceres Seq. ID no. 12623817
  misc_feature (60)..(274): Pfam Name: Protein-L-isoaspartate(D-aspartate) Pfam Description: Protein-L-isoaspartate(D-aspartate)
  misc_feature (54)..(275): Homolog of NCBI NO: 482365 NR Description: protein-L-isoaspartate(D-aspartate)
  misc_feature (54)..(275): Homolog of NCBI NO: 130215 NR Description: PROTEIN-L-ISOASPARTATE(D-ASPARTATE) (PROTEIN-BETA-ASPARTATE METHYLTRANSFERASE) (PIMT) (PROTEIN METHYLTRANSFERASE) (L-ISOASPARTYL PROTEIN CARBOXYL
  misc_feature (54)..(275): Homolog of NCBI NO: 18859221 NR Description: l-isoaspartyl protein carboxyl methyltransferase
  misc_feature (65)..(275): Homolog of NCBI NO: 37589722 NR Description: Unknown (protein for MGC:73268) [Danio rerio]
  misc_feature (54)..(275): Homolog of NCBI NO: 19070126 NR Description: protein carboxyl-o-methyltransferase [Sus scrofa
  misc_feature (57)..(276): Homolog of NCBI NO: 26451260 NR Description: unknown protein [Arabidopsis thaliana]
  misc_feature (50)..(277): Homolog of NCBI NO: 22331684 NR Description: similar to protein-L-isoaspartate(D-aspartate)
  misc_feature (50)..(277): Homolog of NCBI NO: 1322021 NR Description: L-isoaspartyl methyltransferase
  misc_feature (50)..(279): Homolog of NCBI NO: 38345249 NR Description: OSJNBb0011N17.10 [Oryza sativa (japonica
  misc_feature (50)..(279): Homolog of NCBI NO: 2499570 NR Description: PROTEIN-L-ISOASPARTATE O-METHYLTRANSFERASE METHYLTRANSFERASE) (PIMT) (PROTEIN L-ISOASPARTYL
MSLAAAASPSSSRFLLPSTAARRRFLHHLLAAPAPPRPPQLRRCSPYHWMAQFWAEGSLEKNNALVEYLKQYGVVRTDKVAEVMETIDRALFVPEGFTPYTDSPMPIGYNATISAPHMHATCLELLKDYLQPGMHALDVGSGSGYLTACFAMMVGPEGRAVGIEHIPELVVASTENVERSAAAALMKDGSLSFHVSDGRLGWPDAAPYDAIHVGAAAPEIPRPLLEQLKPGGRMVIPVGTYSQDLQVIDKSADGSTSVRNDASVRYVPLTSRSAQLQDS

SEQ ID NO: 61300 - protein, 230 aa, Triticum aestivum
  peptide (1)..(230): Ceres Seq. ID no. 12623818
  misc_feature (11)..(225): Pfam Name: Protein-L-isoaspartate(D-aspartate) Pfam Description: Protein-L-isoaspartate(D-aspartate)
  misc_feature (5)..(226): Homolog of NCBI NO: 482365 NR Description: protein-L-isoaspartate(D-aspartate)
  misc_feature (5)..(226): Homolog of NCBI NO: 130215 NR Description: PROTEIN-L-ISOASPARTATE(D-ASPARTATE) (PROTEIN-BETA-ASPARTATE METHYLTRANSFERASE) (PIMT) (PROTEIN METHYLTRANSFERASE) (L-ISOASPARTYL PROTEIN CARBOXYL
  misc_feature (5)..(226): Homolog of NCBI NO: 18859221 NR Description: l-isoaspartyl protein carboxyl methyltransferase
  misc_feature (16)..(226): Homolog of NCBI NO: 37589722 NR Description: Unknown (protein for MGC:73268) [Danio rerio]
  misc_feature (5)..(226): Homolog of NCBI NO: 19070126 NR Description: protein carboxyl-o-methyltransferase [Sus scrofa
  misc_feature (8)..(227): Homolog of NCBI NO: 26451260 NR Description: unknown protein [Arabidopsis thaliana]
  misc_feature (1)..(228): Homolog of NCBI NO: 22331684 NR Description: similar to protein-L-isoaspartate(D-aspartate)
  misc_feature (1)..(228): Homolog of NCBI NO: 1322021 NR Description: L-isoaspartyl methyltransferase
  misc_feature (1)..(230): Homolog of NCBI NO: 38345249 NR Description: OSJNBb0011N17.10 [Oryza sativa (japonica
  misc_feature (1)..(230): Homolog of NCBI NO: 2499570 NR Description: PROTEIN-L-ISOASPARTATE O-METHYLTRANSFERASE METHYLTRANSFERASE) (PIMT) (PROTEIN L-ISOASPARTYL
MAQFWAEGSLEKNNALVEYLKQYGVVRTDKVAEVMETIDRALFVPEGFTPYTDSPMPIGYNATISAPHMHATCLELLKDYLQPGMHALDVGSGSGYLTACFAMMVGPEGRAVGIEHIPELVVASTENVERSAAAALMKDGSLSFHVSDGRLGWPDAAPYDAIHVGAAAPEIPRPLLEQLKPGGRMVIPVGTYSQDLQVIDKSADGSTSVRNDASVRYVPLTSRSAQLQDS

SEQ ID NO: 61301 - protein, 196 aa, Triticum aestivum
  peptide (1)..(196): Ceres Seq. ID no. 12623819
  misc_feature (1)..(191): Pfam Name: Protein-L-isoaspartate(D-aspartate) Pfam Description: Protein-L-isoaspartate(D-aspartate)
  misc_feature (1)..(192): Homolog of NCBI NO: 482365 NR Description: protein-L-isoaspartate(D-aspartate)
  misc_feature (1)..(192): Homolog of NCBI NO: 130215 NR Description: PROTEIN-L-ISOASPARTATE(D-ASPARTATE) (PROTEIN-BETA-ASPARTATE METHYLTRANSFERASE) (PIMT) (PROTEIN METHYLTRANSFERASE) (L-ISOASPARTYL PROTEIN CARBOXYL
  misc_feature (1)..(192): Homolog of NCBI NO: 18859221 NR Description: l-isoaspartyl protein carboxyl methyltransferase
  misc_feature (1)..(192): Homolog of NCBI NO: 37589722 NR Description: Unknown (protein for MGC:73268) [Danio rerio]
  misc_feature (1)..(192): Homolog of NCBI NO: 19070126 NR Description: protein carboxyl-o-methyltransferase [Sus scrofa
  misc_feature (1)..(193): Homolog of NCBI NO: 26451260 NR Description: unknown protein [Arabidopsis thaliana]
  misc_feature (1)..(194): Homolog of NCBI NO: 22331684 NR Description: similar to protein-L-isoaspartate(D-aspartate)
  misc_feature (1)..(194): Homolog of NCBI NO: 1322021 NR Description: L-isoaspartyl methyltransferase
  misc_feature (1)..(196): Homolog of NCBI NO: 38345249 NR Description: OSJNBb0011N17.10 [Oryza sativa (japonica
  misc_feature (1)..(196): Homolog of NCBI NO: 2499570 NR Description: PROTEIN-L-ISOASPARTATE O-METHYLTRANSFERASE METHYLTRANSFERASE) (PIMT) (PROTEIN L-ISOASPARTYL
METIDRALFVPEGFTPYTDSPMPIGYNATISAPHMHATCLELLKDYLQPGMHALDVGSGSGYLTACFAMMVGPEGRAVGIEHIPELVVASTENVERSAAAALMKDGSLSFHVSDGRLGWPDAAPYDAIHVGAAAPEIPRPLLEQLKPGGRMVIPVGTYSQDLQVIDKSADGSTSVRNDASVRYVPLTSRSAQLQDS

SEQ ID NO: 61302 - DNA, 771 bp, Triticum aestivum
  misc_feature (1)..(771): Ceres Seq. ID no. 13661508
agagccaaccaacagggcgaccaagctcaattagctcagactactcagctaccgcctgtctgctctcaattgctccataccctacatggcgagggttcaccccaacatggtggccgcgccgggcgccgtcgacgaggcgccggccagctccgcggtggacgggccgacgacgctgacggtgtggcgcaagtccctgctgttcgactgcaaggggttcacggtgttcgacgccgagggcaaccttgcctaccgcgtcgacagctacgcctccgagagcggcgacgaggtcgtcctcatggacgcggccggccgccccgccttcaccgtccgccgcaagcggttcaccctgcagggcgagcagtggctcgtcttctccggcgaggagacgcggagtcccgtgtacaccgtcaggcggagcggccgcggcaagacgttggcgcacgtgacggcgtgcgcgggctccggccatgggccgtcttacgaggtggaggggtcgtacgcgcggcggagctgcgtggtgtacgacggcgagcggcgcgcggtggcggagatcaggcccaaggaggtggtcggcacggatgtgttccgcctggcggtgcagcccggcgtgggcgtgccgctcgccatggcagtggtggtggcgctggagcagatgttcgcgaggccgtcgctcctcaggagctggtccacatagattatatatttaattataatttgtttgttcatcggagtacgtctcagtatagccaagcttatagcttttttttgcct

SEQ ID NO: 61303 - protein, 257 aa, Triticum aestivum
  peptide (1)..(257): Ceres Seq. ID no. 13661509
  misc_feature (170)..(227): Pfam Name: MARCKS family Pfam Description: MARCKS family
RANQQGDQAQLAQTTQLPPVCSQLLHTLHGEGSPQHGGRAGRRRRGAGQLRGGRADDADGVAQVPAVRLQGVHGVRRRGQPCLPRRQLRLRERRRGRPHGRGRPPRLHRPPQAVHPAGRAVARLLRRGDAESRVHRQAERPRQDVGARDGVRGLRPWAVLRGGGVVRAAELRGVRRRAARGGGDQAQGGGRHGCVPPGGAARRGRAARHGSGGGAGADVREAVAPQELVHIDYIFNYNLFVHRSTSQYSQAYSFFLP

SEQ ID NO: 61304 - protein, 202 aa, Triticum aestivum
  peptide (1)..(202): Ceres Seq. ID no. 13661510
  misc_feature (30)..(186): Pfam Name: Protein of unknown function (DUF567) Pfam Description: Protein of unknown function (DUF567)
  misc_feature (11)..(161): Homolog of NCBI NO: 15238123 NR Description: hypothetical protein [Arabidopsis thaliana]
  misc_feature (29)..(191): Homolog of NCBI NO: 15220064 NR Description: expressed protein [Arabidopsis thaliana]
  misc_feature (30)..(190): Homolog of NCBI NO: 21554362 NR Description: unknown [Arabidopsis thaliana]
  misc_feature (30)..(190): Homolog of NCBI NO: 18400907 NR Description: expressed protein [Arabidopsis thaliana]
  misc_feature (1)..(191): Homolog of NCBI NO: 15224921 NR Description: expressed protein [Arabidopsis thaliana]
  misc_feature (111)..(201): Homolog of NCBI NO: 27542767 NR Description: hypothetical protein-like protein [Sorghum
  misc_feature (3)..(99): Homolog of NCBI NO: 27542767 NR Description: hypothetical protein-like protein [Sorghum
  misc_feature (6)..(200): Homolog of NCBI NO: 27542769 NR Description: hypothetical protein-like protein [Sorghum
  misc_feature (14)..(200): Homolog of NCBI NO: 27542765 NR Description: hypothetical protein-like protein [Sorghum
  misc_feature (1)..(202): Homolog of NCBI NO: 34909256 NR Description: B1148D12.16 [Oryza sativa (japonica
MARVHPNMVAAPGAVDEAPASSAVDGPTTLTVWRKSLLFDCKGFTVFDAEGNLAYRVDSYASESGDEVVLMDAAGRPAFTVRRKRFTLQGEQWLVFSGEETRSPVYTVRRSGRGKTLAHVTACAGSGHGPSYEVEGSYARRSCVVYDGERRAVAEIRPKEVVGTDVFRLAVQPGVGVPLAMAVVVALEQMFARPSLLRSWST

SEQ ID NO: 61305 - protein, 195 aa, Triticum aestivum
  peptide (1)..(195): Ceres Seq. ID no. 13661511
  misc_feature (23)..(179): Pfam Name: Protein of unknown function (DUF567) Pfam Description: Protein of unknown function (DUF567)
  misc_feature (4)..(154): Homolog of NCBI NO: 15238123 NR Description: hypothetical protein [Arabidopsis thaliana]
  misc_feature (22)..(184): Homolog of NCBI NO: 15220064 NR Description: expressed protein [Arabidopsis thaliana]
  misc_feature (23)..(183): Homolog of NCBI NO: 21554362 NR Description: unknown [Arabidopsis thaliana]
  misc_feature (23)..(183): Homolog of NCBI NO: 18400907 NR Description: expressed protein [Arabidopsis thaliana]
  misc_feature (1)..(184): Homolog of NCBI NO: 15224921 NR Description: expressed protein [Arabidopsis thaliana]
  misc_feature (104)..(194): Homolog of NCBI NO: 27542767 NR Description: hypothetical protein-like protein [Sorghum
  misc_feature (1)..(92): Homolog of NCBI NO: 27542767 NR Description: hypothetical protein-like protein [Sorghum
  misc_feature (1)..(193): Homolog of NCBI NO: 27542769 NR Description: hypothetical protein-like protein [Sorghum
  misc_feature (7)..(193): Homolog of NCBI NO: 27542765 NR Description: hypothetical protein-like protein [Sorghum
  misc_feature (1)..(195): Homolog of NCBI NO: 34909256 NR Description: B1148D12.16 [Oryza sativa (japonica
MVAAPGAVDEAPASSAVDGPTTLTVWRKSLLFDCKGFTVFDAEGNLAYRVDSYASESGDEVVLMDAAGRPAFTVRRKRFTLQGEQWLVFSGEETRSPVYTVRRSGRGKTLAHVTACAGSGHGPSYEVEGSYARRSCVVYDGERRAVAEIRPKEVVGTDVFRLAVQPGVGVPLAMAVVVALEQMFARPSLLRSWST

SEQ ID NO: 61306 - DNA, 792 bp, Triticum aestivum
  misc_feature (1)..(792): Ceres Seq. ID no. 13661674
ccccgaaggccgtataatcattcgcgaagaacgggaatggcgtaaaaagaagcccatcatctcgcatgaggaggaggctgatgacaagacctctgtcagaagccagtcagtgaagaggaggaaggtggccagcactggctggtcctacaccggccatgagtacaccagcaagaaggccggtggnnnctcaagaagaaagacaagatggagccatatgcttactggcctttggatcgtaagctgctcaaccgccggtcggatcgcaagcagtccgcccgcaaggggcatggccagtgtcatgaagatggcgaaaaggtttgaggggaagagcgcttcgggtgccctcgcagccaagaggacacaaaaacmcaagcacaagaagaacaagtgagtagacaaggctgtagggaatttttgtaactgtacagcgagggtttagctagcactagctgcgcttgtcgtggcgtatttatgctgctgccgtttctctgggtttttcctgaaggaaaattttgagtgcttctccgggctttttcctgaaggaaaaacttaagtttattgttcgcaagatataattttctgtatcttacttttttttgtactcccagattcagattgactgaaatgtgttgtaattttgattgatggtggaatgtaaaatcttgcaatttgccatctagtgttagtttgtctagccgtatgcctttattgtaatgcaaaacgcttgtgtggatagctgaagatggttctcaaatttggaggtaatagactaatgacagttgatgtagatgc

SEQ ID NO: 61307 - protein, 129 aa, Triticum aestivum
  peptide (1)..(129): Ceres Seq. ID no. 15220128
  misc_feature (2)..(129): Homolog of NCBI NO: 7485467 NR Description: nodulin-like protein [imported] - Arabidopsis
  misc_feature (2)..(129): Homolog of NCBI NO: 30686022 NR Description: 68409.m03800 nodulin-related protein [Arabidopsis
  misc_feature (61)..(61): Xaa is any aa, unknown or other
  misc_feature (62)..(62): Xaa is any aa, unknown or other
  misc_feature (123)..(123): Xaa is any aa, unknown or other
PEGRIIIREEREWRKKKPIISHEEEADDKTSVRSQSVKRRKVASTGWSYTGHEYTSKKAGXXSRRKTRWSHMLTGLWIVSCSTAGRIASSPPARGMASVMKMAKRFEGKSASGALAAKRTQKXKHKKNK

SEQ ID NO: 61308 - protein, 58 aa, Triticum aestivum
  peptide (1)..(58): Ceres Seq. ID no. 15220129
  misc_feature (1)..(58): Homolog of NCBI NO: 7485467 NR Description: nodulin-like protein [imported] - Arabidopsis
  misc_feature (1)..(58): Homolog of NCBI NO: 30686022 NR Description: 68409.m03800 nodulin-related protein [Arabidopsis
  misc_feature (52)..(52): Xaa is any aa, unknown or other
MLTGLWIVSCSTAGRIASSPPARGMASVMKMAKRFEGKSASGALAAKRTQKXKHKKNK

SEQ ID NO: 61309 - DNA, 710 bp, Triticum aestivum
  misc_feature (1)..(710): Ceres Seq. ID no. 13661521
ttggaactagagcgaaaaccaaaagatgggtctaagagcactgcctcttcaacataatagtggattcatctccacgaccaaagtcccgatctcaagaacctcgcagagattaagccggaaccctagatgggtcgtggtgtcggccaagcaagagaaagatgaggagaagaagagggaagatgagacttcattgttcaccagactaacagatgcgttggatttcgcacaggttcggtcggagaaagacgccgagcttctctatgaggcccgtgaagccaccaaatctggtggcaagatgagcaaagaacagtatggggcgttgagaagaaaaatcggagggacatacaaggacttctttaaatcctacgttgaagtggatggagaatatgtggaggaaggatgggtggacaaaacatgtaagatatgcaaaaaggacacaaagggtgaggcaagacaagtggacaaggcagggagatatgctcatgtctcctgtcttcaaaacccctccaactcttctggaaatttcttcaccagactcttctcaagatgatcaatctcccatatcgtatacatgactctgtttgtttctgtttttttatagctaagtcattcttgcaattttgtgtatcttatagaaatcgaaattatacacatgccaaaacaaaaattatgtgtattgggatctttagaaacaaagacataacgatatc

SEQ ID NO: 61310 - protein, 174 aa, Triticum aestivum
  peptide (1)..(174): Ceres Seq. ID no. 13661522
  misc_feature (1)..(174): Homolog of NCBI NO: 34907850 NR Description: P0031D02.12 [Oryza sativa (japonica
  misc_feature (1)..(174): Homolog of NCBI NO: 15228878 NR Description: expressed protein [Arabidopsis thaliana]
MGLRALPLQHNSGFISTTKVPISRTSQRLSRNPRWVVVSAKQEKDEEKKREDETSLFTRLTDALDFAQVRSEKDAELLYEAREATKSGGKMSKEQYGALRRKIGGTYKDFFKSYVEVDGEYVEEGWVDKTCKICKKDTKGEARQVDKAGRYAHVSCLQNPSNSSGNFFTRLFSR

SEQ ID NO: 61311 - DNA, 890 bp, Triticum aestivum
  misc_feature (1)..(890): Ceres Seq. ID no. 12784413
actttaaatacctccgctccccggcccgtagcgtagtagtacgcatcagccctcccttccctggcctcagtagttagccactagccactgaacactaccaggagggatcagaaggctaccatgaggcaaggagggggcggaggcgacggggtgagccccggcaatgtcccggtgtgctactacggcgcgggcgggcgagtctcggccaccctggagcggcgggtgcgcgccgccgaggtgctcctgcggtgcgcggcgtgcggcctggccgtgctcgccgccgccctcctcggcgccgaccgccagtcccgcaccttcttctcctgtgatcaggtgatggcgtacgtgataatcggggcggtggcggtggccatggaggcggcgctgctggggaagaccgggcaggtggagttccagtggatgaagacgtgcgagctataccagcggttctgcacgcaggcggggggcggcgttgcgtgcgccgtcgccgccagcgccaccatggtcgggatcgccctcgtctccgccttcaacctcttccgcctctacggccacggcaagggcagcagcaagtgaagccaaagccctcgctgcgtgcatgcgtgcatgcatggccggcctcttttaggttttaacgacaccgaatccaaatccagtccggggagagaaccgtacgtacgtagcatatgtagctaccgttgctctttttactatagtttgtttgatgttgacacgcatggtgtcagtcagcgttagccataagaagctctgtgggacaaaagctagaccggtttctctgtatatgatgtcaagtgatccacaaggtgtttgtagacagtaatactgctatgtgcgtaataaaagaggaacaagaaagcgatgtagtatcc

SEQ ID NO: 61312 - protein, 151 aa, Triticum aestivum
  peptide (1)..(151): Ceres Seq. ID no. 12784414
  misc_feature (35)..(125): Pfam Name: Domain of unknown function (DUF588) Pfam Description: Domain of unknown function (DUF588)
  misc_feature (44)..(140): Homolog of NCBI NO: 14030504 NR Description: salicylic acid-induced fragment 1 protein
  misc_feature (44)..(140): Homolog of NCBI NO: 15231842 NR Description: unknown protein; protein id: At3g14380.1
  misc_feature (70)..(143): Homolog of NCBI NO: 7485479 NR Description: hypothetical protein F14M19.110 - Arabidopsis
  misc_feature (70)..(143): Homolog of NCBI NO: 18416627 NR Description: Expressed protein
  misc_feature (35)..(142): Homolog of NCBI NO: 25408415 NR Description: hypothetical protein At2g35760 [imported] -
  misc_feature (35)..(147): Homolog of NCBI NO: 21617945 NR Description: unknown [Arabidopsis thaliana]
  misc_feature (35)..(147): Homolog of NCBI NO: 18403948 NR Description: expressed protein
  misc_feature (35)..(147): Homolog of NCBI NO: 18414659 NR Description: Expressed protein
MRQGGGGGDGVSPGNVPVCYYGAGGRVSATLERRVRAAEVLLRCAACGLAVLAAALLGADRQSRTFFSCDQVMAYVIIGAVAVAMEAALLGKTGQVEFQWMKTCELYQRFCTQAGGGVACAVAASATMVGIALVSAFNLFRLYGHGKGSSK

SEQ ID NO: 61313 - protein, 79 aa, Triticum aestivum
  peptide (1)..(79): Ceres Seq. ID no. 12784415
  misc_feature (1)..(53): Pfam Name: Domain of unknown function (DUF588) Pfam Description: Domain of unknown function (DUF588)
  misc_feature (1)..(68): Homolog of NCBI NO: 14030504 NR Description: salicylic acid-induced fragment 1 protein
  misc_feature (1)..(68): Homolog of NCBI NO: 15231842 NR Description: unknown protein; protein id: At3g14380.1
  misc_feature (1)..(71): Homolog of NCBI NO: 7485479 NR Description: hypothetical protein F14M19.110 - Arabidopsis
  misc_feature (1)..(71): Homolog of NCBI NO: 18416627 NR Description: Expressed protein
  misc_feature (1)..(70): Homolog of NCBI NO: 25408415 NR Description: hypothetical protein At2g35760 [imported] -
  misc_feature (1)..(75): Homolog of NCBI NO: 21617945 NR Description: unknown [Arabidopsis thaliana]
  misc_feature (1)..(75): Homolog of NCBI NO: 18403948 NR Description: expressed protein
  misc_feature (1)..(75): Homolog of NCBI NO: 18414659 NR Description: Expressed protein
MAYVIIGAVAVAMEAALLGKTGQVEFQWMKTCELYQRFCTQAGGGVACAVAASATMVGIALVSAFNLFRLYGHGKGSSK

SEQ ID NO: 61314 - DNA, 871 bp, Triticum aestivum
  misc_feature (1)..(871): Ceres Seq. ID no. 13662094
ctatctagtccaactgctccgccgcagatccgcgattgccagcagcaccatctccgaatcgcctcgctagggtttcctctccagcggcggccggctcgaccgtactccgttcgtgagcaatggctgcgaaagctgggaattctgtgggtggtgttcttccccatccccacgtgattggaaatgcatttgcccaacactactacaaaattctgaatgagtcaccagaggatgtccataagttctaccatgatcaaagtattcttggtcggaagccaaattctgatggtacattgacatctataaccacattgcgtgatatcaataaacactttgtatctacatacctcaagggatgttcgatggagatagacaatgtagattctcagccatcccacgagggcggtgtgctcgttttagttagtgggtccttcactgtccctgatgccatgaagcgtaggtttactcagtcgttcttccttgctccacaaaaaggaggctattttgttctgaatgatgtgcttagatacattccagttgagccagaaacaccacctgtcaaggttacagtgcttccgttgatggattatttctgggtatgatgatatcgccggtgaagtcatgaatcaatctacagaaagtacctccatcagcaatgaagtcatgaatgacagatagtcacgtctcggcagtgcactactagctttcttacagaatgcaagtttatccatctatagattatgtttgcttttgcaacaaatgggtgcgaaaagtttaacatttgcgaatgccttagcattgtacatacattatgacttgttaaaaggggagaaaacatcagacaagtatacaactgaatatatctattatatgc

SEQ ID NO: 61315 - protein, 159 aa, Triticum aestivum
  peptide (1)..(159): Ceres Seq. ID no. 13662095
  misc_feature (19)..(136): Pfam Name: Nuclear transport factor 2 (NTF2) domain Pfam Description: Nuclear transport factor 2 (NTF2) domain
  misc_feature (16)..(142): Homolog of NCBI NO: 30678068 NR Description: NTF2-containing RNA-binding protein, putative
  misc_feature (19)..(137): Homolog of NCBI NO: 9294171 NR Description: RNA-binding protein-like [Arabidopsis thaliana]
  misc_feature (11)..(152): Homolog of NCBI NO: 21742151 NR Description: OSJNBa0069D17.2 [Oryza sativa (japonica
  misc_feature (14)..(137): Homolog of NCBI NO: 21553535 NR Description: ras-GTPase-activating protein SH3-domain binding
  misc_feature (1)..(137): Homolog of NCBI NO: 30687772 NR Description: NTF2-containing RNA-binding protein, putative
  misc_feature (14)..(137): Homolog of NCBI NO: 30697455 NR Description: NTF2-containing RNA-binding protein, putative
  misc_feature (14)..(137): Homolog of NCBI NO: 30697452 NR Description: NTF2-containing RNA-binding protein, putative
  misc_feature (16)..(152): Homolog of NCBI NO: 18394029 NR Description: NTF2-containing RNA-binding protein, putative
  misc_feature (1)..(149): Homolog of NCBI NO: 31126693 NR Description: putative GAP SH3 binding protein
  misc_feature (1)..(136): Homolog of NCBI NO: 34394922 NR Description: putative Ras-GTPase activating protein SH3
MAAKAGNSVGGVLPHPHVIGNAFAQHYYKILNESPEDVHKFYHDQSILGRKPNSDGTLTSITTLRDINKHFVSTYLKGCSMEIDNVDSQPSHEGGVLVLVSGSFTVPDAMKRRFTQSFFLAPQKGGYFVLNDVLRYIPVEPETPPVKVTVLPLMDYFWV

SEQ ID NO: 61316 - protein, 79 aa, Triticum aestivum
  peptide (1)..(79): Ceres Seq. ID no. 13662096
  misc_feature (1)..(56): Pfam Name: Nuclear transport factor 2 (NTF2) domain Pfam Description: Nuclear transport factor 2 (NTF2) domain
  misc_feature (1)..(62): Homolog of NCBI NO: 30678068 NR Description: NTF2-containing RNA-binding protein, putative
  misc_feature (1)..(57): Homolog of NCBI NO: 9294171 NR Description: RNA-binding protein-like [Arabidopsis thaliana]
  misc_feature (1)..(72): Homolog of NCBI NO: 21742151 NR Description: OSJNBa0069D17.2 [Oryza sativa (japonica
  misc_feature (1)..(57): Homolog of NCBI NO: 21553535 NR Description: ras-GTPase-activating protein SH3-domain binding
  misc_feature (1)..(57): Homolog of NCBI NO: 30687772 NR Description: NTF2-containing RNA-binding protein, putative
  misc_feature (1)..(57): Homolog of NCBI NO: 30697455 NR Description: NTF2-containing RNA-binding protein, putative
  misc_feature (1)..(57): Homolog of NCBI NO: 30697452 NR Description: NTF2-containing RNA-binding protein, putative
  misc_feature (1)..(72): Homolog of NCBI NO: 18394029 NR Description: NTF2-containing RNA-binding protein, putative
  misc_feature (1)..(69): Homolog of NCBI NO: 31126693 NR Description: putative GAP SH3 binding protein
  misc_feature (1)..(56): Homolog of NCBI NO: 34394922 NR Description: putative Ras-GTPase activating protein SH3
MEIDNVDSQPSHEGGVLVLVSGSFTVPDAMKRRFTQSFFLAPQKGGYFVLNDVLRYIPVEPETPPVKVTVLPLMDYFWV

SEQ ID NO: 61317 - DNA, 1038 bp, Triticum aestivum
  misc_feature (1)..(1038): Ceres Seq. ID no. 13598160
acctaaaggcccaaccgcccaagcgacggccatagccgaaaaccctaacccgccgccacgccgccctcccgccacccgcgccggcgccgcttctccccgccgatacaggccaaaaccctcgcgcgggggcatcggaggcggaggagggatggcgtccaacggggacaacaagcggctgttccgcgtgcggcgcacggtgttgcagatgctgagagaccgcgggtacacggtgaaggacgaggaaatcaagctgtccctgtacgagttcgtcgaccgctacggagaccccgtccgccgggacgagatcgtcatccattgcgagaagcagggcgaccccaacgacaaggtcaacgtcttcttcctcgacgagtccaagaccggcctggccgtggtcaggagctgcgtcgagaagatgaagctggggaacgccaccaatggcatactcgtcctgcagaaggcgctgagcggcccggcccggaccgaggtcgcacagagcaagaagtaccacctcgaggtcttccaggaaggggagcttcttgtaaacattactgaacaccatctcgttccgaagcacgagctcctgagtgacgaggagaagaaggagctgctgcagaaatacactgcccacgaaactcagctcccgaggattcagctcacggatccggtagcaagataccacggcatgaagcgtgggcaggtggtgaagatcacccggcagagcgaagtcgccggagaatacgtgacctaccgctacgtcatctgatcctcaccgacgtatcaaggcctgaggttggtctgggatttaaaatggttccttcgtcgccaaacccctcccagtactcgaaagaagcattgctgtgtgtgtgtgtggaggaaccaaggtgctcgctgaagtggctcggtgcccctttgtttgtaacttgctggcaatttggcatgagtgtgttagctagaaaaataggtttctgtgtagatgtgctgtgttccgtgctgctaaataactcttgactgtatacgtgagatgcgttggtctgttcc

SEQ ID NO: 61318 - protein, 253 aa, Triticum aestivum
  peptide (1)..(253): Ceres Seq. ID no. 13598161
  misc_feature (180)..(253): Pfam Name: RNA polymerase Rpb5, C-terminal domain Pfam Description: RNA polymerase Rpb5, C-terminal domain
  misc_feature (50)..(252): Homolog of NCBI NO: 2896797 NR Description: RPB5_Human [Homo sapiens]
  misc_feature (50)..(252): Homolog of NCBI NO: 14589951 NR Description: DNA directed RNA polymerase II polypeptide E
  misc_feature (50)..(252): Homolog of NCBI NO: 28497750 NR Description: polymerase (RNA) II (DNA directed) polypeptide E
  misc_feature (50)..(252): Homolog of NCBI NO: 2135016 NR Description: DNA-directed RNA polymerase (EC 2.7.7.6) II 23K
  misc_feature (50)..(252): Homolog of NCBI NO: 1173134 NR Description: DNA-directed RNA polymerase II 23 kDa polypeptide
  misc_feature (58)..(253): Homolog of NCBI NO: 17507947 NR Description: RNA polymerase Rpb5, N-terminal domain and RNA
  misc_feature (58)..(253): Homolog of NCBI NO: 39595790 NR Description: Hypothetical protein CBG12745 [Caenorhabditis
  misc_feature (58)..(253): Homolog of NCBI NO: 15242916 NR Description: eukaryotic rpb5 RNA polymerase subunit family
  misc_feature (50)..(253): Homolog of NCBI NO: 15228724 NR Description: DNA-directed RNA polymerase (RNA polymerase),
  misc_feature (50)..(253): Homolog of NCBI NO: 38344231 NR Description: OJ991113_30.8 [Oryza sativa (japonica
PKGPTAQATAIAENPNPPPRRPPATRAGAASPRRYRPKPSRGGIGGGGGMASNGDNKRLFRVRRTVLQMLRDRGYTVKDEEIKLSLYEFVDRYGDPVRRDEIVIHCEKQGDPNDKVNVFFLDESKTGLAVVRSCVEKMKLGNATNGILVLQKALSGPARTEVAQSKKYHLEVFQEGELLVNITEHHLVPKHELLSDEEKKELLQKYTAHETQLPRIQLTDPVARYHGMKRGQVVKITRQSEVAGEYVTYRYVI

SEQ ID NO: 61319 - protein, 204 aa, Triticum aestivum
  peptide (1)..(204): Ceres Seq. ID no. 13598162
  misc_feature (131)..(204): Pfam Name: RNA polymerase Rpb5, C-terminal domain Pfam Description: RNA polymerase Rpb5, C-terminal domain
  misc_feature (1)..(203): Homolog of NCBI NO: 2896797 NR Description: RPB5_Human [Homo sapiens]
  misc_feature (1)..(203): Homolog of NCBI NO: 14589951 NR Description: DNA directed RNA polymerase II polypeptide E
  misc_feature (1)..(203): Homolog of NCBI NO: 28497750 NR Description: polymerase (RNA) II (DNA directed) polypeptide E
  misc_feature (1)..(203): Homolog of NCBI NO: 2135016 NR Description: DNA-directed RNA polymerase (EC 2.7.7.6) II 23K
  misc_feature (1)..(203): Homolog of NCBI NO: 1173134 NR Description: DNA-directed RNA polymerase II 23 kDa polypeptide
  misc_feature (9)..(204): Homolog of NCBI NO: 17507947 NR Description: RNA polymerase Rpb5, N-terminal domain and RNA
  misc_feature (9)..(204): Homolog of NCBI NO: 39595790 NR Description: Hypothetical protein CBG12745 [Caenorhabditis
  misc_feature (9)..(204): Homolog of NCBI NO: 15242916 NR Description: eukaryotic rpb5 RNA polymerase subunit family
  misc_feature (1)..(204): Homolog of NCBI NO: 15228724 NR Description: DNA-directed RNA polymerase (RNA polymerase),
  misc_feature (1)..(204): Homolog of NCBI NO: 38344231 NR Description: OJ991113_30.8 [Oryza sativa (japonica
MASNGDNKRLFRVRRTVLQMLRDRGYTVKDEEIKLSLYEFVDRYGDPVRRDEIVIHCEKQGDPNDKVNVFFLDESKTGLAVVRSCVEKMKLGNATNGILVLQKALSGPARTEVAQSKKYHLEVFQEGELLVNITEHHLVPKHELLSDEEKKELLQKYTAHETQLPRIQLTDPVARYHGMKRGQVVKITRQSEVAGEYVTYRYVI

SEQ ID NO: 61320 - protein, 185 aa, Triticum aestivum
  peptide (1)..(185): Ceres Seq. ID no. 13598163
  misc_feature (112)..(185): Pfam Name: RNA polymerase Rpb5, C-terminal domain Pfam Description: RNA polymerase Rpb5, C-terminal domain
  misc_feature (1)..(184): Homolog of NCBI NO: 2896797 NR Description: RPB5_Human [Homo sapiens]
  misc_feature (1)..(184): Homolog of NCBI NO: 14589951 NR Description: DNA directed RNA polymerase II polypeptide E
  misc_feature (1)..(184): Homolog of NCBI NO: 28497750 NR Description: polymerase (RNA) II (DNA directed) polypeptide E
  misc_feature (1)..(184): Homolog of NCBI NO: 2135016 NR Description: DNA-directed RNA polymerase (EC 2.7.7.6) II 23K
  misc_feature (1)..(184): Homolog of NCBI NO: 1173134 NR Description: DNA-directed RNA polymerase II 23 kDa polypeptide
  misc_feature (1)..(185): Homolog of NCBI NO: 17507947 NR Description: RNA polymerase Rpb5, N-terminal domain and RNA
  misc_feature (1)..(185): Homolog of NCBI NO: 39595790 NR Description: Hypothetical protein CBG12745 [Caenorhabditis
  misc_feature (1)..(185): Homolog of NCBI NO: 15242916 NR Description: eukaryotic rpb5 RNA polymerase subunit family
  misc_feature (1)..(185): Homolog of NCBI NO: 15228724 NR Description: DNA-directed RNA polymerase (RNA polymerase),
  misc_feature (1)..(185): Homolog of NCBI NO: 38344231 NR Description: OJ991113_30.8 [Oryza sativa (japonica
MLRDRGYTVKDEEIKLSLYEFVDRYGDPVRRDEIVIHCEKQGDPNDKVNVFFLDESKTGLAVVRSCVEKMKLGNATNGILVLQKALSGPARTEVAQSKKYHLEVFQEGELLVNITEHHLVPKHELLSDEEKKELLQKYTAHETQLPRIQLTDPVARYHGMKRGQVVKITRQSEVAGEYVTYRYVI

SEQ ID NO: 61321 - DNA, 555 bp, Triticum aestivum
  misc_feature (1)..(555): Ceres Seq. ID no. 13661526
aacagccagccagcacaagctcaacgagccacgctagcgtttgagagaacaaaaacagtccaccgacgtacgatggcgccgagcaccttcccgctcgcgctcctggccgtgtccctcgttctcctggtggtcggcggcctcgggccggcggcggaggcacagccgccggggaggtgcgtgccgcagctgaaccggctgctggcgtgccgcgcgtacctggtgcccggcgcggccgaccccagcgccgactgctgcagcgcgctgaactccatctcgcgcgactgcgcgtgcagcaccatgggcatcatcaacagcctcccctcccgctgcaacatcggacaagtcaactgctcggcttgaggcggaacgaagaaacgatgcgagtcacagagtgactaataatgaaggtggtcatttctgccgttgttgcggcatgtctgcctcttcgccgccgtcttagttttcgtttgtccagtctgtcgtgtcctgctgctgctgtcgatctcgacacgttaataaaatggacgatttgaggcacggcctctcactttaacc

SEQ ID NO: 61322 - protein, 119 aa, Triticum aestivum
  peptide (1)..(119): Ceres Seq. ID no. 13661527
  misc_feature (59)..(117): Pfam Name: Protease inhibitor/seed storage/LTP family Pfam Description: Protease inhibitor/seed storage/LTP family
  misc_feature (33)..(119): Homolog of NCBI NO: 6016523 NR Description: M7 protein precursor (LHM7)
  misc_feature (33)..(119): Homolog of NCBI NO: 6016504 NR Description: LIM2 PROTEIN PRECURSOR
  misc_feature (33)..(119): Homolog of NCBI NO: 452592 NR Description: ORF [Lilium longiflorum]
  misc_feature (33)..(119): Homolog of NCBI NO: 6016503 NR Description: LIM1 PROTEIN PRECURSOR
  misc_feature (29)..(118): Homolog of NCBI NO: 15242288 NR Description: putative protein
  misc_feature (39)..(117): Homolog of NCBI NO: 6137299 NR Description: YY1 protein precursor
  misc_feature (28)..(119): Homolog of NCBI NO: 5902675 NR Description: PROTEIN 108 PRECURSOR
  misc_feature (25)..(117): Homolog of NCBI NO: 6016542 NR Description: MEN-8 protein precursor
  misc_feature (27)..(117): Homolog of NCBI NO: 6137315 NR Description: Anther-specific protein MZm3-3 precursor
  misc_feature (28)..(119): Homolog of NCBI NO: 6689676 NR Description: LTP-like protein; anther specific protein [Zea
NSQPAQAQRATLAFERTKTVHRRTMAPSTFPLALLAVSLVLLVVGGLGPAAEAQPPGRCVPQLNRLLACRAYLVPGAADPSADCCSALNSISRDCACSTMGIINSLPSRCNIGQVNCSA

SEQ ID NO: 61323 - protein, 95 aa, Triticum aestivum
  peptide (1)..(95): Ceres Seq. ID no. 13661528
  misc_feature (35)..(93): Pfam Name: Protease inhibitor/seed storage/LTP family Pfam Description: Protease inhibitor/seed storage/LTP family
  misc_feature (9)..(95): Homolog of NCBI NO: 6016523 NR Description: M7 protein precursor (LHM7)
  misc_feature (9)..(95): Homolog of NCBI NO: 6016504 NR Description: LIM2 PROTEIN PRECURSOR
  misc_feature (9)..(95): Homolog of NCBI NO: 452592 NR Description: ORF [Lilium longiflorum]
  misc_feature (9)..(95): Homolog of NCBI NO: 6016503 NR Description: LIM1 PROTEIN PRECURSOR
  misc_feature (5)..(94): Homolog of NCBI NO: 15242288 NR Description: putative protein
  misc_feature (15)..(93): Homolog of NCBI NO: 6137299 NR Description: YY1 protein precursor
  misc_feature (4)..(95): Homolog of NCBI NO: 5902675 NR Description: PROTEIN 108 PRECURSOR
  misc_feature (1)..(93): Homolog of NCBI NO: 6016542 NR Description: MEN-8 protein precursor
  misc_feature (3)..(93): Homolog of NCBI NO: 6137315 NR Description: Anther-specific protein MZm3-3 precursor
  misc_feature (4)..(95): Homolog of NCBI NO: 6689676 NR Description: LTP-like protein; anther specific protein [Zea
MAPSTFPLALLAVSLVLLVVGGLGPAAEAQPPGRCVPQLNRLLACRAYLVPGAADPSADCCSALNSISRDCACSTMGIINSLPSRCNIGQVNCSA

SEQ ID NO: 61324 - DNA, 1042 bp, Triticum aestivum
  misc_feature (1)..(1042): Ceres Seq. ID no. 12784416
acgcctcaaagttaatatcgcggcatcgggtcctgcgctgcgcgcctgctgctgctccctcgccctcgcctccgctgccgtcgcgcgagatcaaccccgccgccatggctggagaagctgatgggaagacctaccaggtatcaaggatgccccctgctgctctcaacgagcgcatcctttcttccatgtctcaaaagcacgttgctgctcacccatggcatgacctggagataggtccaggggcccctgcagttttcaactgtgtggttgagattcctagaggcagcaaggttaagtatgagttggacaaagcaactggtcttatcaaggttgatcgtgttctgtactcctcagttgtgtacccacacaactatggcttcattccacgcacactctgtgaggataatgacccgatggatgtccttgtcctgatgcaggaacaagttgttcctggttgcttcctgcgtgcccgtgctattgggcttatgcctatgattgatcagggtgagaaagatgacaagatcatagctgtctgtgctgatgatcctgagtaccgtcacttcagagacatcagtgaacttcccccgcatcgcctacaggaaatccgtcgcttctttgaagactacaagaagaatgaaaacaaggaggttgcagtgaatgatttcctcccagcagaagatgccatcaacgcaatcaagtactcgatggacctctacggttcgtacatcatggagggcttaaggaagtgatctccagttggcggactgcggatgctacgcgatccgccctacggcttatcaatagtacgacaaacatctatgttaacatgatgatcgaaaaccatcagtctgttggggatctatatataccttctgtccatgctgagtcaagcatgggtacattttccttccgtatatgccatgtcaggtccaagtatttgacctcttgctggaaccttttttgtcaaaccgtctcttgacagagcggctgcttaataggaaatcagcgttacgcgaaggcgcgtatgcgtgcctccagtcct

SEQ ID NO: 61325 - protein, 248 aa, Triticum aestivum
  peptide (1)..(248): Ceres Seq. ID no. 12784417
  misc_feature (86)..(240): Pfam Name: Inorganic pyrophosphatase Pfam Description: Inorganic pyrophosphatase
  misc_feature (54)..(248): Homolog of NCBI NO: 5669924 NR Description: soluble inorganic pyrophosphatase
  misc_feature (35)..(248): Homolog of NCBI NO: 26451240 NR Description: putative inorganic pyrophosphatase [Arabidopsis
  misc_feature (45)..(248): Homolog of NCBI NO: 38345829 NR Description: OSJNBa0070M12.12 [Oryza sativa (japonica
  misc_feature (35)..(248): Homolog of NCBI NO: 2500047 NR Description: Soluble inorganic pyrophosphatase (Pyrophosphate
  misc_feature (35)..(248): Homolog of NCBI NO: 15226453 NR Description: putative inorganic pyrophosphatase; protein id:
  misc_feature (35)..(248): Homolog of NCBI NO: 4033421 NR Description: Soluble inorganic pyrophosphatase (Pyrophosphate
  misc_feature (38)..(248): Homolog of NCBI NO: 21593570 NR Description: inorganic pyrophosphatase-like protein
  misc_feature (42)..(248): Homolog of NCBI NO: 15223288 NR Description: soluble inorganic pyrophosphatase, putative
  misc_feature (38)..(248): Homolog of NCBI NO: 15231849 NR Description: inorganic pyrophosphatase -like protein
  misc_feature (35)..(248): Homolog of NCBI NO: 3885882 NR Description: inorganic pyrophosphatase [Oryza sativa]
ASKLISRHRVLRCAPAAAPSPSPPLPSREINPAAMAGEADGKTYQVSRMPPAALNERILSSMSQKHVAAHPWHDLEIGPGAPAVFNCVVEIPRGSKVKYELDKATGLIKVDRVLYSSVVYPHNYGFIPRTLCEDNDPMDVLVLMQEQVVPGCFLRARAIGLMPMIDQGEKDDKIIAVCADDPEYRHFRDISELPPHRLQEIRRFFEDYKKNENKEVAVNDFLPAEDAINAIKYSMDLYGSYIMEGLRK

SEQ ID NO: 61326 - protein, 214 aa, Triticum aestivum
  peptide (1)..(214): Ceres Seq. ID no. 12784418
  misc_feature (52)..(206): Pfam Name: Inorganic pyrophosphatase Pfam Description: Inorganic pyrophosphatase
  misc_feature (20)..(214): Homolog of NCBI NO: 5669924 NR Description: soluble inorganic pyrophosphatase
  misc_feature (1)..(214): Homolog of NCBI NO: 26451240 NR Description: putative inorganic pyrophosphatase [Arabidopsis
  misc_feature (11)..(214): Homolog of NCBI NO: 38345829 NR Description: OSJNBa0070M12.12 [Oryza sativa (japonica
  misc_feature (1)..(214): Homolog of NCBI NO: 2500047 NR Description: Soluble inorganic pyrophosphatase (Pyrophosphate
  misc_feature (1)..(214): Homolog of NCBI NO: 15226453 NR Description: putative inorganic pyrophosphatase; protein id:
  misc_feature (1)..(214): Homolog of NCBI NO: 4033421 NR Description: Soluble inorganic pyrophosphatase (Pyrophosphate
  misc_feature (4)..(214): Homolog of NCBI NO: 21593570 NR Description: inorganic pyrophosphatase-like protein
  misc_feature (8)..(214): Homolog of NCBI NO: 15223288 NR Description: soluble inorganic pyrophosphatase, putative
  misc_feature (4)..(214): Homolog of NCBI NO: 15231849 NR Description: inorganic pyrophosphatase -like protein
  misc_feature (1)..(214): Homolog of NCBI NO: 3885882 NR Description: inorganic pyrophosphatase [Oryza sativa]
MAGEADGKTYQVSRMPPAALNERILSSMSQKHVAAHPWHDLEIGPGAPAVFNCVVEIPRGSKVKYELDKATGLIKVDRVLYSSVVYPHNYGFIPRTLCEDNDPMDVLVLMQEQVVPGCFLRARAIGLMPMIDQGEKDDKIIAVCADDPEYRHFRDISELPPHRLQEIRRFFEDYKKNENKEVAVNDFLPAEDAINAIKYSMDLYGSYIMEGLRK

SEQ ID NO: 61327 - protein, 200 aa, Triticum aestivum
  peptide (1)..(200): Ceres Seq. ID no. 12784419
  misc_feature (38)..(192): Pfam Name: Inorganic pyrophosphatase Pfam Description: Inorganic pyrophosphatase
  misc_feature (6)..(200): Homolog of NCBI NO: 5669924 NR Description: soluble inorganic pyrophosphatase
  misc_feature (1)..(200): Homolog of NCBI NO: 26451240 NR Description: putative inorganic pyrophosphatase [Arabidopsis
  misc_feature (1)..(200): Homolog of NCBI NO: 38345829 NR Description: OSJNBa0070M12.12 [Oryza sativa (japonica
  misc_feature (1)..(200): Homolog of NCBI NO: 2500047 NR Description: Soluble inorganic pyrophosphatase (Pyrophosphate
  misc_feature (1)..(200): Homolog of NCBI NO: 15226453 NR Description: putative inorganic pyrophosphatase; protein id:
  misc_feature (1)..(200): Homolog of NCBI NO: 4033421 NR Description: Soluble inorganic pyrophosphatase (Pyrophosphate
  misc_feature (1)..(200): Homolog of NCBI NO: 21593570 NR Description: inorganic pyrophosphatase-like protein
  misc_feature (1)..(200): Homolog of NCBI NO: 15223288 NR Description: soluble inorganic pyrophosphatase, putative
  misc_feature (1)..(200): Homolog of NCBI NO: 15231849 NR Description: inorganic pyrophosphatase -like protein
  misc_feature (1)..(200): Homolog of NCBI NO: 3885882 NR Description: inorganic pyrophosphatase [Oryza sativa]
MPPAALNERILSSMSQKHVAAHPWHDLEIGPGAPAVFNCVVEIPRGSKVKYELDKATGLIKVDRVLYSSVVYPHNYGFIPRTLCEDNDPMDVLVLMQEQVVPGCFLRARAIGLMPMIDQGEKDDKIIAVCADDPEYRHFRDISELPPHRLQEIRRFFEDYKKNENKEVAVNDFLPAEDAINAIKYSMDLYGSYIMEGLRK

SEQ ID NO: 61328 - DNA, 924 bp, Triticum aestivum
  misc_feature (1)..(924): Ceres Seq. ID no. 13664294
atcatttgctagggttcgaatcagattatctgcaacaacaaaaaaaaatggcgttggctggtcgtatcagatccgggatctccttatccttcttcaagaccttctcctccgcgagatctcactcacgtggagcgccgcttatccccgcgttgagagattatgctacagcttcggctcaggaaactcggaatgttaaggtgcctgtggctttagttggtgaatctgggaactttgcctcgtggctgtatattgcagctgtgaaaatgaactccttggagaagattgagtctgatctctctgagctggttgaggctatgaagacaagtcctactttttcgcagtttactaaggatccctctgttcctagagagacgagactcgctgctattgtggatgtttgtgataaagccaagtttgcagaacccaccaagaacttcctctctttgttagctgagaatgggaagctgaagaatttagacgtgattgtgaagaaattcatgcagctgacaacagcacataggggagacgtcaaggttttggttaccacagtcatgccacttccccctgctgaggagaaggaactgaaggagacactccaagagataatcggagaagggaagaaagtaactgtggaacaaaagattgatccgagtatctatggagggctaatagtagagttccaacaaaaggtgttggacatgtctatcaggacaagggcacagcagatggagaggctcctccgtgaacctgttgacctcagcaacctttgaagacttcccctaaaagaaacgtgtttgtgatgctaccttcaattaacaaataaatatgagaaacaacatgacacttgtgtcgtttttttgaaaatttatcatttcatttaacagttgttgttttgattcgaaataagcttttttgaagccatcg

SEQ ID NO: 61329 - protein, 255 aa, Triticum aestivum
  peptide (1)..(255): Ceres Seq. ID no. 15220742
  misc_feature (75)..(246): Pfam Name: ATP synthase delta (OSCP) subunit Pfam Description: ATP synthase delta (OSCP) subunit
  misc_feature (50)..(248): Homolog of NCBI NO: 27806307 NR Description: ATP synthase, H+ transporting, mitochondrial F1
  misc_feature (64)..(248): Homolog of NCBI NO: 913531 NR Description: H+-ATPase subunit, OSCP=oligomysin sensitivity
  misc_feature (50)..(250): Homolog of NCBI NO: 4502303 NR Description: ATP synthase, H+ transporting, mitochondrial F1
  misc_feature (16)..(252): Homolog of NCBI NO: 23507248 NR Description: oligomycin sensitivity conferring protein [Silene
  misc_feature (16)..(252): Homolog of NCBI NO: 23507246 NR Description: oligomycin sensitivity conferring protein [Silene
  misc_feature (16)..(251): Homolog of NCBI NO: 4774163 NR Description: F1-ATP synthase delta subunit [Ipomoea batatas]
  misc_feature (16)..(251): Homolog of NCBI NO: 114682 NR Description: ATP synthase delta chain, mitochondrial precursor
  misc_feature (18)..(255): Homolog of NCBI NO: 1655482 NR Description: delta subunit of mitochondrial F1-ATPase
  misc_feature (18)..(255): Homolog of NCBI NO: 15240628 NR Description: delta subunit of mitochondrial F1-ATPase
  misc_feature (18)..(255): Homolog of NCBI NO: 14190495 NR Description: AT5g13450/T22N19_100 [Arabidopsis thaliana]
HLLGFESDYLQQQKKMALAGRIRSGISLSFFKTFSSARSHSRGAPLIPALRDYATASAQETRNVKVPVALVGESGNFASWLYIAAVKMNSLEKIESDLSELVEAMKTSPTFSQFTKDPSVPRETRLAAIVDVCDKAKFAEPTKNFLSLLAENGKLKNLDVIVKKFMQLTTAHRGDVKVLVTTVMPLPPAEEKELKETLQEIIGEGKKVTVEQKIDPSIYGGLIVEFQQKVLDMSIRTRAQQMERLLREPVDLSNL

SEQ ID NO: 61330 - protein, 240 aa, Triticum aestivum
  peptide (1)..(240): Ceres Seq. ID no. 15220743
  misc_feature (60)..(231): Pfam Name: ATP synthase delta (OSCP) subunit Pfam Description: ATP synthase delta (OSCP) subunit
  misc_feature (35)..(233): Homolog of NCBI NO: 27806307 NR Description: ATP synthase, H+ transporting, mitochondrial F1
  misc_feature (49)..(233): Homolog of NCBI NO: 913531 NR Description: H+-ATPase subunit, OSCP=oligomysin sensitivity
  misc_feature (35)..(235): Homolog of NCBI NO: 4502303 NR Description: ATP synthase, H+ transporting, mitochondrial F1
  misc_feature (1)..(237): Homolog of NCBI NO: 23507248 NR Description: oligomycin sensitivity conferring protein [Silene
  misc_feature (1)..(237): Homolog of NCBI NO: 23507246 NR Description: oligomycin sensitivity conferring protein [Silene
  misc_feature (1)..(236): Homolog of NCBI NO: 4774163 NR Description: F1-ATP synthase delta subunit [Ipomoea batatas]
  misc_feature (1)..(236): Homolog of NCBI NO: 114682 NR Description: ATP synthase delta chain, mitochondrial precursor
  misc_feature (3)..(240): Homolog of NCBI NO: 1655482 NR Description: delta subunit of mitochondrial F1-ATPase
  misc_feature (3)..(240): Homolog of NCBI NO: 15240628 NR Description: delta subunit of mitochondrial F1-ATPase
  misc_feature (3)..(240): Homolog of NCBI NO: 14190495 NR Description: AT5g13450/T22N19_100 [Arabidopsis thaliana]
MALAGRIRSGISLSFFKTFSSARSHSRGAPLIPALRDYATASAQETRNVKVPVALVGESGNFASWLYIAAVKMNSLEKIESDLSELVEAMKTSPTFSQFTKDPSVPRETRLAAIVDVCDKAKFAEPTKNFLSLLAENGKLKNLDVIVKKFMQLTTAHRGDVKVLVTTVMPLPPAEEKELKETLQEIIGEGKKVTVEQKIDPSIYGGLIVEFQQKVLDMSIRTRAQQMERLLREPVDLSNL

SEQ ID NO: 61331 - protein, 168 aa, Triticum aestivum
  peptide (1)..(168): Ceres Seq. ID no. 15220744
  misc_feature (1)..(159): Pfam Name: ATP synthase delta (OSCP) subunit Pfam Description: ATP synthase delta (OSCP) subunit
  misc_feature (1)..(161): Homolog of NCBI NO: 27806307 NR Description: ATP synthase, H+ transporting, mitochondrial F1
  misc_feature (1)..(161): Homolog of NCBI NO: 913531 NR Description: H+-ATPase subunit, OSCP=oligomysin sensitivity
  misc_feature (1)..(163): Homolog of NCBI NO: 4502303 NR Description: ATP synthase, H+ transporting, mitochondrial F1
  misc_feature (1)..(165): Homolog of NCBI NO: 23507248 NR Description: oligomycin sensitivity conferring protein [Silene
  misc_feature (1)..(165): Homolog of NCBI NO: 23507246 NR Description: oligomycin sensitivity conferring protein [Silene
  misc_feature (1)..(164): Homolog of NCBI NO: 4774163 NR Description: F1-ATP synthase delta subunit [Ipomoea batatas]
  misc_feature (1)..(164): Homolog of NCBI NO: 114682 NR Description: ATP synthase delta chain, mitochondrial precursor
  misc_feature (1)..(168): Homolog of NCBI NO: 1655482 NR Description: delta subunit of mitochondrial F1-ATPase
  misc_feature (1)..(168): Homolog of NCBI NO: 15240628 NR Description: delta subunit of mitochondrial F1-ATPase
  misc_feature (1)..(168): Homolog of NCBI NO: 14190495 NR Description: AT5g13450/T22N19_100 [Arabidopsis thaliana]
MNSLEKIESDLSELVEAMKTSPTFSQFTKDPSVPRETRLAAIVDVCDKAKFAEPTKNFLSLLAENGKLKNLDVIVKKFMQLTTAHRGDVKVLVTTVMPLPPAEEKELKETLQEIIGEGKKVTVEQKIDPSIYGGLIVEFQQKVLDMSIRTRAQQMERLLREPVDLSNL

SEQ ID NO: 61332 - DNA, 656 bp, Triticum aestivum
  misc_feature (1)..(656): Ceres Seq. ID no. 14302392
caaatctcccagtcccttcctcgctcttctctctagctattggatcggtgactctgcttctgttagtttcagctttgagtcgctgctacaatgtcttgcattaagagagttgatagatccgcgtacgttgccatggcaccagaagctccgttcatggctgccggaacgatggccggagccgttgatctgtctttcagctcatcctccaacctcgagatctttgaactcgattttaactccgaagaccacgagatcaaactattaggtcagtgctcaagctcagagaggtttactcgactcgcttggggaagttatggacccgggtccgaggaatctccttatggtctcatcgctggtggcctcgtcgacgggaatatcggtttatggaatccaatcactctgattcggtgagttttctctttctctataaccctaattgttagggtttatatatgaaaaagtgtttccgtaatggacaagtaaagtatttgattttctttttgtttatttcagttctgagtgtaatgaaagtgcgcacgttagacatctttcaaaacataaagggccagtgagttgtaatctctttaacagaatctaatgttgggctaggttcttttcgatgcttacatatatatatatatattctcttgtatgtt

SEQ ID NO: 61333 - protein, 106 aa, Triticum aestivum
  peptide (1)..(106): Ceres Seq. ID no. 14302393
  misc_feature (4)..(105): Homolog of NCBI NO: 7705258 NR Description: yeast Sec31p homolog [Homo sapiens]
  misc_feature (4)..(100): Homolog of NCBI NO: 38085179 NR Description: similar to secretory pathway component Sec31B-1
  misc_feature (4)..(105): Homolog of NCBI NO: 28839044 NR Description: Similar to yeast Sec31p homolog [Homo sapiens]
  misc_feature (4)..(100): Homolog of NCBI NO: 38149910 NR Description: S. cerevisiae SEC31-like 2 isoform b
  misc_feature (4)..(100): Homolog of NCBI NO: 27882028 NR Description: SEC31B-1 protein [Homo sapiens]
  misc_feature (1)..(105): Homolog of NCBI NO: 30695806 NR Description: conserved hypothetical protein [Arabidopsis
  misc_feature (1)..(105): Homolog of NCBI NO: 30695804 NR Description: conserved hypothetical protein [Arabidopsis
  misc_feature (1)..(105): Homolog of NCBI NO: 11357943 NR Description: hypothetical protein MAA21.90 - Arabidopsis
  misc_feature (1)..(103): Homolog of NCBI NO: 15221878 NR Description: transducin / WD-40 repeat protein family
  misc_feature (1)..(103): Homolog of NCBI NO: 25518075 NR Description: F6A14.8 protein - Arabidopsis thaliana
MSCIKRVDRSAYVAMAPEAPFMAAGTMAGAVDLSFSSSSNLEIFELDFNSEDHEIKLLGQCSSSERFTRLAWGSYGPGSEESPYGLIAGGLVDGNIGLWNPITLIR

SEQ ID NO: 61334 - protein, 92 aa, Triticum aestivum
  peptide (1)..(92): Ceres Seq. ID no. 14302394
  misc_feature (1)..(91): Homolog of NCBI NO: 7705258 NR Description: yeast Sec31p homolog [Homo sapiens]
  misc_feature (1)..(86): Homolog of NCBI NO: 38085179 NR Description: similar to secretory pathway component Sec31B-1
  misc_feature (1)..(91): Homolog of NCBI NO: 28839044 NR Description: Similar to yeast Sec31p homolog [Homo sapiens]
  misc_feature (1)..(86): Homolog of NCBI NO: 38149910 NR Description: S. cerevisiae SEC31-like 2 isoform b
  misc_feature (1)..(86): Homolog of NCBI NO: 27882028 NR Description: SEC31B-1 protein [Homo sapiens]
  misc_feature (1)..(91): Homolog of NCBI NO: 30695806 NR Description: conserved hypothetical protein [Arabidopsis
  misc_feature (1)..(91): Homolog of NCBI NO: 30695804 NR Description: conserved hypothetical protein [Arabidopsis
  misc_feature (1)..(91): Homolog of NCBI NO: 11357943 NR Description: hypothetical protein MAA21.90 - Arabidopsis
  misc_feature (1)..(89): Homolog of NCBI NO: 15221878 NR Description: transducin / WD-40 repeat protein family
  misc_feature (1)..(89): Homolog of NCBI NO: 25518075 NR Description: F6A14.8 protein - Arabidopsis thaliana
MAPEAPFMAAGTMAGAVDLSFSSSSNLEIFELDFNSEDHEIKLLGQCSSSERFTRLAWGSYGPGSEESPYGLIAGGLVDGNIGLWNPITLIR

SEQ ID NO: 61335 - protein, 87 aa, Triticum aestivum
  peptide (1)..(87): Ceres Seq. ID no. 14302395
KSPSPFLALLSSYWIGDSASVSFSFESLLQCLALRELIDPRTLPWHQKLRSWLPERWPEPLICLSAHPPTSRSLNSILTPKTTRSNY

SEQ ID NO: 61336 - DNA, 1065 bp, Triticum aestivum
  misc_feature (1)..(1065): Ceres Seq. ID no. 15226909
gagaaacttcgacgtaattattgcaatttagcccttaaattctgcattgctatcagataaagcatcatattttcctttgtacagaattatccttccattttattatctgagctaagaatgggaagcagcgaggagatgccagtggtgctcatcacgggatgctcacaaggaggaatcggcaacgcgctggctcgtgagttctctgcgaaaggttgtcgtgtggtggcgacgagtcgatcgcagagcacgatggctgacttggagaaagatcccaagtttttcgtacaaaagctcgatgttcagtcagaacataacgtgaataaagtcttgtcggaagttatcgataagttcggtcagatcgatgttctggtcaataatgccggagttcaatgcatcggaccactcgcggagattccaattcaggccatggagcacaccttcaacaccaatgtgttcggttccatgaggatgactcaagctgttgtacctcacatggcgtcaaagaagaaaggaaagattgtgaacataggaagtatcagcacaatggcacctggaccatgggcaggggtttacactgcatcaaaagctgctcttcatgctcttacagacacattaaggttggagcttaggccatttgggattgatatgatcaacattgtcccaggaggtattcaatctaacatatccgattcagggatatctagcttcaacaagttacctgagctgaaactatacaagccgttccaagaagctatccgtgaaagggcgtttttgtcgcaaaacgttaagccaatacctgcagagacgtttgcgaaggaggtggtgtcggtggtcctgaaggaacacccaccggcttggtactctacaggaaggttatccactgtcgcggcgatcatgcaccatttgcccatatccgtcaaagattttctcctgactaagagcttcatgaaaagaaactgtttgaatgtatctaagaagtaagaactaaccatgaaacaagctagatacagaagccacatagtaatgggctcttaagcccaacacggtccagaataagttcccagt

SEQ ID NO: 61337 - protein, 287 aa, Triticum aestivum
  peptide (1)..(287): Ceres Seq. ID no. 15226910
  misc_feature (7)..(276): Homolog of NCBI NO: 28868436 NR Description: oxidoreductase, short chain
  misc_feature (7)..(282): Homolog of NCBI NO: 23058177 NR Description: COG1028: Dehydrogenases with different
  misc_feature (45)..(278): Homolog of NCBI NO: 38567881 NR Description: OSJNBa0036B21.7 [Oryza sativa (japonica
  misc_feature (45)..(279): Homolog of NCBI NO: 26450169 NR Description: unknown protein [Arabidopsis thaliana]
  misc_feature (1)..(115): Homolog of NCBI NO: 11358313 NR Description: hypothetical protein T31P16.40 - Arabidopsis
  misc_feature (107)..(279): Homolog of NCBI NO: 11358313 NR Description: hypothetical protein T31P16.40 - Arabidopsis
  misc_feature (1)..(279): Homolog of NCBI NO: 26453106 NR Description: unknown protein [Arabidopsis thaliana]
  misc_feature (1)..(279): Homolog of NCBI NO: 30682984 NR Description: short-chain dehydrogenase/reductase family
  misc_feature (1)..(287): Homolog of NCBI NO: 10178182 NR Description: contains similarity to
  misc_feature (1)..(279): Homolog of NCBI NO: 18424923 NR Description: short-chain dehydrogenase/reductase family
MGSSEEMPVVLITGCSQGGIGNALAREFSAKGCRVVATSRSQSTMADLEKDPKFFVQKLDVQSEHNVNKVLSEVIDKFGQIDVLVNNAGVQCIGPLAEIPIQAMEHTFNTNVFGSMRMTQAVVPHMASKKKGKIVNIGSISTMAPGPWAGVYTASKAALHALTDTLRLELRPFGIDMINIVPGGIQSNISDSGISSFNKLPELKLYKPFQEAIRERAFLSQNVKPIPAETFAKEVVSVVLKEHPPAWYSTGRLSTVAAIMHHLPISVKDFLLTKSFMKRNCLNVSKK

SEQ ID NO: 61338 - protein, 281 aa, Triticum aestivum
  peptide (1)..(281): Ceres Seq. ID no. 15226911
  misc_feature (1)..(270): Homolog of NCBI NO: 28868436 NR Description: oxidoreductase, short chain
  misc_feature (1)..(276): Homolog of NCBI NO: 23058177 NR Description: COG1028: Dehydrogenases with different
  misc_feature (39)..(272): Homolog of NCBI NO: 38567881 NR Description: OSJNBa0036B21.7 [Oryza sativa (japonica
  misc_feature (39)..(273): Homolog of NCBI NO: 26450169 NR Description: unknown protein [Arabidopsis thaliana]
  misc_feature (1)..(109): Homolog of NCBI NO: 11358313 NR Description: hypothetical protein T31P16.40 - Arabidopsis
  misc_feature (101)..(273): Homolog of NCBI NO: 11358313 NR Description: hypothetical protein T31P16.40 - Arabidopsis
  misc_feature (1)..(273): Homolog of NCBI NO: 26453106 NR Description: unknown protein [Arabidopsis thaliana]
  misc_feature (1)..(273): Homolog of NCBI NO: 30682984 NR Description: short-chain dehydrogenase/reductase family
  misc_feature (1)..(281): Homolog of NCBI NO: 10178182 NR Description: contains similarity to
  misc_feature (1)..(273): Homolog of NCBI NO: 18424923 NR Description: short-chain dehydrogenase/reductase family
MPVVLITGCSQGGIGNALAREFSAKGCRVVATSRSQSTMADLEKDPKFFVQKLDVQSEHNVNKVLSEVIDKFGQIDVLVNNAGVQCIGPLAEIPIQAMEHTFNTNVFGSMRMTQAVVPHMASKKKGKIVNIGSISTMAPGPWAGVYTASKAALHALTDTLRLELRPFGIDMINIVPGGIQSNISDSGISSFNKLPELKLYKPFQEAIRERAFLSQNVKPIPAETFAKEVVSVVLKEHPPAWYSTGRLSTVAAIMHHLPISVKDFLLTKSFMKRNCLNVSKK

SEQ ID NO: 61339 - protein, 243 aa, Triticum aestivum
  peptide (1)..(243): Ceres Seq. ID no. 15226912
  misc_feature (1)..(232): Homolog of NCBI NO: 28868436 NR Description: oxidoreductase, short chain
  misc_feature (1)..(238): Homolog of NCBI NO: 23058177 NR Description: COG1028: Dehydrogenases with different
  misc_feature (1)..(234): Homolog of NCBI NO: 38567881 NR Description: OSJNBa0036B21.7 [Oryza sativa (japonica
  misc_feature (1)..(235): Homolog of NCBI NO: 26450169 NR Description: unknown protein [Arabidopsis thaliana]
  misc_feature (1)..(71): Homolog of NCBI NO: 11358313 NR Description: hypothetical protein T31P16.40 - Arabidopsis
  misc_feature (63)..(235): Homolog of NCBI NO: 11358313 NR Description: hypothetical protein T31P16.40 - Arabidopsis
  misc_feature (1)..(235): Homolog of NCBI NO: 26453106 NR Description: unknown protein [Arabidopsis thaliana]
  misc_feature (1)..(235): Homolog of NCBI NO: 30682984 NR Description: short-chain dehydrogenase/reductase family
  misc_feature (1)..(243): Homolog of NCBI NO: 10178182 NR Description: contains similarity to
  misc_feature (1)..(235): Homolog of NCBI NO: 18424923 NR Description: short-chain dehydrogenase/reductase family
MADLEKDPKFFVQKLDVQSEHNVNKVLSEVIDKFGQIDVLVNNAGVQCIGPLAEIPIQAMEHTFNTNVFGSMRMTQAVVPHMASKKKGKIVNIGSISTMAPGPWAGVYTASKAALHALTDTLRLELRPFGIDMINIVPGGIQSNISDSGISSFNKLPELKLYKPFQEAIRERAFLSQNVKPIPAETFAKEVVSVVLKEHPPAWYSTGRLSTVAAIMHHLPISVKDFLLTKSFMKRNCLNVSKK

SEQ ID NO: 61340 - DNA, 904 bp, Triticum aestivum
  misc_feature (1)..(904): Ceres Seq. ID no. 13661265
atcaaaccaaaagtcgctcttctattctcctctcttcaaccacaatacagagaaaaacttcaagatcagaaatggctttccacctgagatcgataagtttgccatcaaggcctcaggccaaccagactgaagtcgagcaagaggtgctgagcctagaggcgagcatctcttcctccaccaccaccatcggcaccatgtgtgccggtctgaggaggctcggagacatctacaatggtgttgaagagattattggcctgccaagcaaccaggctggcaagatgttggattcagagatggaagtctctctcgagctgctagatctctgcagcaccatgcaagagatcttcgtcaagatgaaggccatcatccaagagctacaagtggctctaagaaaaggagatgatgtaactgctcaagccaagatccagtcttatgcccgtttggtgaagacggccaagaaacatttcaagaagagcgcgaagaaggctaatgctgtgtctgcgggttgcaagatggtcatgctattgaccaaggctagagagatttctgtgtctctgctggagtccacagtccatctcctgtcaaaggaaatcggaatgccaaaacagtctcttgtctcaaaggcatttcacaagaagaaggcagttgtctgccaggaggagcaattgcaggagttagagtgtagtattggagatctcgagaatggggtgggacatctgttcaggaaattagtccagatcagagtttctctcttgaacattcttagctcatagatgctccaagtcactctacaccctgtgattggcatccgcctttttgaggactagccggtcttcatacaattttgccatatgtatacagtacaaatgtacagaaacttagagaaagaaaaagtgaagttttg

SEQ ID NO: 61341 - protein, 256 aa, Triticum aestivum
  peptide (1)..(256): Ceres Seq. ID no. 13661266
  misc_feature (92)..(157): Pfam Name: Arabidopsis protein of unknown function Pfam Description: Arabidopsis protein of unknown function
  misc_feature (24)..(220): Homolog of NCBI NO: 15236290 NR Description: hypothetical protein [Arabidopsis thaliana]
  misc_feature (24)..(220): Homolog of NCBI NO: 15236926 NR Description: hypothetical protein [Arabidopsis thaliana]
  misc_feature (24)..(221): Homolog of NCBI NO: 15227363 NR Description: hypothetical protein [Arabidopsis thaliana]
  misc_feature (205)..(254): Homolog of NCBI NO: 15227365 NR Description: hypothetical protein [Arabidopsis thaliana]
  misc_feature (24)..(221): Homolog of NCBI NO: 15227365 NR Description: hypothetical protein [Arabidopsis thaliana]
QTKSRSSILLSSTTIQRKTSRSEMAFHLRSISLPSRPQANQTEVEQEVLSLEASISSSTTTIGTMCAGLRRLGDIYNGVEEIIGLPSNQAGKMLDSEMEVSLELLDLCSTMQEIFVKMKAIIQELQVALRKGDDVTAQAKIQSYARLVKTAKKHFKKSAKKANAVSAGCKMVMLLTKAREISVSLLESTVHLLSKEIGMPKQSLVSKAFHKKKAVVCQEEQLQELECSIGDLENGVGHLFRKLVQIRVSLLNILSS

SEQ ID NO: 61342 - protein, 233 aa, Triticum aestivum
  peptide (1)..(233): Ceres Seq. ID no. 13661267
  misc_feature (69)..(134): Pfam Name: Arabidopsis protein of unknown function Pfam Description: Arabidopsis protein of unknown function
  misc_feature (1)..(197): Homolog of NCBI NO: 15236290 NR Description: hypothetical protein [Arabidopsis thaliana]
  misc_feature (1)..(197): Homolog of NCBI NO: 15236926 NR Description: hypothetical protein [Arabidopsis thaliana]
  misc_feature (1)..(198): Homolog of NCBI NO: 15227363 NR Description: hypothetical protein [Arabidopsis thaliana]
  misc_feature (182)..(231): Homolog of NCBI NO: 15227365 NR Description: hypothetical protein [Arabidopsis thaliana]
  misc_feature (1)..(198): Homolog of NCBI NO: 15227365 NR Description: hypothetical protein [Arabidopsis thaliana]
MAFHLRSISLPSRPQANQTEVEQEVLSLEASISSSTTTIGTMCAGLRRLGDIYNGVEEIIGLPSNQAGKMLDSEMEVSLELLDLCSTMQEIFVKMKAIIQELQVALRKGDDVTAQAKIQSYARLVKTAKKHFKKSAKKANAVSAGCKMVMLLTKAREISVSLLESTVHLLSKEIGMPKQSLVSKAFHKKKAVVCQEEQLQELECSIGDLENGVGHLFRKLVQIRVSLLNILSS

SEQ ID NO: 61343 - protein, 192 aa, Triticum aestivum
  peptide (1)..(192): Ceres Seq. ID no. 13661268
  misc_feature (28)..(93): Pfam Name: Arabidopsis protein of unknown function Pfam Description: Arabidopsis protein of unknown function
  misc_feature (1)..(156): Homolog of NCBI NO: 15236290 NR Description: hypothetical protein [Arabidopsis thaliana]
  misc_feature (1)..(156): Homolog of NCBI NO: 15236926 NR Description: hypothetical protein [Arabidopsis thaliana]
  misc_feature (1)..(157): Homolog of NCBI NO: 15227363 NR Description: hypothetical protein [Arabidopsis thaliana]
  misc_feature (141)..(190): Homolog of NCBI NO: 15227365 NR Description: hypothetical protein [Arabidopsis thaliana]
  misc_feature (1)..(157): Homolog of NCBI NO: 15227365 NR Description: hypothetical protein [Arabidopsis thaliana]
MCAGLRRLGDIYNGVEEIIGLPSNQAGKMLDSEMEVSLELLDLCSTMQEIFVKMKAIIQELQVALRKGDDVTAQAKIQSYARLVKTAKKHFKKSAKKANAVSAGCKMVMLLTKAREISVSLLESTVHLLSKEIGMPKQSLVSKAFHKKKAVVCQEEQLQELECSIGDLENGVGHLFRKLVQIRVSLLNILSS

SEQ ID NO: 61344 - DNA, 823 bp, Triticum aestivum
  misc_feature (1)..(823): Ceres Seq. ID no. 13664333
agacggtgccagagtccacgctccggaagaaaaaggcaccacctttgttcgcccttctcctctccctcgtgacaccactcccagagaaagagagagacagatggcgatgcgggcggtggcggtgctgctgcttctggcggtggcgagcgtgctggcggcgggcgcggcggcgcagtcgacgggcacgccggcgtgcgcgtccaagctgacgggctgcgccggctacatgaacggcacggacgcgcagaagccgccggagacctgctgcggcccgctccgggacgccgtgaagaacgagaagccctgcctctgcgcgctttacgcctcgcccgagatcttcaaggccttcaacatcaacgtcaccgacgcgctccgcctctccaagcgctgcggcgtctccgaggacgtcagcagctgccccagcacctctctgacgaagtctcctccaggttcgagttcttctccatcaggtggcgctccatcaggtggcaagagcgccgggcaccctaccatgtcggccagcttcgcggggctgatgagcctcttcctggtcctgtggtctgcactggcataagaaatcggcgattcggcatgctagacatgttcttctttcggcttatatcccatggtagatgagctgcagctctggtggtagttcttggtggtgtcgccgcgtttgtttttgctgtgtattggttggtgttgccagttcagtagacttgctgtgaataaggatttcggcactctcttcagacctgtgatgaccagagcagagtgggcattgtgtgagacgtatttcggcttcactattttcttttctttt

SEQ ID NO: 61345 - protein, 190 aa, Triticum aestivum
  peptide (1)..(190): Ceres Seq. ID no. 13664334
  misc_feature (65)..(139): Pfam Name: Protease inhibitor/seed storage/LTP family Pfam Description: Protease inhibitor/seed storage/LTP family
  misc_feature (34)..(177): Homolog of NCBI NO: 25553588 NR Description: OJ1656_E11.14 [Oryza sativa (japonica
  misc_feature (65)..(142): Homolog of NCBI NO: 15223104 NR Description: protease inhibitor/seed storage/lipid transfer
  misc_feature (41)..(139): Homolog of NCBI NO: 6630451 NR Description: F23N19.16 [Arabidopsis thaliana]
  misc_feature (38)..(177): Homolog of NCBI NO: 25553595 NR Description: OJ1656_E11.26 [Oryza sativa (japonica
  misc_feature (52)..(178): Homolog of NCBI NO: 15221052 NR Description: lipid transfer protein family [Arabidopsis
  misc_feature (41)..(182): Homolog of NCBI NO: 30696757 NR Description: protease inhibitor/seed storage/lipid transfer
  misc_feature (39)..(139): Homolog of NCBI NO: 25406276 NR Description: probable lipid transfer protein F6D5.5
  misc_feature (41)..(182): Homolog of NCBI NO: 15221585 NR Description: protease inhibitor/seed storage/lipid transfer
  misc_feature (36)..(179): Homolog of NCBI NO: 21593596 NR Description: lipid transfer protein, putative [Arabidopsis
  misc_feature (39)..(179): Homolog of NCBI NO: 18410388 NR Description: lipid transfer protein family [Arabidopsis
DGARVHAPEEKGTTFVRPSPLPRDTTPRERERQMAMRAVAVLLLLAVASVLAAGAAAQSTGTPACASKLTGCAGYMNGTDAQKPPETCCGPLRDAVKNEKPCLCALYASPEIFKAFNINVTDALRLSKRCGVSEDVSSCPSTSLTKSPPGSSSSPSGGAPSGGKSAGHPTMSASFAGLMSLFLVLWSALA

SEQ ID NO: 61346 - protein, 157 aa, Triticum aestivum
  peptide (1)..(157): Ceres Seq. ID no. 13664335
  misc_feature (32)..(106): Pfam Name: Protease inhibitor/seed storage/LTP family Pfam Description: Protease inhibitor/seed storage/LTP family
  misc_feature (1)..(144): Homolog of NCBI NO: 25553588 NR Description: OJ1656_E11.14 [Oryza sativa (japonica
  misc_feature (32)..(109): Homolog of NCBI NO: 15223104 NR Description: protease inhibitor/seed storage/lipid transfer
  misc_feature (8)..(106): Homolog of NCBI NO: 6630451 NR Description: F23N19.16 [Arabidopsis thaliana]
  misc_feature (5)..(144): Homolog of NCBI NO: 25553595 NR Description: OJ1656_E11.26 [Oryza sativa (japonica
  misc_feature (19)..(145): Homolog of NCBI NO: 15221052 NR Description: lipid transfer protein family [Arabidopsis
  misc_feature (8)..(149): Homolog of NCBI NO: 30696757 NR Description: protease inhibitor/seed storage/lipid transfer
  misc_feature (6)..(106): Homolog of NCBI NO: 25406276 NR Description: probable lipid transfer protein F6D5.5
  misc_feature (8)..(149): Homolog of NCBI NO: 15221585 NR Description: protease inhibitor/seed storage/lipid transfer
  misc_feature (3)..(146): Homolog of NCBI NO: 21593596 NR Description: lipid transfer protein, putative [Arabidopsis
  misc_feature (6)..(146): Homolog of NCBI NO: 18410388 NR Description: lipid transfer protein family [Arabidopsis
MAMRAVAVLLLLAVASVLAAGAAAQSTGTPACASKLTGCAGYMNGTDAQKPPETCCGPLRDAVKNEKPCLCALYASPEIFKAFNINVTDALRLSKRCGVSEDVSSCPSTSLTKSPPGSSSSPSGGAPSGGKSAGHPTMSASFAGLMSLFLVLWSALA

SEQ ID NO: 61347 - protein, 155 aa, Triticum aestivum
  peptide (1)..(155): Ceres Seq. ID no. 13664336
  misc_feature (30)..(104): Pfam Name: Protease inhibitor/seed storage/LTP family Pfam Description: Protease inhibitor/seed storage/LTP family
  misc_feature (1)..(142): Homolog of NCBI NO: 25553588 NR Description: OJ1656_E11.14 [Oryza sativa (japonica
  misc_feature (30)..(107): Homolog of NCBI NO: 15223104 NR Description: protease inhibitor/seed storage/lipid transfer
  misc_feature (6)..(104): Homolog of NCBI NO: 6630451 NR Description: F23N19.16 [Arabidopsis thaliana]
  misc_feature (3)..(142): Homolog of NCBI NO: 25553595 NR Description: OJ1656_E11.26 [Oryza sativa (japonica
  misc_feature (17)..(143): Homolog of NCBI NO: 15221052 NR Description: lipid transfer protein family [Arabidopsis
  misc_feature (6)..(147): Homolog of NCBI NO: 30696757 NR Description: protease inhibitor/seed storage/lipid transfer
  misc_feature (4)..(104): Homolog of NCBI NO: 25406276 NR Description: probable lipid transfer protein F6D5.5
  misc_feature (6)..(147): Homolog of NCBI NO: 15221585 NR Description: protease inhibitor/seed storage/lipid transfer
  misc_feature (1)..(144): Homolog of NCBI NO: 21593596 NR Description: lipid transfer protein, putative [Arabidopsis
  misc_feature (4)..(144): Homolog of NCBI NO: 18410388 NR Description: lipid transfer protein family [Arabidopsis
MRAVAVLLLLAVASVLAAGAAAQSTGTPACASKLTGCAGYMNGTDAQKPPETCCGPLRDAVKNEKPCLCALYASPEIFKAFNINVTDALRLSKRCGVSEDVSSCPSTSLTKSPPGSSSSPSGGAPSGGKSAGHPTMSASFAGLMSLFLVLWSALA

SEQ ID NO: 61348 - DNA, 1596 bp, Triticum aestivum
  misc_feature (1)..(1596): Ceres Seq. ID no. 15176851
gcatccttagcctttttctcttcttgcaactatggccacacattcagctcttgccgtctccagaatccccgtcaaaccgaggctgcagtctaagagtgccattcactctttcccagctcaatgttcctccaagaggctagaagtggctgcattctccggcctgcgagtcagcagtaacggtggggaagcatctttctttgatgccatagctgctcaaatcacccccaaggctgtggggacatcctctcctgttagaggagagacagtggcaaaactgaaggtggccatcaatgggtttggaaggattggtaggaacttcctcaggtgttggcacggtcgcaaggactctcctctcgaagttgttgtgcttaatgacagtggtggtgtcaagaacgcatcccacttgctcaagtatgactccatgcttggaaccttcaaggccgatgtgaagatagtcgacaatgaaactatcagcgttgatggcaagttcatcaaagtcgtctcaaacagagatcctcttaagcttccatgggctgagctcggcattgacattgtcatcgagggaacaggagtgtttgttgatgggccaggagcagggaagcacatccaagctggagcctcaaaagtgatcatcacagcaccagctaaaggcgctgatatcccaacctatgttgtgggagtcaatgagcaagactattctcatgacgttgctaacattattagcaatgcatcttgcaccaccaactgtttggctccctttgcgaaagttttggatgaagagtttggaatcgtcaaggggactatgacaacgacacactcttacaccggagaccaaaggctcctagatgcatcacacagggacctaaggcgtgcaagagccgcagcactgaacattgtaccgactagcacaggtgcagcaaaggcggtgtcgttggtgctcccccagctgaagggtaaactcaacggcattgcactccgtgtgccgaccccaaacgtctctgtggttgaccttgttataaacgttgagaagaaaggtttgactgctgaagacgttaacgaggccttcagaaaagcggccgctggaccgctcaagggcgttttagaggtttgcgacacgccacttgtctcttgtgacttcaggtgctctgatgtctcaaccaccattgactcttccctcacaatggtcatgggtgatgatatggtcaaggtggtcgcctggtacgacaacgagtggggttacagccaaagagtagtggatttggctcacctagtggctgccaagtggccgggagaagtagctgctggaagcggagaccctttggaagatttctgtaagacaaacccagccgatgaggaatgcaaagtctatgaagcttgattctaatctttttctctaaactgtttccgagcaatttggtttatcttctagtgacaatttatcgaaatcatataaaccctgcctcttaaactctatcatatatttcgttttctttctttttactattatatcaaaaggcaatgtatgtaatacccattccttttcattgcctcatgtgcgatctcgaggatactataatttcaatgatatgtgcgaac

SEQ ID NO: 61349 - protein, 448 aa, Triticum aestivum
  peptide (1)..(448): Ceres Seq. ID no. 15176852
  misc_feature (236)..(397): Pfam Name: Glyceraldehyde 3-phosphate dehydrogenase, Pfam Description: Glyceraldehyde 3-phosphate dehydrogenase,
  misc_feature (81)..(420): Homolog of NCBI NO: 82166 NR Description: glyceraldehyde-3-phosphate dehydrogenase (NADP)
  misc_feature (1)..(431): Homolog of NCBI NO: 18076102 NR Description: glyceraldehyde-3-phosphate dehydrogenase
  misc_feature (31)..(420): Homolog of NCBI NO: 120665 NR Description: Glyceraldehyde 3-phosphate dehydrogenase B, precursor (NADP-dependent glyceraldehydephosphate dehydrogenase
  misc_feature (1)..(447): Homolog of NCBI NO: 6063542 NR Description: EST C74302(E30840) corresponds to a region of the gene.~similar to glyceraldehyde-3-phosphate dehydrogenase.
  misc_feature (1)..(447): Homolog of NCBI NO: 120664 NR Description: Glyceraldehyde 3-phosphate dehydrogenase B, precursor (NADP-dependent glyceraldehydephosphate dehydrogenase
  misc_feature (5)..(447): Homolog of NCBI NO: 20733 NR Description: unnamed protein product [Pisum sativum]
  misc_feature (1)..(447): Homolog of NCBI NO: 66028 NR Description: glyceraldehyde-3-phosphate dehydrogenase (NADP)
  misc_feature (46)..(447): Homolog of NCBI NO: 81621 NR Description: glyceraldehyde-3-phosphate dehydrogenase (NADP)
  misc_feature (1)..(447): Homolog of NCBI NO: 120663 NR Description: Glyceraldehyde 3-phosphate dehydrogenase B, precursor (NADP-dependent glyceraldehydephosphate dehydrogenase
  misc_feature (1)..(447): Homolog of NCBI NO: 15217555 NR Description: glyceraldehyde-3-phosphate dehydrogenase
MATHSALAVSRIPVKPRLQSKSAIHSFPAQCSSKRLEVAAFSGLRVSSNGGEASFFDAIAAQITPKAVGTSSPVRGETVAKLKVAINGFGRIGRNFLRCWHGRKDSPLEVVVLNDSGGVKNASHLLKYDSMLGTFKADVKIVDNETISVDGKFIKVVSNRDPLKLPWAELGIDIVIEGTGVFVDGPGAGKHIQAGASKVIITAPAKGADIPTYVVGVNEQDYSHDVANIISNASCTTNCLAPFAKVLDEEFGIVKGTMTTTHSYTGDQRLLDASHRDLRRARAAALNIVPTSTGAAKAVSLVLPQLKGKLNGIALRVPTPNVSVVDLVINVEKKGLTAEDVNEAFRKAAAGPLKGVLEVCDTPLVSCDFRCSDVSTTIDSSLTMVMGDDMVKVVAWYDNEWGYSQRVVDLAHLVAAKWPGEVAAGSGDPLEDFCKTNPADEECKVYEA

SEQ ID NO: 61350 - protein, 318 aa, Triticum aestivum
  peptide (1)..(318): Ceres Seq. ID no. 15176853
  misc_feature (106)..(267): Pfam Name: Glyceraldehyde 3-phosphate dehydrogenase, Pfam Description: Glyceraldehyde 3-phosphate dehydrogenase,
  misc_feature (1)..(290): Homolog of NCBI NO: 82166 NR Description: glyceraldehyde-3-phosphate dehydrogenase (NADP)
  misc_feature (1)..(301): Homolog of NCBI NO: 18076102 NR Description: glyceraldehyde-3-phosphate dehydrogenase
  misc_feature (1)..(290): Homolog of NCBI NO: 120665 NR Description: Glyceraldehyde 3-phosphate dehydrogenase B, precursor (NADP-dependent glyceraldehydephosphate dehydrogenase
  misc_feature (1)..(317): Homolog of NCBI NO: 6063542 NR Description: EST C74302(E30840) corresponds to a region of the gene.~similar to glyceraldehyde-3-phosphate dehydrogenase.
  misc_feature (1)..(317): Homolog of NCBI NO: 120664 NR Description: Glyceraldehyde 3-phosphate dehydrogenase B, precursor (NADP-dependent glyceraldehydephosphate dehydrogenase
  misc_feature (1)..(317): Homolog of NCBI NO: 20733 NR Description: unnamed protein product [Pisum sativum]
  misc_feature (1)..(317): Homolog of NCBI NO: 66028 NR Description: glyceraldehyde-3-phosphate dehydrogenase (NADP)
  misc_feature (1)..(317): Homolog of NCBI NO: 81621 NR Description: glyceraldehyde-3-phosphate dehydrogenase (NADP)
  misc_feature (1)..(317): Homolog of NCBI NO: 120663 NR Description: Glyceraldehyde 3-phosphate dehydrogenase B, precursor (NADP-dependent glyceraldehydephosphate dehydrogenase
  misc_feature (1)..(317): Homolog of NCBI NO: 15217555 NR Description: glyceraldehyde-3-phosphate dehydrogenase
MLGTFKADVKIVDNETISVDGKFIKVVSNRDPLKLPWAELGIDIVIEGTGVFVDGPGAGKHIQAGASKVIITAPAKGADIPTYVVGVNEQDYSHDVANIISNASCTTNCLAPFAKVLDEEFGIVKGTMTTTHSYTGDQRLLDASHRDLRRARAAALNIVPTSTGAAKAVSLVLPQLKGKLNGIALRVPTPNVSVVDLVINVEKKGLTAEDVNEAFRKAAAGPLKGVLEVCDTPLVSCDFRCSDVSTTIDSSLTMVMGDDMVKVVAWYDNEWGYSQRVVDLAHLVAAKWPGEVAAGSGDPLEDFCKTNPADEECKVYEA

SEQ ID NO: 61351 - DNA, 1123 bp, Triticum aestivum
  misc_feature (1)..(1123): Ceres Seq. ID no. 15227147
acgaaatctatcaacccctccaccagttgcaagaaaatcattttcgaagtcttcctcccctgatcctgtgaagccaccccagagagctgcctcgatcgccgcaatgtctgcttctttcgagcggcctagacaaactctgataccaaagtcaattaaagcgagtcctgaggtaaagaaaccacaatctgaagcaagcaaacctaagccagaggaagacgccaaagaaagtacccctgctgcgaaggatgggcaaactgtgactccgacaatacaggaagatgtaaaggaggatcaacccgaagacgaggaagggcttcctacatatccgtatgatcgcttgaggacatcttcaagcaatcctgtcacagacattgatagtaccaggcgtgagacgtatctatcttcggcagagttcagggagaagtttggcatgacaaaggaggcttttgcaaagctaccaaagtggaagcagaataggctcaagatcgctcttcagctcttttaaaatcttatgctgtcaaatatgcagtagttatgtctgcttgttggtgaaagcaaggacggcgagattggttttcaaaggcaaatctcagacatgaagatctctctcgcacacgtcgcaatgttaagaagagacatcggtaagtgtaagcctatctgggtcaaggggaccctcagtaggcgtctgaggggctggagcagtgagttttgagctgcccatgcccccaaattgtgtgttgtccactgacgaattctccatgtcgtgtgccgggtcgctgcattggcggtcctggtcacacaccctaattttttcctttccaaggtcaccggtttggttgtgagcttgcaatgctttttcctcgccctctttgaaacctcaccatttgtttcattctttcatgctgtgtatggtttcctgacaaataattatgttacatatatggtgtaagaagttaggtgatgggatgggtcgggatgaacgccccttatgttggaaaatccaggcgatgtacgggagacgggcgtcttgccctcggaatttgatcttttaagtggtaattagttattcatgcgtgcaaattttgtaatcagatttacagtaagcctctgttctcgtaagtac

SEQ ID NO: 61352 - protein, 167 aa, Triticum aestivum
  peptide (1)..(167): Ceres Seq. ID no. 15227148
  misc_feature (132)..(167): Pfam Name: Villin headpiece domain Pfam Description: Villin headpiece domain
  misc_feature (13)..(167): Homolog of NCBI NO: 18405794 NR Description: villin 2 -related [Arabidopsis thaliana]
  misc_feature (13)..(167): Homolog of NCBI NO: 11358919 NR Description: villin 2 [imported] - Arabidopsis thaliana
  misc_feature (13)..(167): Homolog of NCBI NO: 25295744 NR Description: probable villin 2 [imported] - Arabidopsis
  misc_feature (17)..(167): Homolog of NCBI NO: 18410709 NR Description: villin 3 fragment [Arabidopsis thaliana]
  misc_feature (17)..(167): Homolog of NCBI NO: 11358920 NR Description: villin 3 homolog F28O9.260 - Arabidopsis thaliana
  misc_feature (25)..(167): Homolog of NCBI NO: 38344157 NR Description: OSJNBa0041A02.24 [Oryza sativa (japonica
  misc_feature (1)..(167): Homolog of NCBI NO: 15242097 NR Description: villin [Arabidopsis thaliana]
  misc_feature (1)..(167): Homolog of NCBI NO: 31339056 NR Description: actin filament bundling protein P-115-ABP [Lilium
  misc_feature (1)..(167): Homolog of NCBI NO: 15234646 NR Description: villin -related [Arabidopsis thaliana]
  misc_feature (1)..(167): Homolog of NCBI NO: 40253250 NR Description: putative villin [Oryza sativa (japonica
RNLSTPPPVARKSFSKSSSPDPVKPPQRAASIAAMSASFERPRQTLIPKSIKASPEVKKPQSEASKPKPEEDAKESTPAAKDGQTVTPTIQEDVKEDQPEDEEGLPTYPYDRLRTSSSNPVTDIDSTRRETYLSSAEFREKFGMTKEAFAKLPKWKQNRLKIALQLF

SEQ ID NO: 61353 - protein, 133 aa, Triticum aestivum
  peptide (1)..(133): Ceres Seq. ID no. 15227149
  misc_feature (98)..(133): Pfam Name: Villin headpiece domain Pfam Description: Villin headpiece domain
  misc_feature (1)..(133): Homolog of NCBI NO: 18405794 NR Description: villin 2 -related [Arabidopsis thaliana]
  misc_feature (1)..(133): Homolog of NCBI NO: 11358919 NR Description: villin 2 [imported] - Arabidopsis thaliana
  misc_feature (1)..(133): Homolog of NCBI NO: 25295744 NR Description: probable villin 2 [imported] - Arabidopsis
  misc_feature (1)..(133): Homolog of NCBI NO: 18410709 NR Description: villin 3 fragment [Arabidopsis thaliana]
  misc_feature (1)..(133): Homolog of NCBI NO: 11358920 NR Description: villin 3 homolog F28O9.260 - Arabidopsis thaliana
  misc_feature (1)..(133): Homolog of NCBI NO: 38344157 NR Description: OSJNBa0041A02.24 [Oryza sativa (japonica
  misc_feature (1)..(133): Homolog of NCBI NO: 15242097 NR Description: villin [Arabidopsis thaliana]
  misc_feature (1)..(133): Homolog of NCBI NO: 31339056 NR Description: actin filament bundling protein P-115-ABP [Lilium
  misc_feature (1)..(133): Homolog of NCBI NO: 15234646 NR Description: villin -related [Arabidopsis thaliana]
  misc_feature (1)..(133): Homolog of NCBI NO: 40253250 NR Description: putative villin [Oryza sativa (japonica
MSASFERPRQTLIPKSIKASPEVKKPQSEASKPKPEEDAKESTPAAKDGQTVTPTIQEDVKEDQPEDEEGLPTYPYDRLRTSSSNPVTDIDSTRRETYLSSAEFREKFGMTKEAFAKLPKWKQNRLKIALQLF

SEQ ID NO: 61354 - DNA, 647 bp, Triticum aestivum
  misc_feature (1)..(647): Ceres Seq. ID no. 12624098
ctcagttaatgacacgtgtcattcggtccgtggcttgtcactttgcttcctcaatcgtcaagctacaacgtaaagagaccggcgaggccacccacaacttgtgaatctgaaaatggaatcaaaagctttcgtatctgttacgttcttgatcgtaaccctcctcctctgtcgaacaattcaatcaagaagttgcagatcagatgagaaaaccacggagaagacgatgattttaggaggcgttcatgatctccgaggaaaccaaaacagtggagagatcgagaatctcgctcgattcgctattcaacaacataacaaccgaaagaacaaggttcttgagttcaagaagattgtaaaggcaagagaacaggtagttgctggaaccatgtactacttaactcttgaagcaaacgaaggtggccaggccaagaacttcgaagccaaagtttgggtgaagccatggatgaacttcaagcagttacaagagtttaaagaatcttcttcttgaacatttcacttgttcaaaagggtaatctaaatgtttctgctaaattatatgaaataaataaggctgagatagctttgtttcagaccagtgtgtgtaatactaaaccagaagttaatgtaatcaaggaacctgttatggcttt

SEQ ID NO: 61355 - protein, 130 aa, Triticum aestivum
  peptide (1)..(130): Ceres Seq. ID no. 12624099
  misc_feature (39)..(129): Homolog of NCBI NO: 18158608 NR Description: cysteine protease inhibitor CPI-1 [Brassica
  misc_feature (39)..(129): Homolog of NCBI NO: 7488521 NR Description: cysteine proteinase inhibitor BCPI-2 - turnip
  misc_feature (35)..(129): Homolog of NCBI NO: 11139270 NR Description: PRLI-interacting factor M [Arabidopsis thaliana]
  misc_feature (39)..(129): Homolog of NCBI NO: 24899735 NR Description: cysteine proteinase inhibitor, putative 1
  misc_feature (39)..(129): Homolog of NCBI NO: 18399630 NR Description: cysteine proteinase inhibitor, putative; protein
  misc_feature (1)..(128): Homolog of NCBI NO: 27752377 NR Description: cysteine protease inhibitor cystatin [Malus x
  misc_feature (1)..(129): Homolog of NCBI NO: 12321971 NR Description: cysteine proteinase inhibitor, putative;
  misc_feature (39)..(130): Homolog of NCBI NO: 11127597 NR Description: cysteine proteinase inhibitor homolog
  misc_feature (15)..(130): Homolog of NCBI NO: 19347961 NR Description: putative cysteine proteinase inhibitor cystatin B
  misc_feature (8)..(130): Homolog of NCBI NO: 15226769 NR Description: putative cysteine proteinase inhibitor B
MESKAFVSVTFLIVTLLLCRTIQSRSCRSDEKTTEKTMILGGVHDLRGNQNSGEIENLARFAIQQHNNRKNKVLEFKKIVKAREQVVAGTMYYLTLEANEGGQAKNFEAKVWVKPWMNFKQLQEFKESSS

SEQ ID NO: 61356 - protein, 93 aa, Triticum aestivum
  peptide (1)..(93): Ceres Seq. ID no. 12624100
  misc_feature (2)..(92): Homolog of NCBI NO: 18158608 NR Description: cysteine protease inhibitor CPI-1 [Brassica
  misc_feature (2)..(92): Homolog of NCBI NO: 7488521 NR Description: cysteine proteinase inhibitor BCPI-2 - turnip
  misc_feature (1)..(92): Homolog of NCBI NO: 11139270 NR Description: PRLI-interacting factor M [Arabidopsis thaliana]
  misc_feature (2)..(92): Homolog of NCBI NO: 24899735 NR Description: cysteine proteinase inhibitor, putative 1
  misc_feature (2)..(92): Homolog of NCBI NO: 18399630 NR Description: cysteine proteinase inhibitor, putative; protein
  misc_feature (1)..(91): Homolog of NCBI NO: 27752377 NR Description: cysteine protease inhibitor cystatin [Malus x
  misc_feature (1)..(92): Homolog of NCBI NO: 12321971 NR Description: cysteine proteinase inhibitor, putative;
  misc_feature (2)..(93): Homolog of NCBI NO: 11127597 NR Description: cysteine proteinase inhibitor homolog
  misc_feature (1)..(93): Homolog of NCBI NO: 19347961 NR Description: putative cysteine proteinase inhibitor cystatin B
  misc_feature (1)..(93): Homolog of NCBI NO: 15226769 NR Description: putative cysteine proteinase inhibitor B
MILGGVHDLRGNQNSGEIENLARFAIQQHNNRKNKVLEFKKIVKAREQVVAGTMYYLTLEANEGGQAKNFEAKVWVKPWMNFKQLQEFKESSS

SEQ ID NO: 61357 - DNA, 905 bp, Triticum aestivum
  misc_feature (1)..(905): Ceres Seq. ID no. 13598171
cacaatcaaaacaccgactactcaagggaaatccatggcctctgccgcgctcctcgtcctcctcgccctggccaccatgcaggcgcagaccacgtcgtccgagaaggagacgcacctcaaggtgtactggcacgacgtggtgagcggacaagacccgacatcggtgccggtggcgcgcgcggccacgaccaacacctccaagtcggccttcggcgtcgtcatggtcatggacaactcactcacagaggggccgagcctcgactcatccaggctcatgggccgcgcccagggcacgtacatcgccgccggcaaggaccagctggcgctgctcatgctcatgaacttcgtctttaccgccggaaagtacaacggcagcagcatcgccattgtgggtcgcaacgccgtgtttaccgaggtccgtgagatggctgtcgtcggtggtaccggcgtgttcaggtgggcacgcgggtacgcgcaggccaggacgcataccttagacctcaagaccggcgacgccaccgtcgagtacaacatattcatcaggcactagtctcggccgttgtcaaaatttacttttgaaaacgggtttgctatttcacatctaaatgtgaaatacttatctcacatctaaatctagaacagttgatattgtttgtctttaattttcgtgcaaacatgatcgtctcgcctggcgcacccgttcgcttcacgttgtctgctgcagcggcctgtgtcccggccatgcaagtggtggtgggccgttgttgttcctttttaattcgcgggcttaggctggcagccgttgtttgtctcgattatggactcctgtttacgctttttttactggattgtccacgtatttgttgtctgtataattttttgaagacaatgtgattttagagtgg

SEQ ID NO: 61358 - protein, 182 aa, Triticum aestivum
  peptide (1)..(182): Ceres Seq. ID no. 13598172
  misc_feature (34)..(182): Pfam Name: Dirigent-like protein Pfam Description: Dirigent-like protein
  misc_feature (29)..(182): Homolog of NCBI NO: 30681257 NR Description: disease resistance response protein-related/
  misc_feature (25)..(182): Homolog of NCBI NO: 15219966 NR Description: disease resistance response protein-related
  misc_feature (15)..(182): Homolog of NCBI NO: 15238982 NR Description: disease resistance response protein-related
  misc_feature (34)..(182): Homolog of NCBI NO: 22135914 NR Description: unknown protein [Arabidopsis thaliana]
  misc_feature (34)..(182): Homolog of NCBI NO: 15222673 NR Description: disease resistance response protein-related/
  misc_feature (25)..(182): Homolog of NCBI NO: 15238980 NR Description: disease resistance response protein-related
  misc_feature (34)..(182): Homolog of NCBI NO: 15218836 NR Description: disease resistance response protein-related/
  misc_feature (34)..(182): Homolog of NCBI NO: 15231302 NR Description: disease resistance response protein-related/
  misc_feature (34)..(182): Homolog of NCBI NO: 15239779 NR Description: disease resistance response protein-related/
  misc_feature (11)..(182): Homolog of NCBI NO: 15217886 NR Description: disease resistance response protein-related/
TIKTPTTQGKSMASAALLVLLALATMQAQTTSSEKETHLKVYWHDVVSGQDPTSVPVARAATTNTSKSAFGVVMVMDNSLTEGPSLDSSRLMGRAQGTYIAAGKDQLALLMLMNFVFTAGKYNGSSIAIVGRNAVFTEVREMAVVGGTGVFRWARGYAQARTHTLDLKTGDATVEYNIFIRH

SEQ ID NO: 61359 - protein, 171 aa, Triticum aestivum
  peptide (1)..(171): Ceres Seq. ID no. 13598173
  misc_feature (23)..(171): Pfam Name: Dirigent-like protein Pfam Description: Dirigent-like protein
  misc_feature (18)..(171): Homolog of NCBI NO: 30681257 NR Description: disease resistance response protein-related/
  misc_feature (14)..(171): Homolog of NCBI NO: 15219966 NR Description: disease resistance response protein-related
  misc_feature (4)..(171): Homolog of NCBI NO: 15238982 NR Description: disease resistance response protein-related
  misc_feature (23)..(171): Homolog of NCBI NO: 22135914 NR Description: unknown protein [Arabidopsis thaliana]
  misc_feature (23)..(171): Homolog of NCBI NO: 15222673 NR Description: disease resistance response protein-related/
  misc_feature (14)..(171): Homolog of NCBI NO: 15238980 NR Description: disease resistance response protein-related
  misc_feature (23)..(171): Homolog of NCBI NO: 15218836 NR Description: disease resistance response protein-related/
  misc_feature (23)..(171): Homolog of NCBI NO: 15231302 NR Description: disease resistance response protein-related/
  misc_feature (23)..(171): Homolog of NCBI NO: 15239779 NR Description: disease resistance response protein-related/
  misc_feature (1)..(171): Homolog of NCBI NO: 15217886 NR Description: disease resistance response protein-related/
MASAALLVLLALATMQAQTTSSEKETHLKVYWHDVVSGQDPTSVPVARAATTNTSKSAFGVVMVMDNSLTEGPSLDSSRLMGRAQGTYIAAGKDQLALLMLMNFVFTAGKYNGSSIAIVGRNAVFTEVREMAVVGGTGVFRWARGYAQARTHTLDLKTGDATVEYNIFIRH

SEQ ID NO: 61360 - protein, 157 aa, Triticum aestivum
  peptide (1)..(157): Ceres Seq. ID no. 13598174
  misc_feature (9)..(157): Pfam Name: Dirigent-like protein Pfam Description: Dirigent-like protein
  misc_feature (4)..(157): Homolog of NCBI NO: 30681257 NR Description: disease resistance response protein-related/
  misc_feature (1)..(157): Homolog of NCBI NO: 15219966 NR Description: disease resistance response protein-related
  misc_feature (1)..(157): Homolog of NCBI NO: 15238982 NR Description: disease resistance response protein-related
  misc_feature (9)..(157): Homolog of NCBI NO: 22135914 NR Description: unknown protein [Arabidopsis thaliana]
  misc_feature (9)..(157): Homolog of NCBI NO: 15222673 NR Description: disease resistance response protein-related/
  misc_feature (1)..(157): Homolog of NCBI NO: 15238980 NR Description: disease resistance response protein-related
  misc_feature (9)..(157): Homolog of NCBI NO: 15218836 NR Description: disease resistance response protein-related/
  misc_feature (9)..(157): Homolog of NCBI NO: 15231302 NR Description: disease resistance response protein-related/
  misc_feature (9)..(157): Homolog of NCBI NO: 15239779 NR Description: disease resistance response protein-related/
  misc_feature (1)..(157): Homolog of NCBI NO: 15217886 NR Description: disease resistance response protein-related/
MQAQTTSSEKETHLKVYWHDVVSGQDPTSVPVARAATTNTSKSAFGVVMVMDNSLTEGPSLDSSRLMGRAQGTYIAAGKDQLALLMLMNFVFTAGKYNGSSIAIVGRNAVFTEVREMAVVGGTGVFRWARGYAQARTHTLDLKTGDATVEYNIFIRH

SEQ ID NO: 61361 - DNA, 686 bp, Triticum aestivum
  misc_feature (1)..(686): Ceres Seq. ID no. 12624105
aacaaaacaactgaatctgtttgcttgagttgaagcatcaagagacagaacagcaatggcttcttcttcttccatctccttctcatgcgcaccttcactcttctccatcaaacccatcacctcttcttcttctttcccaaagcagctctcctctcgattcctaggaacccgaaacttaaagattcgaatccgacccaacagactcggaccctccaacggttcaagaaccacctgctggttcaagttcggcaagaacggcgtcgatgctgaaagtgcaggaatctatggtagtcaaacacgcgatgacttcgacaaagacgacgttgaacagtacttcaattacatggggatgcttgcggtagaaggtacatattcaaagatggaagctcttcttaacctaaacattcatccagtcgatatcctattgatgttggcagccacggaaggtgacaaacctaagatcgaggagctgcttagagctggtgctagctactcggtcaaggatgctgatggaagaaccgctatagacagagctaatagtgaagagattcgtgacttgatccttggctactccactcagaaggcttgaatgttcctgagttttttaaagaaatgttgtgctagaacaaactgtctttatgagttccccggatgagtaggttataaaatccatcttcttttgcttc

SEQ ID NO: 61362 - protein, 177 aa, Triticum aestivum
  peptide (1)..(177): Ceres Seq. ID no. 12624106
  misc_feature (97)..(177): Homolog of NCBI NO: 33146521 NR Description: unknown protein [Oryza sativa (japonica
  misc_feature (45)..(177): Homolog of NCBI NO: 34901972 NR Description: hypothetical protein~similar to Arabidopsis
  misc_feature (3)..(177): Homolog of NCBI NO: 18403267 NR Description: expressed protein
  misc_feature (1)..(177): Homolog of NCBI NO: 25373264 NR Description: unknown protein [imported] - Arabidopsis thaliana
MASSSSISFSCAPSLFSIKPITSSSSFPKQLSSRFLGTRNLKIRIRPNRLGPSNGSRTTCWFKFGKNGVDAESAGIYGSQTRDDFDKDDVEQYFNYMGMLAVEGTYSKMEALLNLNIHPVDILLMLAATEGDKPKIEELLRAGASYSVKDADGRTAIDRANSEEIRDLILGYSTQKA

SEQ ID NO: 61363 - DNA, 1374 bp, Triticum aestivum
  misc_feature (1)..(1374): Ceres Seq. ID no. 14303656
aaaccgccgtcccccgttcgccgtctccgcgccgcgcgacccttcggcccggccgccctccccgaacccccctccgtctgctgcgccgccgcccgcgaatccgggccatggaggcgctgtggaagcaggcctccaggctcaaggagcaggtcgcccgccagggcgtgtttaagcagtttggggctggtggctatggaaattctgataatgcattcacagacgagtcagaagttaaactacatcagagattggaaaaactttacttatccactcgtgctgccaaacattttcaaagggacgtcgtccggggtgtggagggctacatagtgacaggatctaagcaagtggagatagggaacaaattgtctgatgatagccagaaatatggcattgaaaacacatgcacaagtggtaatactttatccagagctgctacatactatggaaaggcgcgttcactgatagaaaaggaacgcgggaacatgctaaaagcatttggtactcaggtggcagagcctctacgggcaatggtaatgggtgcccctctagaggatgctagacatctagcccagagatatgacagagtaaggcaagaagctgatgctcaggtcgttgaagtttcaaggcgtcaaagcagagtaagagaatcagctgggaatagtgacgtgatatcaaagttggaggcagctgagtataaacttgaagaactgaagtcaaacatggtggggttaggaaaggaagcggtttcagctatggctgctgtagaggggcagcagcaaagattgacattacaacgcctcattgcaatggttgaggcggagagaacttatcatcagaaagtcctggagatccttgaccatttggaagaagaaatggtgtctgagcgccaaaaaatcgaagcacctccaccccctgcagcagaaagttatatgtcaccgccgccaccatcatatgacgaagttaatggcatgtttgcctccacttctgctgatcaggcagttaactctgtcgacttcttcctgggagaggcgctcgattccttcgaggctgagagtgagtttgagcttaacttatcagttggcgacatcgttatcgtccggaagatatcaagcaacggttgggcggaaggtgaatgcaaggggaaagcaggatggttcccacatgcctatgtcgaaagacgcgagcgtgttctggcgagcaaagtcccgcatattttctaggggttttgaggaggaacataggttataggtgtttgatttcaatagttgaacagcgtactttcagacttctacagtattcatgtgtatagattgaattttcgtcccgtgagccagtttttgtgaagataatgtacatctgacatttcagaacacc

SEQ ID NO: 61364 - protein, 405 aa, Triticum aestivum
  peptide (1)..(405): Ceres Seq. ID no. 14303657
  misc_feature (339)..(393): Pfam Name: SH3 domain Pfam Description: SH3 domain
  misc_feature (338)..(396): Homolog of NCBI NO: 7485521 NR Description: hypothetical protein F15J5.30 - Arabidopsis
  misc_feature (36)..(278): Homolog of NCBI NO: 7485521 NR Description: hypothetical protein F15J5.30 - Arabidopsis
  misc_feature (288)..(401): Homolog of NCBI NO: 15221714 NR Description: SH3 domain-containing protein 1 [Arabidopsis
  misc_feature (36)..(302): Homolog of NCBI NO: 15221714 NR Description: SH3 domain-containing protein 1 [Arabidopsis
  misc_feature (176)..(405): Homolog of NCBI NO: 37535998 NR Description: unknown protein [Oryza sativa (japonica
  misc_feature (339)..(400): Homolog of NCBI NO: 34902022 NR Description: unknown protein [Oryza sativa (japonica
  misc_feature (36)..(330): Homolog of NCBI NO: 34902022 NR Description: unknown protein [Oryza sativa (japonica
  misc_feature (36)..(367): Homolog of NCBI NO: 7487662 NR Description: hypothetical protein T4L20.240 - Arabidopsis
  misc_feature (36)..(405): Homolog of NCBI NO: 18418491 NR Description: SH3 domain-containing protein 2 [Arabidopsis
  misc_feature (36)..(405): Homolog of NCBI NO: 38344978 NR Description: OSJNBa0011L07.8 [Oryza sativa (japonica
TAVPRSPSPRRATLRPGRPPRTPLRLLRRRPRIRAMEALWKQASRLKEQVARQGVFKQFGAGGYGNSDNAFTDESEVKLHQRLEKLYLSTRAAKHFQRDVVRGVEGYIVTGSKQVEIGNKLSDDSQKYGIENTCTSGNTLSRAATYYGKARSLIEKERGNMLKAFGTQVAEPLRAMVMGAPLEDARHLAQRYDRVRQEADAQVVEVSRRQSRVRESAGNSDVISKLEAAEYKLEELKSNMVGLGKEAVSAMAAVEGQQQRLTLQRLIAMVEAERTYHQKVLEILDHLEEEMVSERQKIEAPPPPAAESYMSPPPPSYDEVNGMFASTSADQAVNSVDFFLGEALDSFEAESEFELNLSVGDIVIVRKISSNGWAEGECKGKAGWFPHAYVERRERVLASKVPHIF

SEQ ID NO: 61365 - protein, 370 aa, Triticum aestivum
  peptide (1)..(370): Ceres Seq. ID no. 14303658
  misc_feature (304)..(358): Pfam Name: SH3 domain Pfam Description: SH3 domain
  misc_feature (303)..(361): Homolog of NCBI NO: 7485521 NR Description: hypothetical protein F15J5.30 - Arabidopsis
  misc_feature (1)..(243): Homolog of NCBI NO: 7485521 NR Description: hypothetical protein F15J5.30 - Arabidopsis
  misc_feature (253)..(366): Homolog of NCBI NO: 15221714 NR Description: SH3 domain-containing protein 1 [Arabidopsis
  misc_feature (1)..(267): Homolog of NCBI NO: 15221714 NR Description: SH3 domain-containing protein 1 [Arabidopsis
  misc_feature (141)..(370): Homolog of NCBI NO: 37535998 NR Description: unknown protein [Oryza sativa (japonica
  misc_feature (304)..(365): Homolog of NCBI NO: 34902022 NR Description: unknown protein [Oryza sativa (japonica
  misc_feature (1)..(295): Homolog of NCBI NO: 34902022 NR Description: unknown protein [Oryza sativa (japonica
  misc_feature (1)..(332): Homolog of NCBI NO: 7487662 NR Description: hypothetical protein T4L20.240 - Arabidopsis
  misc_feature (1)..(370): Homolog of NCBI NO: 18418491 NR Description: SH3 domain-containing protein 2 [Arabidopsis
  misc_feature (1)..(370): Homolog of NCBI NO: 38344978 NR Description: OSJNBa0011L07.8 [Oryza sativa (japonica
MEALWKQASRLKEQVARQGVFKQFGAGGYGNSDNAFTDESEVKLHQRLEKLYLSTRAAKHFQRDVVRGVEGYIVTGSKQVEIGNKLSDDSQKYGIENTCTSGNTLSRAATYYGKARSLIEKERGNMLKAFGTQVAEPLRAMVMGAPLEDARHLAQRYDRVRQEADAQVVEVSRRQSRVRESAGNSDVISKLEAAEYKLEELKSNMVGLGKEAVSAMAAVEGQQQRLTLQRLIAMVEAERTYHQKVLEILDHLEEEMVSERQKIEAPPPPAAESYMSPPPPSYDEVNGMFASTSADQAVNSVDFFLGEALDSFEAESEFELNLSVGDIVIVRKISSNGWAEGECKGKAGWFPHAYVERRERVLASKVPHIF

SEQ ID NO: 61366 - protein, 245 aa, Triticum aestivum
  peptide (1)..(245): Ceres Seq. ID no. 14303659
  misc_feature (179)..(233): Pfam Name: SH3 domain Pfam Description: SH3 domain
  misc_feature (178)..(236): Homolog of NCBI NO: 7485521 NR Description: hypothetical protein F15J5.30 - Arabidopsis
  misc_feature (1)..(118): Homolog of NCBI NO: 7485521 NR Description: hypothetical protein F15J5.30 - Arabidopsis
  misc_feature (128)..(241): Homolog of NCBI NO: 15221714 NR Description: SH3 domain-containing protein 1 [Arabidopsis
  misc_feature (1)..(142): Homolog of NCBI NO: 15221714 NR Description: SH3 domain-containing protein 1 [Arabidopsis
  misc_feature (16)..(245): Homolog of NCBI NO: 37535998 NR Description: unknown protein [Oryza sativa (japonica
  misc_feature (179)..(240): Homolog of NCBI NO: 34902022 NR Description: unknown protein [Oryza sativa (japonica
  misc_feature (1)..(170): Homolog of NCBI NO: 34902022 NR Description: unknown protein [Oryza sativa (japonica
  misc_feature (1)..(207): Homolog of NCBI NO: 7487662 NR Description: hypothetical protein T4L20.240 - Arabidopsis
  misc_feature (1)..(245): Homolog of NCBI NO: 18418491 NR Description: SH3 domain-containing protein 2 [Arabidopsis
  misc_feature (1)..(245): Homolog of NCBI NO: 38344978 NR Description: OSJNBa0011L07.8 [Oryza sativa (japonica
MLKAFGTQVAEPLRAMVMGAPLEDARHLAQRYDRVRQEADAQVVEVSRRQSRVRESAGNSDVISKLEAAEYKLEELKSNMVGLGKEAVSAMAAVEGQQQRLTLQRLIAMVEAERTYHQKVLEILDHLEEEMVSERQKIEAPPPPAAESYMSPPPPSYDEVNGMFASTSADQAVNSVDFFLGEALDSFEAESEFELNLSVGDIVIVRKISSNGWAEGECKGKAGWFPHAYVERRERVLASKVPHIF

SEQ ID NO: 61367 - DNA, 920 bp, Triticum aestivum
  misc_feature (1)..(920): Ceres Seq. ID no. 13661277
tcatctcaaaccaacaccactctaactcaagcttatcgttcgcatctagcctctgtttgtagtcactccatcgggtgcatctagcctctggtggtagtacattcaaattgaggaagcaaagatagatatgctgctgtcaggcggcttctcctgggtgtaccttgctctgctgttggccttgctcaccttcaactccgtcatggcggtgtaccactccaagggcgacacggccactgtcgccttcgtcgccacctcctacctcgacctggtgctgctcttctgctgcctctggctctacaacacaacggcagcggggtcggcgtggaggaaccggctcaaggcgtcagtgtggactctcaccacgctgctcaccttctccttcgcctacatggtcatgggcacggctggcctcaccctccacgtcgcgttgctcgtgtggttcatcgccgcggcgacggggattggtgccttctccgccttcttcgagcagggcagaatcaacccagctccgggtgaacccatgctgccgccaccggtgtagcccaggctctgaatcactacggggatatgcttttgtgatgcattcagacgcatggagtttgccaggttgtgagcttacgatggagttcaaatactgttgggtcgccctcgtcttgtaaatatatttaccttgaaagcatgcaagagtccttgtagaatcgttgtccttgtcccttctaggggtgcacgcttaggtgtgtatgtgtgtagtgtgcaatgtaaccggcaacgaaataatgaattgcgtggttcagtaacaagcgtgtgatctcctatgtctctgcagtcctttactattttgaatcacacgcaaggcgccaaatttccttggcgccaaatttagtattccatgcggattcgcctttattctgcgataatct

SEQ ID NO: 61368 - protein, 137 aa, Triticum aestivum
  peptide (1)..(137): Ceres Seq. ID no. 13661278
  misc_feature (13)..(123): Homolog of NCBI NO: 34912134 NR Description: OSJNBb0024F06.19 [Oryza sativa (japonica
  misc_feature (13)..(136): Homolog of NCBI NO: 34910564 NR Description: B1131B07.10 [Oryza sativa (japonica
  misc_feature (13)..(119): Homolog of NCBI NO: 34904462 NR Description: OSJNBa0086P08.10 [Oryza sativa (japonica
MLLSGGFSWVYLALLLALLTFNSVMAVYHSKGDTATVAFVATSYLDLVLLFCCLWLYNTTAAGSAWRNRLKASVWTLTTLLTFSFAYMVMGTAGLTLHVALLVWFIAAATGIGAFSAFFEQGRINPAPGEPMLPPPV

SEQ ID NO: 61369 - protein, 113 aa, Triticum aestivum
  peptide (1)..(113): Ceres Seq. ID no. 13661279
  misc_feature (1)..(99): Homolog of NCBI NO: 34912134 NR Description: OSJNBb0024F06.19 [Oryza sativa (japonica
  misc_feature (1)..(112): Homolog of NCBI NO: 34910564 NR Description: B1131B07.10 [Oryza sativa (japonica
  misc_feature (1)..(95): Homolog of NCBI NO: 34904462 NR Description: OSJNBa0086P08.10 [Oryza sativa (japonica
MAVYHSKGDTATVAFVATSYLDLVLLFCCLWLYNTTAAGSAWRNRLKASVWTLTTLLTFSFAYMVMGTAGLTLHVALLVWFIAAATGIGAFSAFFEQGRINPAPGEPMLPPPV

SEQ ID NO: 61370 - DNA, 754 bp, Triticum aestivum
  misc_feature (1)..(754): Ceres Seq. ID no. 13661351
ctttctcgcttctcataaactcgttggaacaaaaatcaaacaaaccatattacaaaatttgcgacccaaaggaagaaaaaaggtgaattttctgattccgagcagcccggccgatttagttgaggtcatccggggaatccggttcggctccagacggcgtcacgcacccgcgacgcgtcccggcccttgagcgtgcgtccgacgccctcgaccaccgacgccctggcctgacgccgcgccaggtacacgtgcggcggcacccagccgtcggcgtcgtcttgctgctgctcgtcgggctcgggctccagctccaggtcggcgaaccggctcggccacgcgggcacctcgacgggcgccgacgacgccacctgccgcccgtccgcgaacgcccggctgagcccgcccacgcgccgcggcggctcgcccctgggcgccctgtccgtgcgctgaatcccgtcctgatccgcggtggtggttggcgcgtccgacgatggagaataccagacgtccgattcggccaggtccggcaggtcgtcgtagggggacggggcgacggtggcggagccggggcggtggtggaagccgaggaagcgctcggcggcagagaaggccgtctgcttgcgcgccttggccatcgggcgcagtaccggcggctggctccggtcgattggtttggctgagcgcgcgcgcgcggtgggaaagatgggaggtgggaaagacggaggagcaggagagtgttgagggggggtttggc

SEQ ID NO: 61371 - protein, 88 aa, Triticum aestivum
  peptide (1)..(88): Ceres Seq. ID no. 13661352
  misc_feature (1)..(50): Homolog of NCBI NO: 32141270 NR Description: probable translational initiation factor
  misc_feature (1)..(50): Homolog of NCBI NO: 31227421 NR Description: ENSANGP00000004917 [Anopheles gambiae]
  misc_feature (1)..(54): Homolog of NCBI NO: 29829093 NR Description: putative translation initiation factor IF-2
MENTRRPIRPGPAGRRRGTGRRWRSRGGGGSRGSARRQRRPSACAPWPSGAVPAAGSGRLVWLSARARWERWEVGKTEEQESVEGGFG

SEQ ID NO: 61372 - protein, 62 aa, Triticum aestivum
  peptide (1)..(62): Ceres Seq. ID no. 13661353
  misc_feature (51)..(62): Homolog of NCBI NO: 31227421 NR Description: ENSANGP00000004917 [Anopheles gambiae]
  misc_feature (52)..(62): Homolog of NCBI NO: 29829093 NR Description: putative translation initiation factor IF-2
FLASHKLVGTKIKQTILQNLRPKGRKKVNFLIPSSPADLVEVIRGIRFGSRRRHAPATRPGP

SEQ ID NO: 61373 - DNA, 595 bp, Triticum aestivum
  misc_feature (1)..(595): Ceres Seq. ID no. 14301686
aatcacaatctcaaacctcaaaccctaaaaaaataaaaaagagctacgtagaaagagacagagagaagaatgggtcgccaaaacgttattgtagtttttggcctcgtgttcttggccgtccttggcctcgccgcagctgcctcctctccgtctccttcagcgtcaccttccaaagctccatctacttccacacctgaggttgaatctccagtgtccgaggacaccattggaaccaccgacgacgatgtagctgcttctcctggtgatgatgacgtagctgtggctggtcctctaggaagtgactcgtcctacggtagcaatggaccttcaggctctgccgattctgctgacagcggcgcggcggctcttggagtttctgcggtcgttgcgggtgttacatccatcgtcggttctttcttgtttttctgaggcgtgtattttcatgagaatatcatttttgagtaaagactatttatatatatggatattgtgatgatcatgttgtaatttgtttctccttggttatgagaaccgatgtccttgaaataagctgaaaataaaactttccttagcaatataaaataaagaattacgg

SEQ ID NO: 61374 - protein, 119 aa, Triticum aestivum
  peptide (1)..(119): Ceres Seq. ID no. 14301687
  misc_feature (21)..(118): Homolog of NCBI NO: 25354589 NR Description: probable arabinogalactan protein AGP6
  misc_feature (21)..(118): Homolog of NCBI NO: 15241392 NR Description: arabinogalactan-protein (AGP6) [Arabidopsis
  misc_feature (1)..(119): Homolog of NCBI NO: 21536506 NR Description: unknown [Arabidopsis thaliana]
  misc_feature (1)..(119): Homolog of NCBI NO: 18404806 NR Description: expressed protein [Arabidopsis thaliana]
  misc_feature (1)..(113): Homolog of NCBI NO: 780177 NR Description: agp1 [Arabidopsis thaliana]
  misc_feature (1)..(109): Homolog of NCBI NO: 15221772 NR Description: agp1 -related [Arabidopsis thaliana]
  misc_feature (1)..(117): Homolog of NCBI NO: 25355278 NR Description: protein F21J9.18 [imported] - Arabidopsis
  misc_feature (1)..(117): Homolog of NCBI NO: 21592730 NR Description: putative agp1 [Arabidopsis thaliana]
  misc_feature (1)..(118): Homolog of NCBI NO: 486757 NR Description: anther-specific protein (clone Bgp1) - field
  misc_feature (1)..(119): Homolog of NCBI NO: 1168619 NR Description: ANTHER-SPECIFIC PROTEIN BCP1
MGRQNVIVVFGLVFLAVLGLAAAASSPSPSASPSKAPSTSTPEVESPVSEDTIGTTDDDVAASPGDDDVAVAGPLGSDSSYGSNGPSGSADSADSGAAALGVSAVVAGVTSIVGSFLFF

SEQ ID NO: 61375 - protein, 64 aa, Triticum aestivum
  peptide (1)..(64): Ceres Seq. ID no. 14301688
SQSQTSNPKKIKKSYVERDREKNGSPKRYCSFWPRVLGRPWPRRSCLLSVSFSVTFQSSIYFHT

SEQ ID NO: 61376 - DNA, 996 bp, Triticum aestivum
  misc_feature (1)..(996): Ceres Seq. ID no. 13661727
gatcctttctctcatcctcaaacgctgcaagcagcacaccacacaaaatacaaaatggctcaaaccatgctgcttacttcgggagtttctgcgaaccaattcttaaggaacaagaaccctctcgctcagcccaaagttcaccatttcttcctctcgggaaactctcatgttgttctaccatctcgaagaccatcattagtacctcttgccatcttcaaacccaaaaccaaagctgctcccaaaaaggttgagaaggtgaagccaaaggttgaagacggtatcttcggaacatctggtgggataggtttcacgaagcagaacgagctctttgtgggtcgtgttgctatgatcggtttcgctgcatcgttgctgggtgaggcgttaacagggaaaggtatattagcacagttgaatctggagacagggataccgatttacgaagcagaaccattacttctcttcttcatattgttcactctgttgggtgctatcggagctcttggggacagaggaaaattcgtcgacgatcctcccaccggacttgagaaagccgtcattcctcccggcaaaggcgtccgatctgctctcggtcttaaagaacaaggtccattgtttgggttcacgaaggcaaacgagttgttcgtaggaagattggcacagttgggaatagcattttcattgataggagagattataaccgggaaaggagccttggctcaactcaacattgagactggtattccaattcaagatattgaacccctcgtcctcttaaacgttgctttcttcttctttgctgccattaatcctggtaatggaaagttcattactgatgatggtgaagaaaggtaaactctttatgtacttaaaatttgtggtttgtgagcccatcttcatgttgagacaaaaggacatggacagcttaaactgttgtaattcttaaatcctcttgtttttacttgaattttcagattatatatagtttcacaaccacct

SEQ ID NO: 61377 - protein, 283 aa, Triticum aestivum
  peptide (1)..(283): Ceres Seq. ID no. 13661728
  misc_feature (78)..(231): Pfam Name: Chlorophyll A-B binding protein Pfam Description: Chlorophyll A-B binding protein
  misc_feature (129)..(282): Homolog of NCBI NO: 6006279 NR Description: photosystem II 22 kDa protein [Arabidopsis
  misc_feature (57)..(283): Homolog of NCBI NO: 7489520 NR Description: photosystem II 22-K chlorophyll-binding protein -
  misc_feature (19)..(282): Homolog of NCBI NO: 34908652 NR Description: putative photosystem II subunit (22KDa) precursor
  misc_feature (57)..(283): Homolog of NCBI NO: 38345525 NR Description: OSJNBa0039K24.28 [Oryza sativa (japonica
  misc_feature (19)..(282): Homolog of NCBI NO: 18203444 NR Description: Photosystem II 22 kDa protein, chloroplast
  misc_feature (19)..(282): Homolog of NCBI NO: 18202913 NR Description: Photosystem II 22 kDa protein, chloroplast
  misc_feature (19)..(282): Homolog of NCBI NO: 400890 NR Description: Photosystem II 22 kDa protein, chloroplast
  misc_feature (19)..(282): Homolog of NCBI NO: 1709846 NR Description: Photosystem II 22 kDa protein, chloroplast
  misc_feature (19)..(282): Homolog of NCBI NO: 15294226 NR Description: unknown protein [Arabidopsis thaliana]
  misc_feature (19)..(282): Homolog of NCBI NO: 15219418 NR Description: photosystem II 22kDa protein -related
DPFSHPQTLQAAHHTKYKMAQTMLLTSGVSANQFLRNKNPLAQPKVHHFFLSGNSHVVLPSRRPSLVPLAIFKPKTKAAPKKVEKVKPKVEDGIFGTSGGIGFTKQNELFVGRVAMIGFAASLLGEALTGKGILAQLNLETGIPIYEAEPLLLFFILFTLLGAIGALGDRGKFVDDPPTGLEKAVIPPGKGVRSALGLKEQGPLFGFTKANELFVGRLAQLGIAFSLIGEIITGKGALAQLNIETGIPIQDIEPLVLLNVAFFFFAAINPGNGKFITDDGEER

SEQ ID NO: 61378 - protein, 265 aa, Triticum aestivum
  peptide (1)..(265): Ceres Seq. ID no. 13661729
  misc_feature (60)..(213): Pfam Name: Chlorophyll A-B binding protein Pfam Description: Chlorophyll A-B binding protein
  misc_feature (111)..(264): Homolog of NCBI NO: 6006279 NR Description: photosystem II 22 kDa protein [Arabidopsis
  misc_feature (39)..(265): Homolog of NCBI NO: 7489520 NR Description: photosystem II 22-K chlorophyll-binding protein -
  misc_feature (1)..(264): Homolog of NCBI NO: 34908652 NR Description: putative photosystem II subunit (22KDa) precursor
  misc_feature (39)..(265): Homolog of NCBI NO: 38345525 NR Description: OSJNBa0039K24.28 [Oryza sativa (japonica
  misc_feature (1)..(264): Homolog of NCBI NO: 18203444 NR Description: Photosystem II 22 kDa protein, chloroplast
  misc_feature (1)..(264): Homolog of NCBI NO: 18202913 NR Description: Photosystem II 22 kDa protein, chloroplast
  misc_feature (1)..(264): Homolog of NCBI NO: 400890 NR Description: Photosystem II 22 kDa protein, chloroplast
  misc_feature (1)..(264): Homolog of NCBI NO: 1709846 NR Description: Photosystem II 22 kDa protein, chloroplast
  misc_feature (1)..(264): Homolog of NCBI NO: 15294226 NR Description: unknown protein [Arabidopsis thaliana]
  misc_feature (1)..(264): Homolog of NCBI NO: 15219418 NR Description: photosystem II 22kDa protein -related
MAQTMLLTSGVSANQFLRNKNPLAQPKVHHFFLSGNSHVVLPSRRPSLVPLAIFKPKTKAAPKKVEKVKPKVEDGIFGTSGGIGFTKQNELFVGRVAMIGFAASLLGEALTGKGILAQLNLETGIPIYEAEPLLLFFILFTLLGAIGALGDRGKFVDDPPTGLEKAVIPPGKGVRSALGLKEQGPLFGFTKANELFVGRLAQLGIAFSLIGEIITGKGALAQLNIETGIPIQDIEPLVLLNVAFFFFAAINPGNGKFITDDGEER

SEQ ID NO: 61379 - protein, 261 aa, Triticum aestivum
  peptide (1)..(261): Ceres Seq. ID no. 13661730
  misc_feature (56)..(209): Pfam Name: Chlorophyll A-B binding protein Pfam Description: Chlorophyll A-B binding protein
  misc_feature (107)..(260): Homolog of NCBI NO: 6006279 NR Description: photosystem II 22 kDa protein [Arabidopsis
  misc_feature (35)..(261): Homolog of NCBI NO: 7489520 NR Description: photosystem II 22-K chlorophyll-binding protein -
  misc_feature (1)..(260): Homolog of NCBI NO: 34908652 NR Description: putative photosystem II subunit (22KDa) precursor
  misc_feature (35)..(261): Homolog of NCBI NO: 38345525 NR Description: OSJNBa0039K24.28 [Oryza sativa (japonica
  misc_feature (1)..(260): Homolog of NCBI NO: 18203444 NR Description: Photosystem II 22 kDa protein, chloroplast
  misc_feature (1)..(260): Homolog of NCBI NO: 18202913 NR Description: Photosystem II 22 kDa protein, chloroplast
  misc_feature (1)..(260): Homolog of NCBI NO: 400890 NR Description: Photosystem II 22 kDa protein, chloroplast
  misc_feature (1)..(260): Homolog of NCBI NO: 1709846 NR Description: Photosystem II 22 kDa protein, chloroplast
  misc_feature (1)..(260): Homolog of NCBI NO: 15294226 NR Description: unknown protein [Arabidopsis thaliana]
  misc_feature (1)..(260): Homolog of NCBI NO: 15219418 NR Description: photosystem II 22kDa protein -related
MLLTSGVSANQFLRNKNPLAQPKVHHFFLSGNSHVVLPSRRPSLVPLAIFKPKTKAAPKKVEKVKPKVEDGIFGTSGGIGFTKQNELFVGRVAMIGFAASLLGEALTGKGILAQLNLETGIPIYEAEPLLLFFILFTLLGAIGALGDRGKFVDDPPTGLEKAVIPPGKGVRSALGLKEQGPLFGFTKANELFVGRLAQLGIAFSLIGEIITGKGALAQLNIETGIPIQDIEPLVLLNVAFFFFAAINPGNGKFITDDGEER

SEQ ID NO: 61380 - DNA, 1091 bp, Triticum aestivum
  misc_feature (1)..(1091): Ceres Seq. ID no. 14301638
ttggctacacatctttataagtggccggcatgcactccacatagcagccacgactcagtagatggcggcatcggcggcccacgtcgcggccctggccgccatactcctcttcatcccttccctcctcgccactgtcgccgcgcagcagggcaaggccaaggccttctgcatcagccagttcgccatcgccagtcaggcttgctccatcctgccgcccagccccccggaggacgaccatcaccaccaccacgacgacgatgatgatgacgacgacgacgatgacgacgacgacgacgacgacgagcaccatggcggcgacggtgaccgccgcctccgtggacgccatggccacgcggcggtcatcaacatctcgtcccttggcctgatggcggcaaacaacgacagcagcgaagttcacgttgcaagaaacggcaccggtcaccatggcggcaaccacacccgccgcgggcgcgggcgcgggcgccttcgtgctactggacgcggccggcgtgtgcgtgtgcgcgacggtgatgatgacccggaccatgaccacgaccaccaggaggaccccgaccatgatgatgaccatgaggaggactccgaccccgacgacgcccatgacgacgaacctgatgacgatgacgacgacgacgacgacgaccacgagcacaatgacgacgaccacgagcaccaccacgacgaggagcttcgggcgtaccgcgactgctgccggtggctgcaggaggtgcagaaggactgtgtgtgcgaggcgctcctgcggctgcccccgttcctcgtgaaaccacagcacaagtacgtcgtccgggtggggcggacgtgccggatcgtctaccgctgcggcggcgtgtagccaactggccggttcacacgtttggttaactgcactcgttgtccctgcttcctctctacgattacgtgcctgttttgctcttcagtctacgtagatggataattaggtaggcagcacgtatggatcgggtgtaatttttctactaagtattgtcctcaaagtttttcgatgtgcttccattcggatagactaattgataataatactacatgttgtcccg

SEQ ID NO: 61381 - protein, 269 aa, Triticum aestivum
  peptide (1)..(269): Ceres Seq. ID no. 14301639
  misc_feature (155)..(221): Pfam Name: Mpp10 protein Pfam Description: Mpp10 protein
  misc_feature (56)..(88): Homolog of NCBI NO: 35210492 NR Description: aspartic acid-rich protein aspolin1 [Theragra
  misc_feature (56)..(88): Homolog of NCBI NO: 35210492 NR Description: aspartic acid-rich protein aspolin1 [Theragra
  misc_feature (56)..(88): Homolog of NCBI NO: 35210492 NR Description: aspartic acid-rich protein aspolin1 [Theragra
  misc_feature (56)..(88): Homolog of NCBI NO: 35210492 NR Description: aspartic acid-rich protein aspolin1 [Theragra
  misc_feature (56)..(88): Homolog of NCBI NO: 35210492 NR Description: aspartic acid-rich protein aspolin1 [Theragra
  misc_feature (56)..(88): Homolog of NCBI NO: 35210492 NR Description: aspartic acid-rich protein aspolin1 [Theragra
  misc_feature (56)..(88): Homolog of NCBI NO: 35210492 NR Description: aspartic acid-rich protein aspolin1 [Theragra
  misc_feature (155)..(214): Homolog of NCBI NO: 35210492 NR Description: aspartic acid-rich protein aspolin1 [Theragra
  misc_feature (1)..(246): Homolog of NCBI NO: 23617114 NR Description: contains ESTs
  misc_feature (71)..(268): Homolog of NCBI NO: 23617114 NR Description: contains ESTs
MAASAAHVAALAAILLFIPSLLATVAAQQGKAKAFCISQFAIASQACSILPPSPPEDDHHHHHDDDDDDDDDDDDDDDDDEHHGGDGDRRLRGRHGHAAVINISSLGLMAANNDSSEVHVARNGTGHHGGNHTRRGRGRGRLRATGRGRRVRVRDGDDDPDHDHDHQEDPDHDDDHEEDSDPDDAHDDEPDDDDDDDDDDHEHNDDDHEHHHDEELRAYRDCCRWLQEVQKDCVCEALLRLPPFLVKPQHKYVVRVGRTCRIVYRCGGV

SEQ ID NO: 61382 - protein, 161 aa, Triticum aestivum
  peptide (1)..(161): Ceres Seq. ID no. 14301640
  misc_feature (47)..(113): Pfam Name: Mpp10 protein Pfam Description: Mpp10 protein
  misc_feature (47)..(107): Homolog of NCBI NO: 35210492 NR Description: aspartic acid-rich protein aspolin1 [Theragra
  misc_feature (47)..(107): Homolog of NCBI NO: 35210492 NR Description: aspartic acid-rich protein aspolin1 [Theragra
  misc_feature (47)..(107): Homolog of NCBI NO: 35210492 NR Description: aspartic acid-rich protein aspolin1 [Theragra
  misc_feature (47)..(107): Homolog of NCBI NO: 35210492 NR Description: aspartic acid-rich protein aspolin1 [Theragra
  misc_feature (47)..(107): Homolog of NCBI NO: 35210492 NR Description: aspartic acid-rich protein aspolin1 [Theragra
  misc_feature (47)..(107): Homolog of NCBI NO: 35210492 NR Description: aspartic acid-rich protein aspolin1 [Theragra
  misc_feature (47)..(107): Homolog of NCBI NO: 35210492 NR Description: aspartic acid-rich protein aspolin1 [Theragra
  misc_feature (47)..(106): Homolog of NCBI NO: 35210492 NR Description: aspartic acid-rich protein aspolin1 [Theragra
  misc_feature (1)..(138): Homolog of NCBI NO: 23617114 NR Description: contains ESTs
  misc_feature (1)..(160): Homolog of NCBI NO: 23617114 NR Description: contains ESTs
MAANNDSSEVHVARNGTGHHGGNHTRRGRGRGRLRATGRGRRVRVRDGDDDPDHDHDHQEDPDHDDDHEEDSDPDDAHDDEPDDDDDDDDDDHEHNDDDHEHHHDEELRAYRDCCRWLQEVQKDCVCEALLRLPPFLVKPQHKYVVRVGRTCRIVYRCGGV

SEQ ID NO: 61383 - DNA, 961 bp, Triticum aestivum
  misc_feature (1)..(961): Ceres Seq. ID no. 12784729
actacacgcccacccctcacccttgatcgatcacacatcaaacccctccacacgctcgcccgcgcgcgccacggacgcagcaatggccgccctcaccgcctccatcgccacctccagcgccttcgccgcgaagccgcgcctggcccgcccgccggcgcgcctctccgtctcctgctccgcgtccaacggcgacaacaacaccccctccctctccgcttccatcaagaccttctcggcggccctggcgctctcatccgtcctcctctcctccgccgcgacctccccgccgccggcggccgccgacatcgccggcctgaccccgtgcaaggagtccaaggcgttcgccaagcgggagaagcagtcggtgaagaagctcaactcgtcgctcaagaagtacgcgcccgactcggcgcccgcgctcgccatccaggccaccatcgagaagaccaagcgccggttcgagaactacggcaagttcggcctgctctgcggctccgacggcctgccccacctcatcgtcagcggcgaccagcggcactggggcgagttcatcacccccggcgtgctcttcctctacatcgcggggtggatcgggtgggtcggccgcagctacctcatcgccgtcagcggcgagaagaagcccgccatgcgggagatcatcatcgacgtcgagctcgccgccaggatcatccccaggggcttcatctggcccgtcgccgcctaccgcgagctcatcaacggcgacctcgtcgtcgacgacgccgacatcggctactaagtagctaccatgcgtgcgtggttggctagtcggtcccagatgggcagcggaggattgatgagggcttgtggtgtcgatctgcgtgggcttggtgtaggagctgataggaacatggagaaatggaagctctcttgtatttaagaaactgaacccaatcttgtataactattgtgttctctcttc

SEQ ID NO: 61384 - protein, 268 aa, Triticum aestivum
  peptide (1)..(268): Ceres Seq. ID no. 12784730
  misc_feature (118)..(264): Pfam Name: Amidohydrolase family Pfam Description: Amidohydrolase family
TTRPPLTLDRSHIKPLHTLARARHGRSNGRPHRLHRHLQRLRREAAPGPPAGAPLRLLLRVQRRQQHPLPLRFHQDLLGGPGALIRPPLLRRDLPAAGGRRHRRPDPVQGVQGVRQAGEAVGEEAQLVAQEVRARLGARARHPGHHREDQAPVRELRQVRPALRLRRPAPPHRQRRPAALGRVHHPRRALPLHRGVDRVGRPQLPHRRQRREEARHAGDHHRRRARRQDHPQGLHLARRRLPRAHQRRPRRRRRRHRLLSSYHACVVG

SEQ ID NO: 61385 - protein, 258 aa, Triticum aestivum
  peptide (1)..(258): Ceres Seq. ID no. 12784731
  misc_feature (76)..(254): Pfam Name: Photosystem I reaction centre subunit III Pfam Description: Photosystem I reaction centre subunit III
  misc_feature (53)..(250): Homolog of NCBI NO: 131187 NR Description: Photosystem I reaction centre subunit III,
  misc_feature (55)..(250): Homolog of NCBI NO: 1172664 NR Description: Photosystem I reaction centre subunit III,
  misc_feature (31)..(250): Homolog of NCBI NO: 30013659 NR Description: putative photosystem I subunit III precursor
  misc_feature (64)..(253): Homolog of NCBI NO: 5734518 NR Description: photosystem I subunit III precursor [Arabidopsis
  misc_feature (50)..(253): Homolog of NCBI NO: 15450361 NR Description: At1g31330/T19E23_1 [Arabidopsis thaliana]
  misc_feature (50)..(253): Homolog of NCBI NO: 15221681 NR Description: photosystem I subunit III precursor, putative
  misc_feature (30)..(253): Homolog of NCBI NO: 8954295 NR Description: photosystem I reaction center subunit III [Vigna
  misc_feature (28)..(258): Homolog of NCBI NO: 3885892 NR Description: photosystem-1 F subunit precursor [Oryza sativa]
  misc_feature (28)..(258): Homolog of NCBI NO: 34897038 NR Description: photosystem-1 F subunit precursor
  misc_feature (28)..(258): Homolog of NCBI NO: 548604 NR Description: Photosystem I reaction centre subunit III,
LHAHPSPLIDHTSNPSTRSPARATDAAMAALTASIATSSAFAAKPRLARPPARLSVSCSASNGDNNTPSLSASIKTFSAALALSSVLLSSAATSPPPAAADIAGLTPCKESKAFAKREKQSVKKLNSSLKKYAPDSAPALAIQATIEKTKRRFENYGKFGLLCGSDGLPHLIVSGDQRHWGEFITPGVLFLYIAGWIGWVGRSYLIAVSGEKKPAMREIIIDVELAARIIPRGFIWPVAAYRELINGDLVVDDADIGY

SEQ ID NO: 61386 - protein, 231 aa, Triticum aestivum
  peptide (1)..(231): Ceres Seq. ID no. 12784732
  misc_feature (49)..(227): Pfam Name: Photosystem I reaction centre subunit III Pfam Description: Photosystem I reaction centre subunit III
  misc_feature (26)..(223): Homolog of NCBI NO: 131187 NR Description: Photosystem I reaction centre subunit III,
  misc_feature (28)..(223): Homolog of NCBI NO: 1172664 NR Description: Photosystem I reaction centre subunit III,
  misc_feature (4)..(223): Homolog of NCBI NO: 30013659 NR Description: putative photosystem I subunit III precursor
  misc_feature (37)..(226): Homolog of NCBI NO: 5734518 NR Description: photosystem I subunit III precursor [Arabidopsis
  misc_feature (23)..(226): Homolog of NCBI NO: 15450361 NR Description: At1g31330/T19E23_1 [Arabidopsis thaliana]
  misc_feature (23)..(226): Homolog of NCBI NO: 15221681 NR Description: photosystem I subunit III precursor, putative
  misc_feature (3)..(226): Homolog of NCBI NO: 8954295 NR Description: photosystem I reaction center subunit III [Vigna
  misc_feature (1)..(231): Homolog of NCBI NO: 3885892 NR Description: photosystem-1 F subunit precursor [Oryza sativa]
  misc_feature (1)..(231): Homolog of NCBI NO: 34897038 NR Description: photosystem-1 F subunit precursor
  misc_feature (1)..(231): Homolog of NCBI NO: 548604 NR Description: Photosystem I reaction centre subunit III,
MAALTASIATSSAFAAKPRLARPPARLSVSCSASNGDNNTPSLSASIKTFSAALALSSVLLSSAATSPPPAAADIAGLTPCKESKAFAKREKQSVKKLNSSLKKYAPDSAPALAIQATIEKTKRRFENYGKFGLLCGSDGLPHLIVSGDQRHWGEFITPGVLFLYIAGWIGWVGRSYLIAVSGEKKPAMREIIIDVELAARIIPRGFIWPVAAYRELINGDLVVDDADIGY

SEQ ID NO: 61387 - DNA, 981 bp, Triticum aestivum
  misc_feature (1)..(981): Ceres Seq. ID no. 13661434
agaacatcctaatcgaaaaactaccagcaggtccagcgccaccatcgccctacccctacgcccccacagcaacacgagaaaaccaccgcaagcacgcgccccgctccgccccgagacgcgacggtggaatccggcaggcacgggcacgagcaggcgtgcggacacatagcccgagcgcgcgcgatggcagtcggagggcggcgcgcggcggcggcggcgtgcgggcgctggtgcctggtgatcctcgccgtggcctccgcgctcggcgtctccgggcccgcgctctactggcgctacaagaagggcttctcctcccccgcctccggcgctgccgccgtctccgcaccctcctgcccgccctgcacctgcgactgcccgccgccgctctccctccagtccatcgcgccagggctcatgaacttctcaatttcagcttgcggcacaaatgaccctgagcgtaccaaggagatggcgaagcagtttgttgatctcctcaacgaggaactcaagctgcagcaggttgtagctgaggagcacatccatcacatgaatgccacacttgtcgaggcaaaaaggcaggctaccctgtaccagcgagaggcggagaagtgtaacgcggccacagagacttgtgaggaagccagggagaagtctgagggggcaatctcaaaggagaggaaactgacagcactgtgggaacgtcgagctcgcgaattgggttggcaggattctcgagccgcgaccaccgcacgatagcttggcaagcagtttgcttctgcaggtaaaagtatttgcagcaggcggcattttaccacaccgagcaatgttagctgtatgggtccacgtgtaatgtttgccagtgtatgactatgagttgtcccagttgaagtatagttactctagacactgtagattccttataaatgtaactagtatacattgtttaaatatgcaagctttatattgaagacaaaaaaaaaa

SEQ ID NO: 61388 - protein, 190 aa, Triticum aestivum
  peptide (1)..(190): Ceres Seq. ID no. 13661435
  misc_feature (13)..(181): Pfam Name: Protein of unknown function (DUF1068) Pfam Description: Protein of unknown function (DUF1068)
  misc_feature (18)..(182): Homolog of NCBI NO: 25364108 NR Description: hypothetical protein [imported] - Arabidopsis
  misc_feature (6)..(182): Homolog of NCBI NO: 18390477 NR Description: expressed protein [Arabidopsis thaliana]
  misc_feature (18)..(190): Homolog of NCBI NO: 21553781 NR Description: unknown [Arabidopsis thaliana]
  misc_feature (18)..(190): Homolog of NCBI NO: 18403016 NR Description: expressed protein [Arabidopsis thaliana]
  misc_feature (15)..(190): Homolog of NCBI NO: 27922919 NR Description: unknown protein [Phytophthora sojae]
  misc_feature (13)..(181): Homolog of NCBI NO: 25407700 NR Description: hypothetical protein AT4g30990 [imported] -
  misc_feature (17)..(181): Homolog of NCBI NO: 25364110 NR Description: hypothetical protein At2g24290 [imported] -
  misc_feature (13)..(181): Homolog of NCBI NO: 18400504 NR Description: expressed protein [Arabidopsis thaliana]
  misc_feature (13)..(181): Homolog of NCBI NO: 18417716 NR Description: expressed protein [Arabidopsis thaliana]
  misc_feature (5)..(188): Homolog of NCBI NO: 38345038 NR Description: OSJNBa0029H02.22 [Oryza sativa (japonica
MAVGGRRAAAAACGRWCLVILAVASALGVSGPALYWRYKKGFSSPASGAAAVSAPSCPPCTCDCPPPLSLQSIAPGLMNFSISACGTNDPERTKEMAKQFVDLLNEELKLQQVVAEEHIHHMNATLVEAKRQATLYQREAEKCNAATETCEEAREKSEGAISKERKLTALWERRARELGWQDSRAATTAR

SEQ ID NO: 61389 - protein, 148 aa, Triticum aestivum
  peptide (1)..(148): Ceres Seq. ID no. 13661436
NILIEKLPAGPAPPSPYPYAPTATRENHRKHAPRSAPRRDGGIRQARARAGVRTHSPSARDGSRRAARGGGGVRALVPGDPRRGLRARRLRARALLALQEGLLLPRLRRCRRLRTLLPALHLRLPAAALPPVHRARAHELLNFSLRHK

SEQ ID NO: 61390 - protein, 113 aa, Triticum aestivum
  peptide (1)..(113): Ceres Seq. ID no. 13661437
  misc_feature (1)..(104): Pfam Name: Protein of unknown function (DUF1068) Pfam Description: Protein of unknown function (DUF1068)
  misc_feature (1)..(105): Homolog of NCBI NO: 25364108 NR Description: hypothetical protein [imported] - Arabidopsis
  misc_feature (1)..(105): Homolog of NCBI NO: 18390477 NR Description: expressed protein [Arabidopsis thaliana]
  misc_feature (1)..(113): Homolog of NCBI NO: 21553781 NR Description: unknown [Arabidopsis thaliana]
  misc_feature (1)..(113): Homolog of NCBI NO: 18403016 NR Description: expressed protein [Arabidopsis thaliana]
  misc_feature (1)..(113): Homolog of NCBI NO: 27922919 NR Description: unknown protein [Phytophthora sojae]
  misc_feature (1)..(104): Homolog of NCBI NO: 25407700 NR Description: hypothetical protein AT4g30990 [imported] -
  misc_feature (1)..(104): Homolog of NCBI NO: 25364110 NR Description: hypothetical protein At2g24290 [imported] -
  misc_feature (1)..(104): Homolog of NCBI NO: 18400504 NR Description: expressed protein [Arabidopsis thaliana]
  misc_feature (1)..(104): Homolog of NCBI NO: 18417716 NR Description: expressed protein [Arabidopsis thaliana]
  misc_feature (1)..(111): Homolog of NCBI NO: 38345038 NR Description: OSJNBa0029H02.22 [Oryza sativa (japonica
MNFSISACGTNDPERTKEMAKQFVDLLNEELKLQQVVAEEHIHHMNATLVEAKRQATLYQREAEKCNAATETCEEAREKSEGAISKERKLTALWERRARELGWQDSRAATTAR

SEQ ID NO: 61391 - DNA, 922 bp, Triticum aestivum
  misc_feature (1)..(922): Ceres Seq. ID no. 15225738
aaggttcttgatttgtggtacagactagaaagctttatcctgccatgtcagggacctctttcaccggcgcgccggcgtcagatgcccccctggctccgtacccgcggcagcagaactacagcttcaacgggcgcgtcctgcttatggccgccttcctccttttcgggctcaccatcttcttcaccctcatccgcttcttgctgtacgtgttagtggcgcggtctggcggccgccgtcgccgcggcagcttcaccgccggcatcctgcggtccatcaactcgtttggcggaactagcggccggcgtgggctggacgcctccgcgctctccgcgctgccggtcaccgcgtaccggaaggagggcgccgccaccgccggggctgactgcgccgtgtgcctgtcggagctcgccgacggagaaaaggtgcgggagctgcccaactgcgggcactcgttccacgtggagtgcgtcgacgcatggctgcgctccaggacgacctgccctctctgccgcgccgaggctgagctgcccaaggggaacggcaaggcggaggtggcggcgcagtcgtcgtcgtcctccccctcatcctctgccagggagccgccgcaacaggcgttgttcgtgggaggaggaaccttgatcgtgaccgtgcaaggtggcttcccggatacgcaaaggggcgtgcgtgggtcaacatcggggtaggaggtcagtccggatcttcctattcctaaattgcagcgaagtttcgaagaaggctacagcgacagatgcatatactgtaggttagaccgttgttcacggcgtgcacaagttggatacaatcatacaaaacacctctgtttgagcgaaagtcacccatttgtttgtttgtttgttgtatttcgaggagagcatataagaaactcatatgttgttaattc

SEQ ID NO: 61392 - protein, 219 aa, Triticum aestivum
  peptide (1)..(219): Ceres Seq. ID no. 15225739
  misc_feature (114)..(155): Pfam Name: Zinc finger, C3HC4 type (RING finger) Pfam Description: Zinc finger, C3HC4 type (RING finger)
  misc_feature (24)..(175): Homolog of NCBI NO: 34907968 NR Description: P0446G04.15 [Oryza sativa (japonica
  misc_feature (19)..(160): Homolog of NCBI NO: 15227929 NR Description: RING zinc finger protein -related [Arabidopsis
  misc_feature (61)..(195): Homolog of NCBI NO: 30017522 NR Description: putative ring-H2 zinc finger protein
  misc_feature (1)..(162): Homolog of NCBI NO: 8698833 NR Description: EL5 [Oryza sativa (japonica cultivar-group)]
  misc_feature (22)..(157): Homolog of NCBI NO: 18092342 NR Description: ring-H2 zinc finger protein [Zea mays]
  misc_feature (10)..(184): Homolog of NCBI NO: 34894514 NR Description: P0551A11.21 [Oryza sativa (japonica
  misc_feature (22)..(157): Homolog of NCBI NO: 21645888 NR Description: ring-H2 zinc finger protein [Zea mays]
  misc_feature (5)..(187): Homolog of NCBI NO: 38569180 NR Description: OSJNBa0086B14.4 [Oryza sativa (japonica
  misc_feature (20)..(190): Homolog of NCBI NO: 34903920 NR Description: OSJNBa0038J17.5 [Oryza sativa (japonica
  misc_feature (1)..(205): Homolog of NCBI NO: 34903936 NR Description: OSJNBa0038J17.13 [Oryza sativa (japonica
MSGTSFTGAPASDAPLAPYPRQQNYSFNGRVLLMAAFLLFGLTIFFTLIRFLLYVLVARSGGRRRRGSFTAGILRSINSFGGTSGRRGLDASALSALPVTAYRKEGAATAGADCAVCLSELADGEKVRELPNCGHSFHVECVDAWLRSRTTCPLCRAEAELPKGNGKAEVAAQSSSSSPSSSAREPPQQALFVGGGTLIVTVQGGFPDTQRGVRGSTSG

SEQ ID NO: 61393 - protein, 186 aa, Triticum aestivum
  peptide (1)..(186): Ceres Seq. ID no. 15225740
  misc_feature (81)..(122): Pfam Name: Zinc finger, C3HC4 type (RING finger) Pfam Description: Zinc finger, C3HC4 type (RING finger)
  misc_feature (1)..(142): Homolog of NCBI NO: 34907968 NR Description: P0446G04.15 [Oryza sativa (japonica
  misc_feature (1)..(127): Homolog of NCBI NO: 15227929 NR Description: RING zinc finger protein -related [Arabidopsis
  misc_feature (28)..(162): Homolog of NCBI NO: 30017522 NR Description: putative ring-H2 zinc finger protein
  misc_feature (1)..(129): Homolog of NCBI NO: 8698833 NR Description: EL5 [Oryza sativa (japonica cultivar-group)]
  misc_feature (1)..(124): Homolog of NCBI NO: 18092342 NR Description: ring-H2 zinc finger protein [Zea mays]
  misc_feature (1)..(151): Homolog of NCBI NO: 34894514 NR Description: P0551A11.21 [Oryza sativa (japonica
  misc_feature (1)..(124): Homolog of NCBI NO: 21645888 NR Description: ring-H2 zinc finger protein [Zea mays]
  misc_feature (1)..(154): Homolog of NCBI NO: 38569180 NR Description: OSJNBa0086B14.4 [Oryza sativa (japonica
  misc_feature (1)..(157): Homolog of NCBI NO: 34903920 NR Description: OSJNBa0038J17.5 [Oryza sativa (japonica
  misc_feature (1)..(172): Homolog of NCBI NO: 34903936 NR Description: OSJNBa0038J17.13 [Oryza sativa (japonica
MAAFLLFGLTIFFTLIRFLLYVLVARSGGRRRRGSFTAGILRSINSFGGTSGRRGLDASALSALPVTAYRKEGAATAGADCAVCLSELADGEKVRELPNCGHSFHVECVDAWLRSRTTCPLCRAEAELPKGNGKAEVAAQSSSSSPSSSAREPPQQALFVGGGTLIVTVQGGFPDTQRGVRGSTSG

SEQ ID NO: 61394 - DNA, 964 bp, Triticum aestivum
  misc_feature (1)..(964): Ceres Seq. ID no. 14301656
atttctttcttgtgatcaatctacctatctatctgcttctgcttcttcttcttcttcttcttaacactgaacgacaatgtggcttgggatctccatctccaagcaaggacaaggacaaggacaaggagcggcggctgtagcagtggtcgccatgctcggcctctgcaccatatccatacccatgtcgatgctgcctctcgccgcacccaccatccaccacgaaggaggcgctcaaggcggaagggggaacccaaacccagccaacgcgctggtggcgctggtgaacgccgaccgggcagccgccaagctacccgccctccgcaccaccaagggcctcggctgcatggcgctgcagtgcatcgcccgctgcctcgccctctcccccgccaccgcctgcgccgccgacggcacgctggcgccgccctgccacccgccggagactgacatcaccgaggtctacgccgccaactgcggggtcgagctgcccacggtcgacgtcgtctccggccgcatcctcggctgcagcagccaaagctccgacggcgtcagcggggacgcgctccacatggccaacgccaccgtggtgcgtggcagggagcacgcgcaggtgggcgccggcgtcgaccgcggcggcttctggtgcctcctcttcagcagcggcagccccaactccagcttccagctggaggccgccggcaggggcatcgcccagcagcacggctgcttcagcgaccccgacgccaccctctcctgcaccacctccgccggccaccaccaaaccagacgactcaccgccggagtcacgtcctttgccttggctgcttccactctgcttttcctcctctagtctagtctagtaatgaataagctagcagagacaccctagaagatactagtattactcggacttgtaactttgctattcaaacagtctgtcagtcagtgatgagtgtgatcatttttc

SEQ ID NO: 61395 - protein, 256 aa, Triticum aestivum
  peptide (1)..(256): Ceres Seq. ID no. 14301657
  misc_feature (60)..(238): Homolog of NCBI NO: 30678256 NR Description: expressed protein [Arabidopsis thaliana]
MWLGISISKQGQGQGQGAAAVAVVAMLGLCTISIPMSMLPLAAPTIHHEGGAQGGRGNPNPANALVALVNADRAAAKLPALRTTKGLGCMALQCIARCLALSPATACAADGTLAPPCHPPETDITEVYAANCGVELPTVDVVSGRILGCSSQSSDGVSGDALHMANATVVRGREHAQVGAGVDRGGFWCLLFSSGSPNSSFQLEAAGRGIAQQHGCFSDPDATLSCTTSAGHHQTRRLTAGVTSFALAASTLLFLL

SEQ ID NO: 61396 - protein, 231 aa, Triticum aestivum
  peptide (1)..(231): Ceres Seq. ID no. 14301658
  misc_feature (35)..(213): Homolog of NCBI NO: 30678256 NR Description: expressed protein [Arabidopsis thaliana]
MLGLCTISIPMSMLPLAAPTIHHEGGAQGGRGNPNPANALVALVNADRAAAKLPALRTTKGLGCMALQCIARCLALSPATACAADGTLAPPCHPPETDITEVYAANCGVELPTVDVVSGRILGCSSQSSDGVSGDALHMANATVVRGREHAQVGAGVDRGGFWCLLFSSGSPNSSFQLEAAGRGIAQQHGCFSDPDATLSCTTSAGHHQTRRLTAGVTSFALAASTLLFLL

SEQ ID NO: 61397 - protein, 221 aa, Triticum aestivum
  peptide (1)..(221): Ceres Seq. ID no. 14301659
  misc_feature (25)..(203): Homolog of NCBI NO: 30678256 NR Description: expressed protein [Arabidopsis thaliana]
MSMLPLAAPTIHHEGGAQGGRGNPNPANALVALVNADRAAAKLPALRTTKGLGCMALQCIARCLALSPATACAADGTLAPPCHPPETDITEVYAANCGVELPTVDVVSGRILGCSSQSSDGVSGDALHMANATVVRGREHAQVGAGVDRGGFWCLLFSSGSPNSSFQLEAAGRGIAQQHGCFSDPDATLSCTTSAGHHQTRRLTAGVTSFALAASTLLFLL

SEQ ID NO: 61398 - DNA, 766 bp, Triticum aestivum
  misc_feature (1)..(766): Ceres Seq. ID no. 13661756
attacgatttagagggagggaggaagaagaatcagatcggagaaaatgacaatgacgacgtcgatgatacagaggctgttcacgcaaggcaccaagntcgtctgcgtcgggcgtaactacgccgctcacgccaaagaactaggcaacgccgttcccaaggaaccagttatattcttaaagccgacgtcatcatacttagagaacggaggaacgattgagattccacatcctctagaatcactccatcatgaggtggagctcgctgtagtgatgggagagaaggctagagatgtacccgaggcaaccgccatggattacattggaggatatgcggttgctcttgatatgactgctagggaactccaagctactgccaaggcatctggtctcccttggactcttgctaaaggacaggatactttcactccaataagctctgttctgccaaaggcgatggtgcatgatcctgataacctagaactttggctgaaggttgatggtgaaacaagacagaagggtttgacaaaagatatgatcttcaaggttccgtacctcatcagctacataagctctataatgactctctacgaaggagatgtcatcttgacaggtacgccagaaggtgttggacctgtaaagataggacagaagataaccgcagggatcactggtctatctgaagttcagttcgatgttgataggcgtctaaagcctttgagttaattgttttgtttgtgtttcatataatactattaataaaaatgtt

SEQ ID NO: 61399 - protein, 225 aa, Triticum aestivum
  peptide (1)..(225): Ceres Seq. ID no. 13661757
  misc_feature (32)..(199): Pfam Name: Fumarylacetoacetate (FAA) hydrolase family Pfam Description: Fumarylacetoacetate (FAA) hydrolase family
  misc_feature (8)..(213): Homolog of NCBI NO: 38648928 NR Description: Unknown (protein for MGC:74876) [Homo sapiens]
  misc_feature (8)..(219): Homolog of NCBI NO: 14336767 NR Description: similar to homoprotocatechuate catabolism
  misc_feature (8)..(219): Homolog of NCBI NO: 13654274 NR Description: hypothetical protein DKFZp566J2046 [Homo sapiens]
  misc_feature (8)..(217): Homolog of NCBI NO: 28829830 NR Description: similar to Arabidopsis thaliana (Mouse-ear
  misc_feature (9)..(189): Homolog of NCBI NO: 28372682 NR Description: putative isomerase [Oryza sativa (japonica
  misc_feature (9)..(225): Homolog of NCBI NO: 34897304 NR Description: putative hydroxylase [Oryza sativa]
  misc_feature (3)..(188): Homolog of NCBI NO: 7485073 NR Description: hypothetical protein - Arabidopsis thaliana
  misc_feature (3)..(224): Homolog of NCBI NO: 15228286 NR Description: decarboxilase -related [Arabidopsis thaliana]
  misc_feature (3)..(225): Homolog of NCBI NO: 15234757 NR Description: isomerase like protein [Arabidopsis thaliana]
  misc_feature (3)..(225): Homolog of NCBI NO: 16209656 NR Description: AT4g15940/dl4011w [Arabidopsis thaliana]
  misc_feature (18)..(18): Xaa is any aa, unknown or other
MTMTTSMIQRLFTQGTKXVCVGRNYAAHAKELGNAVPKEPVIFLKPTSSYLENGGTIEIPHPLESLHHEVELAVVMGEKARDVPEATAMDYIGGYAVALDMTARELQATAKASGLPWTLAKGQDTFTPISSVLPKAMVHDPDNLELWLKVDGETRQKGLTKDMIFKVPYLISYISSIMTLYEGDVILTGTPEGVGPVKIGQKITAGITGLSEVQFDVDRRLKPLS

SEQ ID NO: 61400 - protein, 223 aa, Triticum aestivum
  peptide (1)..(223): Ceres Seq. ID no. 13661758
  misc_feature (30)..(197): Pfam Name: Fumarylacetoacetate (FAA) hydrolase family Pfam Description: Fumarylacetoacetate (FAA) hydrolase family
  misc_feature (6)..(211): Homolog of NCBI NO: 38648928 NR Description: Unknown (protein for MGC:74876) [Homo sapiens]
  misc_feature (6)..(217): Homolog of NCBI NO: 14336767 NR Description: similar to homoprotocatechuate catabolism
  misc_feature (6)..(217): Homolog of NCBI NO: 13654274 NR Description: hypothetical protein DKFZp566J2046 [Homo sapiens]
  misc_feature (6)..(215): Homolog of NCBI NO: 28829830 NR Description: similar to Arabidopsis thaliana (Mouse-ear
  misc_feature (7)..(187): Homolog of NCBI NO: 28372682 NR Description: putative isomerase [Oryza sativa (japonica
  misc_feature (7)..(223): Homolog of NCBI NO: 34897304 NR Description: putative hydroxylase [Oryza sativa]
  misc_feature (1)..(186): Homolog of NCBI NO: 7485073 NR Description: hypothetical protein - Arabidopsis thaliana
  misc_feature (1)..(222): Homolog of NCBI NO: 15228286 NR Description: decarboxilase -related [Arabidopsis thaliana]
  misc_feature (1)..(223): Homolog of NCBI NO: 15234757 NR Description: isomerase like protein [Arabidopsis thaliana]
  misc_feature (1)..(223): Homolog of NCBI NO: 16209656 NR Description: AT4g15940/dl4011w [Arabidopsis thaliana]
  misc_feature (16)..(16): Xaa is any aa, unknown or other
MTTSMIQRLFTQGTKXVCVGRNYAAHAKELGNAVPKEPVIFLKPTSSYLENGGTIEIPHPLESLHHEVELAVVMGEKARDVPEATAMDYIGGYAVALDMTARELQATAKASGLPWTLAKGQDTFTPISSVLPKAMVHDPDNLELWLKVDGETRQKGLTKDMIFKVPYLISYISSIMTLYEGDVILTGTPEGVGPVKIGQKITAGITGLSEVQFDVDRRLKPLS

SEQ ID NO: 61401 - protein, 219 aa, Triticum aestivum
  peptide (1)..(219): Ceres Seq. ID no. 13661759
  misc_feature (26)..(193): Pfam Name: Fumarylacetoacetate (FAA) hydrolase family Pfam Description: Fumarylacetoacetate (FAA) hydrolase family
  misc_feature (2)..(207): Homolog of NCBI NO: 38648928 NR Description: Unknown (protein for MGC:74876) [Homo sapiens]
  misc_feature (2)..(213): Homolog of NCBI NO: 14336767 NR Description: similar to homoprotocatechuate catabolism
  misc_feature (2)..(213): Homolog of NCBI NO: 13654274 NR Description: hypothetical protein DKFZp566J2046 [Homo sapiens]
  misc_feature (2)..(211): Homolog of NCBI NO: 28829830 NR Description: similar to Arabidopsis thaliana (Mouse-ear
  misc_feature (3)..(183): Homolog of NCBI NO: 28372682 NR Description: putative isomerase [Oryza sativa (japonica
  misc_feature (3)..(219): Homolog of NCBI NO: 34897304 NR Description: putative hydroxylase [Oryza sativa]
  misc_feature (1)..(182): Homolog of NCBI NO: 7485073 NR Description: hypothetical protein - Arabidopsis thaliana
  misc_feature (1)..(218): Homolog of NCBI NO: 15228286 NR Description: decarboxilase -related [Arabidopsis thaliana]
  misc_feature (1)..(219): Homolog of NCBI NO: 15234757 NR Description: isomerase like protein [Arabidopsis thaliana]
  misc_feature (1)..(219): Homolog of NCBI NO: 16209656 NR Description: AT4g15940/dl4011w [Arabidopsis thaliana]
  misc_feature (12)..(12): Xaa is any aa, unknown or other
MIQRLFTQGTKXVCVGRNYAAHAKELGNAVPKEPVIFLKPTSSYLENGGTIEIPHPLESLHHEVELAVVMGEKARDVPEATAMDYIGGYAVALDMTARELQATAKASGLPWTLAKGQDTFTPISSVLPKAMVHDPDNLELWLKVDGETRQKGLTKDMIFKVPYLISYISSIMTLYEGDVILTGTPEGVGPVKIGQKITAGITGLSEVQFDVDRRLKPLS

SEQ ID NO: 61402 - DNA, 559 bp, Triticum aestivum
  misc_feature (1)..(559): Ceres Seq. ID no. 12624623
atggctagggaagttcttaccaggtttgcagctgagatttggccattactttgttacctgctgtagctttttgtcagccgtatttagcccctactttcaagtatgcctgaacatatgatgtcaactcccaggttcccagacatagcatccgttcagcttaggatgccaaacctccactttcttcccgtgaacctaggggggaaagaaaatccaggattggtgaagtttgctgatgatgtgtacatgccgactgacgagccgcatggaaccatcgaagcaacgttgagccgtgccaactcaaagctgtaatttcacttgatgcttgtggccaggctcatgatttggtttggtttcttgaagatcacaatcgccaataaacaaagtgatagggggaaagctagcacaaccaccccttgcaaaagggtaaaaggacgtaaactttgcatatgtattcagctaattgacttgtacatggctagctagagttcccccatcgtaaattttactgttgtacaaaaccttcaatgtttcgttgtctccacaatgctataatatagcc

SEQ ID NO: 61403 - protein, 68 aa, Triticum aestivum
  peptide (1)..(68): Ceres Seq. ID no. 12624624
  misc_feature (10)..(68): Homolog of NCBI NO: 170031 NR Description: nodulin 35
  misc_feature (10)..(68): Homolog of NCBI NO: 6175091 NR Description: Uricase II (Urate oxidase) (Nodule specific
  misc_feature (10)..(68): Homolog of NCBI NO: 4996848 NR Description: uricase (Nod-35) [Medicago sativa]
  misc_feature (10)..(68): Homolog of NCBI NO: 4996846 NR Description: uricase (Nod-35) [Medicago sativa]
  misc_feature (10)..(68): Homolog of NCBI NO: 7242493 NR Description: urate oxidase [Cicer arietinum]
  misc_feature (10)..(68): Homolog of NCBI NO: 11414898 NR Description: uricase [Lotus japonicus]
  misc_feature (10)..(68): Homolog of NCBI NO: 15225267 NR Description: putative uricase subunit
  misc_feature (10)..(68): Homolog of NCBI NO: 6175090 NR Description: Uricase (Urate oxidase) (Nodulin 35 homolog)
  misc_feature (10)..(68): Homolog of NCBI NO: 34908558 NR Description: putative uricase [Oryza sativa (japonica
MPEHMMSTPRFPDIASVQLRMPNLHFLPVNLGGKENPGLVKFADDVYMPTDEPHGTIEATLSRANSKL

SEQ ID NO: 61404 - protein, 64 aa, Triticum aestivum
  peptide (1)..(64): Ceres Seq. ID no. 12624625
  misc_feature (6)..(64): Homolog of NCBI NO: 170031 NR Description: nodulin 35
  misc_feature (6)..(64): Homolog of NCBI NO: 6175091 NR Description: Uricase II (Urate oxidase) (Nodule specific
  misc_feature (6)..(64): Homolog of NCBI NO: 4996848 NR Description: uricase (Nod-35) [Medicago sativa]
  misc_feature (6)..(64): Homolog of NCBI NO: 4996846 NR Description: uricase (Nod-35) [Medicago sativa]
  misc_feature (6)..(64): Homolog of NCBI NO: 7242493 NR Description: urate oxidase [Cicer arietinum]
  misc_feature (6)..(64): Homolog of NCBI NO: 11414898 NR Description: uricase [Lotus japonicus]
  misc_feature (6)..(64): Homolog of NCBI NO: 15225267 NR Description: putative uricase subunit
  misc_feature (6)..(64): Homolog of NCBI NO: 6175090 NR Description: Uricase (Urate oxidase) (Nodulin 35 homolog)
  misc_feature (6)..(64): Homolog of NCBI NO: 34908558 NR Description: putative uricase [Oryza sativa (japonica
MMSTPRFPDIASVQLRMPNLHFLPVNLGGKENPGLVKFADDVYMPTDEPHGTIEATLSRANSKL

SEQ ID NO: 61405 - protein, 63 aa, Triticum aestivum
  peptide (1)..(63): Ceres Seq. ID no. 12624626
  misc_feature (5)..(63): Homolog of NCBI NO: 170031 NR Description: nodulin 35
  misc_feature (5)..(63): Homolog of NCBI NO: 6175091 NR Description: Uricase II (Urate oxidase) (Nodule specific
  misc_feature (5)..(63): Homolog of NCBI NO: 4996848 NR Description: uricase (Nod-35) [Medicago sativa]
  misc_feature (5)..(63): Homolog of NCBI NO: 4996846 NR Description: uricase (Nod-35) [Medicago sativa]
  misc_feature (5)..(63): Homolog of NCBI NO: 7242493 NR Description: urate oxidase [Cicer arietinum]
  misc_feature (5)..(63): Homolog of NCBI NO: 11414898 NR Description: uricase [Lotus japonicus]
  misc_feature (5)..(63): Homolog of NCBI NO: 15225267 NR Description: putative uricase subunit
  misc_feature (5)..(63): Homolog of NCBI NO: 6175090 NR Description: Uricase (Urate oxidase) (Nodulin 35 homolog)
  misc_feature (5)..(63): Homolog of NCBI NO: 34908558 NR Description: putative uricase [Oryza sativa (japonica
MSTPRFPDIASVQLRMPNLHFLPVNLGGKENPGLVKFADDVYMPTDEPHGTIEATLSRANSKL

SEQ ID NO: 61406 - DNA, 747 bp, Triticum aestivum
  misc_feature (1)..(747): Ceres Seq. ID no. 13661682
atcgcaactcgcagcagttcaatacttgcacaaccatacacatcacacatcacctgtagatcgaccggtgcacgtaaggcgcgacaatggagtaccaggggcagaccggccacgccaccgacaaggtggaggagtacggccagcccgtggccgggcacggcggcgccaccgacggccccacggggacgcacggcgccgcagccgccgcgggcaccgggcagctccagccgaccagggacgaccacaagaccgacggtgtcctgcgccgctccggcagctccagctccagctcgtctgaggacgacggcgttggcgggaggaggaagaaggggatgaaggagaagatcaaggagaagctccccggcggagcccacaaggacgccaccgggcagcagcacacgccggcggccggcgagtacgccggcaccggcaccggcacccacggcgcggaggccaccggcgagaagaaaggcgtcatggacaagatcaaggagaagcttcccggcggacagcactaagttaagctaggcagctagcgatcgccctgtgctgtgtctgtgttcggtcaaagctcggtatcatgcgtacttctgcatgcgttcgtacggataaataatgggcgccgatcgaggtgccggagtatatatgttgtgtgtgtgacgtatttgtggaccccgtgtacatgtatttgtactgaagtgctaaaaccccatcgtaataaagcgctcgtttatatttgtgttttgt

SEQ ID NO: 61407 - protein, 143 aa, Triticum aestivum
  peptide (1)..(143): Ceres Seq. ID no. 13661683
  misc_feature (11)..(143): Pfam Name: Dehydrin Pfam Description: Dehydrin
  misc_feature (1)..(143): Homolog of NCBI NO: 118484 NR Description: DEHYDRIN DHN1 (M3) (RAB-17 PROTEIN)
  misc_feature (1)..(143): Homolog of NCBI NO: 1181292 NR Description: dehydrin [Triticum turgidum subsp. durum]
  misc_feature (1)..(143): Homolog of NCBI NO: 82684 NR Description: dehydrin 3 - maize
  misc_feature (1)..(143): Homolog of NCBI NO: 2970213 NR Description: dehydrin-/LEA group 2-like protein [Lophopyrum
  misc_feature (1)..(143): Homolog of NCBI NO: 7442078 NR Description: dehydrin - barley
  misc_feature (1)..(143): Homolog of NCBI NO: 421976 NR Description: dehydrin 7 - barley
  misc_feature (1)..(143): Homolog of NCBI NO: 118483 NR Description: DEHYDRIN DHN1 (B8)
  misc_feature (1)..(143): Homolog of NCBI NO: 4105105 NR Description: dehydrin 2 [Hordeum vulgare]
  misc_feature (1)..(143): Homolog of NCBI NO: 118486 NR Description: DEHYDRIN DHN2 (B9)
  misc_feature (1)..(143): Homolog of NCBI NO: 6017930 NR Description: dehydrin; Dhn2 [Hordeum vulgare]
MEYQGQTGHATDKVEEYGQPVAGHGGATDGPTGTHGAAAAAGTGQLQPTRDDHKTDGVLRRSGSSSSSSSEDDGVGGRRKKGMKEKIKEKLPGGAHKDATGQQHTPAAGEYAGTGTGTHGAEATGEKKGVMDKIKEKLPGGQH

SEQ ID NO: 61408 - protein, 111 aa, Triticum aestivum
  peptide (1)..(111): Ceres Seq. ID no. 13661684
  misc_feature (10)..(111): Pfam Name: Glycoprotein GG/GX Pfam Description: Glycoprotein GG/GX
IATRSSSILAQPYTSHITCRSTGARKARQWSTRGRPATPPTRWRSTASPWPGTAAPPTAPRGRTAPQPPRAPGSSSRPGTTTRPTVSCAAPAAPAPARLRTTALAGGGRRG

SEQ ID NO: 61409 - protein, 98 aa, Triticum aestivum
  peptide (1)..(98): Ceres Seq. ID no. 13661685
SQLAAVQYLHNHTHHTSPVDRPVHVRRDNGVPGADRPRHRQGGGVRPARGRARRRHRRPHGDARRRSRRGHRAAPADQGRPQDRRCPAPLRQLQLQLV

SEQ ID NO: 61410 - DNA, 1266 bp, Triticum aestivum
  misc_feature (1)..(1266): Ceres Seq. ID no. 15225256
gtctttcttcacatcctcaaacccaccctaatactcctcaaattatcactctcttagattagggatccaagtcggaaccctaatttgaatcgtcttgatttcgatcagttgtgtgcaaagggaggaaacatggattccgactcaaccgtgccactgagcgagcgcccggagtggtctgacgttgtcccgttgactcaggacgatggtccgaacccggtggttcggatcgcttacaaggaagacttccgcgagacgatggattacttccgggcgatttaccgctccgacgagcgttctgctcgcgcgctgcgactcacggaagaagctctccgcttaaactcgggcaactacaccgtaactgatccttcttcttttgccctagtactactgttcttaaagagttggatttgattagattgtaactttttgaaggtgtggcacttcaggcgcttagtactcgaggagcttaataacgacttgtatgaagagctcaagttcatcgaaagcattgctgaggataactctaagaactaccagttgtggcatcatcgacgatgggttgcagagaaactgggtcctgatgttgcaggaaaggaacttgagtttactcggagggtactatcacttgatgccaagcattatcatgcttggtcacataggcagtgggcgctacaagcattaggaggatgggaaaatgagcttaactactgccacgagctccttgaagctgacgtctttaacaactctgcatggaatcagaggtattacgttataactagatcaccttcgttgggaggcctagaagccatgagagaatctgaagtaagctacacagtcaaagccattttagcaaatcccgggaacgagagctcttggaggtacctgaaagccctttacaaagacgacacagagtcttggattagtgatccaagtgtttcctcagtctgtttgaaagttctctcacgcacggactgcttccatggattcgctctgagcacccttttggatcttctgtgcgatgggttgagaccaaccaacgagcatagagactcggtgaaagctctagctaatgaagaaccagagactaacttggccaatttggtgtgtaccattctgtgtcgtgttgatcctataagagctaactattgggcatggaggaagagcaagattacagtggcaatataaccacacttgagaaagttatttatttttacgttttaatctactgcttttttcatgaaacatgatgcatcaaaacaaatctcg

SEQ ID NO: 61411 - protein, 125 aa, Triticum aestivum
  peptide (1)..(125): Ceres Seq. ID no. 15225257
  misc_feature (1)..(116): Homolog of NCBI NO: 34782840 NR Description: FNTA protein [Homo sapiens]
  misc_feature (1)..(116): Homolog of NCBI NO: 16974883 NR Description: Chain A, Crystal Structure Of Human Protein Complexed With Farnesyl Diphosphate And The Peptidomimetic
  misc_feature (1)..(116): Homolog of NCBI NO: 4503771 NR Description: farnesyltransferase, CAAX box, alpha [Homo
  misc_feature (1)..(116): Homolog of NCBI NO: 29135287 NR Description: farnesyltransferase, CAAX box, alpha [Bos taurus]
  misc_feature (1)..(116): Homolog of NCBI NO: 266752 NR Description: PROTEIN FARNESYLTRANSFERASE ALPHA SUBUNIT (CAAX ALPHA SUBUNIT) (RAS PROTEINS PRENYLTRANSFERASE ALPHA)
  misc_feature (1)..(125): Homolog of NCBI NO: 12230437 NR Description: Protein farnesyltransferase alpha subunit (CAAX alpha subunit) (RAS proteins prenyltransferase alpha)
  misc_feature (1)..(124): Homolog of NCBI NO: 12230395 NR Description: Protein farnesyltransferase alpha subunit (CAAX alpha subunit) (RAS proteins prenyltransferase alpha)
  misc_feature (1)..(124): Homolog of NCBI NO: 18411158 NR Description: farnesyltransferase alpha subunit (FTA/protein
  misc_feature (1)..(124): Homolog of NCBI NO: 12643807 NR Description: Protein farnesyltransferase alpha subunit (CAAX alpha subunit) (RAS proteins prenyltransferase alpha)
  misc_feature (1)..(124): Homolog of NCBI NO: 11281721 NR Description: protein farnesyltransferase (EC 2.5.1.-) chain A
MRESEVSYTVKAILANPGNESSWRYLKALYKDDTESWISDPSVSSVCLKVLSRTDCFHGFALSTLLDLLCDGLRPTNEHRDSVKALANEEPETNLANLVCTILCRVDPIRANYWAWRKSKITVAI

SEQ ID NO: 61412 - protein, 93 aa, Triticum aestivum
  peptide (1)..(93): Ceres Seq. ID no. 15225258
  misc_feature (1)..(93): Homolog of NCBI NO: 16974883 NR Description: Chain A, Crystal Structure Of Human Protein Complexed With Farnesyl Diphosphate And The Peptidomimetic
  misc_feature (1)..(93): Homolog of NCBI NO: 34782840 NR Description: FNTA protein [Homo sapiens]
  misc_feature (1)..(93): Homolog of NCBI NO: 4503771 NR Description: farnesyltransferase, CAAX box, alpha [Homo
  misc_feature (1)..(93): Homolog of NCBI NO: 29135287 NR Description: farnesyltransferase, CAAX box, alpha [Bos taurus]
  misc_feature (1)..(93): Homolog of NCBI NO: 266752 NR Description: PROTEIN FARNESYLTRANSFERASE ALPHA SUBUNIT (CAAX ALPHA SUBUNIT) (RAS PROTEINS PRENYLTRANSFERASE ALPHA)
  misc_feature (7)..(93): Homolog of NCBI NO: 12230437 NR Description: Protein farnesyltransferase alpha subunit (CAAX alpha subunit) (RAS proteins prenyltransferase alpha)
  misc_feature (1)..(93): Homolog of NCBI NO: 18411158 NR Description: farnesyltransferase alpha subunit (FTA/protein
  misc_feature (1)..(93): Homolog of NCBI NO: 11281721 NR Description: protein farnesyltransferase (EC 2.5.1.-) chain A
  misc_feature (1)..(93): Homolog of NCBI NO: 12643807 NR Description: Protein farnesyltransferase alpha subunit (CAAX alpha subunit) (RAS proteins prenyltransferase alpha)
  misc_feature (74)..(93): Homolog of NCBI NO: 12230395 NR Description: Protein farnesyltransferase alpha subunit (CAAX alpha subunit) (RAS proteins prenyltransferase alpha)
MDSDSTVPLSERPEWSDVVPLTQDDGPNPVVRIAYKEDFRETMDYFRAIYRSDERSARALRLTEEALRLNSGNYTVTDPSSFALVLLFLKSWI

SEQ ID NO: 61413 - protein, 66 aa, Triticum aestivum
  peptide (1)..(66): Ceres Seq. ID no. 15225259
MKSSSSSKALLRITLRTTSCGIIDDGLQRNWVLMLQERNLSLLGGYYHLMPSIIMLGHIGSGRYKH

SEQ ID NO: 61414 - DNA, 1090 bp, Triticum aestivum
  misc_feature (1)..(1090): Ceres Seq. ID no. 13661438
gtttaagcccatttcggaataatgggccattagattaggcgcacctccttctagaaccctccagaaccttcctcctcccccaaccaaactaaatggtggtttgctaagcgttttctgcaccctagtgttgtggctatctacgatttcatatttttatgggacgaagaccttggggtggaaaattttgatccgaggaggtatattgatataatggtttccgaaggcttagaaatcacgcaacctgcattggatcctgatctatcaacagatattcaccaccgcatcacaatccgcaacaagatgacaaaagtgcataggagagtatatgacaatcgttcaagcatgaactgttctgatgatagtaaaggacctccatgcacagggtgggtcgagggcatggcaccagttttttctcgtgctgcctggaaatgtgtatggcatctaatacagaatgacttgattcatggatggggccttgacatgaagcttggttactgtgctcagggtgatcgagctgagaaggtcggtgtaattgacagtgagtatgtcgtccatcaagggataccatcattaggaggaccatcagataccagcaagttacctcgaagatctttggatttgcggacacacattagaagacagtcgtcggcggagctggaaaagttcaaagaacggtgggaaaaagccgtaagggaagacgatgagtggatggatccttttgacgcttgattactttggaagaaacatctgacatgaagatacaaggcccaccatacatgggtggatgcgtccacattcatcatggcgattggagtcgagatcatgtgggcctcatagcaaaacagttagttatatagccttataggcattttgctgactaacacacccccccctgccatcaagagctataagaacaagtgggaatgtcgtcgcgctaatacacggagaaactgagcaaggacctgtatactaccagtggctgacagacacagtatcttgtaatcttaattcgattctccaatcaccgaggttgtatagtgacaatgcatatatgtatgtgcagttatttttagtaataataagtatttat

SEQ ID NO: 61415 - protein, 172 aa, Triticum aestivum
  peptide (1)..(172): Ceres Seq. ID no. 13661439
  misc_feature (1)..(168): Pfam Name: Protein of unknown function (DUF707) Pfam Description: Protein of unknown function (DUF707)
  misc_feature (1)..(170): Homolog of NCBI NO: 19386727 NR Description: P0678F11.16 [Oryza sativa (japonica
  misc_feature (132)..(170): Homolog of NCBI NO: 34899756 NR Description: OJ1773_H01.1 [Oryza sativa (japonica
  misc_feature (59)..(125): Homolog of NCBI NO: 34899756 NR Description: OJ1773_H01.1 [Oryza sativa (japonica
  misc_feature (1)..(38): Homolog of NCBI NO: 34899756 NR Description: OJ1773_H01.1 [Oryza sativa (japonica
  misc_feature (1)..(169): Homolog of NCBI NO: 25402652 NR Description: hypothetical protein [imported] - Arabidopsis
  misc_feature (1)..(168): Homolog of NCBI NO: 24636978 NR Description: lysine ketoglutarate reductase trans-splicing
  misc_feature (1)..(169): Homolog of NCBI NO: 22329488 NR Description: expressed protein [Arabidopsis thaliana]
  misc_feature (132)..(170): Homolog of NCBI NO: 33146749 NR Description: putative lysine ketoglutarate reductase
  misc_feature (1)..(125): Homolog of NCBI NO: 33146749 NR Description: putative lysine ketoglutarate reductase
  misc_feature (1)..(168): Homolog of NCBI NO: 15219892 NR Description: expressed protein [Arabidopsis thaliana]
MVSEGLEITQPALDPDLSTDIHHRITIRNKMTKVHRRVYDNRSSMNCSDDSKGPPCTGWVEGMAPVFSRAAWKCVWHLIQNDLIHGWGLDMKLGYCAQGDRAEKVGVIDSEYVVHQGIPSLGGPSDTSKLPRRSLDLRTHIRRQSSAELEKFKERWEKAVREDDEWMDPFDA

SEQ ID NO: 61416 - protein, 142 aa, Triticum aestivum
  peptide (1)..(142): Ceres Seq. ID no. 13661440
  misc_feature (1)..(138): Pfam Name: Protein of unknown function (DUF707) Pfam Description: Protein of unknown function (DUF707)
  misc_feature (1)..(140): Homolog of NCBI NO: 34903420 NR Description: hypothetical protein~similar to Oryza sativa
  misc_feature (1)..(140): Homolog of NCBI NO: 19386727 NR Description: P0678F11.16 [Oryza sativa (japonica
  misc_feature (102)..(140): Homolog of NCBI NO: 34899756 NR Description: OJ1773_H01.1 [Oryza sativa (japonica
  misc_feature (29)..(95): Homolog of NCBI NO: 34899756 NR Description: OJ1773_H01.1 [Oryza sativa (japonica
  misc_feature (1)..(139): Homolog of NCBI NO: 25402652 NR Description: hypothetical protein [imported] - Arabidopsis
  misc_feature (1)..(138): Homolog of NCBI NO: 24636978 NR Description: lysine ketoglutarate reductase trans-splicing
  misc_feature (1)..(139): Homolog of NCBI NO: 22329488 NR Description: expressed protein [Arabidopsis thaliana]
  misc_feature (102)..(140): Homolog of NCBI NO: 33146749 NR Description: putative lysine ketoglutarate reductase
  misc_feature (1)..(95): Homolog of NCBI NO: 33146749 NR Description: putative lysine ketoglutarate reductase
  misc_feature (1)..(138): Homolog of NCBI NO: 15219892 NR Description: expressed protein [Arabidopsis thaliana]
MTKVHRRVYDNRSSMNCSDDSKGPPCTGWVEGMAPVFSRAAWKCVWHLIQNDLIHGWGLDMKLGYCAQGDRAEKVGVIDSEYVVHQGIPSLGGPSDTSKLPRRSLDLRTHIRRQSSAELEKFKERWEKAVREDDEWMDPFDA

SEQ ID NO: 61417 - protein, 128 aa, Triticum aestivum
  peptide (1)..(128): Ceres Seq. ID no. 13661441
  misc_feature (1)..(124): Pfam Name: Protein of unknown function (DUF707) Pfam Description: Protein of unknown function (DUF707)
  misc_feature (1)..(126): Homolog of NCBI NO: 34903420 NR Description: hypothetical protein~similar to Oryza sativa
  misc_feature (1)..(126): Homolog of NCBI NO: 19386727 NR Description: P0678F11.16 [Oryza sativa (japonica
  misc_feature (88)..(126): Homolog of NCBI NO: 34899756 NR Description: OJ1773_H01.1 [Oryza sativa (japonica
  misc_feature (15)..(81): Homolog of NCBI NO: 34899756 NR Description: OJ1773_H01.1 [Oryza sativa (japonica
  misc_feature (1)..(125): Homolog of NCBI NO: 25402652 NR Description: hypothetical protein [imported] - Arabidopsis
  misc_feature (1)..(124): Homolog of NCBI NO: 24636978 NR Description: lysine ketoglutarate reductase trans-splicing
  misc_feature (1)..(125): Homolog of NCBI NO: 22329488 NR Description: expressed protein [Arabidopsis thaliana]
  misc_feature (88)..(126): Homolog of NCBI NO: 33146749 NR Description: putative lysine ketoglutarate reductase
  misc_feature (1)..(81): Homolog of NCBI NO: 33146749 NR Description: putative lysine ketoglutarate reductase
  misc_feature (1)..(124): Homolog of NCBI NO: 15219892 NR Description: expressed protein [Arabidopsis thaliana]
MNCSDDSKGPPCTGWVEGMAPVFSRAAWKCVWHLIQNDLIHGWGLDMKLGYCAQGDRAEKVGVIDSEYVVHQGIPSLGGPSDTSKLPRRSLDLRTHIRRQSSAELEKFKERWEKAVREDDEWMDPFDA

SEQ ID NO: 61418 - DNA, 933 bp, Triticum aestivum
  misc_feature (1)..(933): Ceres Seq. ID no. 13664213
aaacacagacgagaatcctctctcacagtctcttttcgtctcccatacacacactttctctctctatacccattcttcgtcttctacctcggcgacaccactagtagtcactcgcagagagaagtcgtcgaaaggagaacatcaaaaaagattttcggtgagaaggatcgagtgagagattcttcatcggctttagttgtctacacgtctgtgctcatgagccgacggcgactactgttatcggcgacaatactctcgtatttgctccacggaatggctctcgtctctgtcgtagcctccggcgtggaggaggttagagataacgtggatttgaccaaaacgaacgacgttagctacaacctctacgcatcggaagatgctacgtctctctcatgagacgagagtagagccggataggatcggagagaagtgcaagaagtcagacattgtggtgaaccaggcagcgaccgaacctatgcccaacggaatacccggttacaccgtggagatcacgaaccagtgcatgtctggatgcaacatctcgaggatccacgtcagctgcggttggttcagctccgttaagttggttaacccgagggttttcaagcgtattcactatgatgactgtctcgtcaacaacgggaagcctttgccttatggctctacgctctctttccactacgccaacactttcccttaccgtctcgctgtcgcattcgttacctgctcttgagaccggatcttttcctttcttatataggataagatgatagtagaaacatggcgggaggaaaattaagatacaggaagtatgattgatattaatcatattcataccacactcatcctcttttgggttattttcttctctttaggatgttaaatgtttttgagcaacagtgatatatatataaaagaatctatcaacctccc

SEQ ID NO: 61419 - protein, 131 aa, Triticum aestivum
  peptide (1)..(131): Ceres Seq. ID no. 15220292
  misc_feature (73)..(118): Homolog of NCBI NO: 15724336 NR Description: At4g24973/At4g24973 [Arabidopsis thaliana]
  misc_feature (73)..(118): Homolog of NCBI NO: 38607340 NR Description: TPD1 [Arabidopsis thaliana]
KHRRESSLTVSFRLPYTHFLSLYPFFVFYLGDTTSSHSQREVVERRTSKKIFGEKDRVRDSSSALVVYTSVLMSRRRLLLSATILSYLLHGMALVSVVASGVEEVRDNVDLTKTNDVSYNLYASEDATSLS

SEQ ID NO: 61420 - protein, 118 aa, Triticum aestivum
  peptide (1)..(118): Ceres Seq. ID no. 15220293
  misc_feature (19)..(118): Homolog of NCBI NO: 25272006 NR Description: hypothetical protein [Marchantia polymorpha]
  misc_feature (9)..(117): Homolog of NCBI NO: 37532318 NR Description: unknown protein [Oryza sativa (japonica
  misc_feature (9)..(117): Homolog of NCBI NO: 20270065 NR Description: Unknown protein [Oryza sativa (japonica
  misc_feature (1)..(118): Homolog of NCBI NO: 38607340 NR Description: TPD1 [Arabidopsis thaliana]
MLRLSHETRVEPDRIGEKCKKSDIVVNQAATEPMPNGIPGYTVEITNQCMSGCNISRIHVSCGWFSSVKLVNPRVFKRIHYDDCLVNNGKPLPYGSTLSFHYANTFPYRLAVAFVTCS

SEQ ID NO: 61421 - protein, 85 aa, Triticum aestivum
  peptide (1)..(85): Ceres Seq. ID no. 15220294
  misc_feature (1)..(85): Homolog of NCBI NO: 25272006 NR Description: hypothetical protein [Marchantia polymorpha]
  misc_feature (1)..(84): Homolog of NCBI NO: 37532318 NR Description: unknown protein [Oryza sativa (japonica
  misc_feature (1)..(84): Homolog of NCBI NO: 20270065 NR Description: Unknown protein [Oryza sativa (japonica
  misc_feature (1)..(85): Homolog of NCBI NO: 38607340 NR Description: TPD1 [Arabidopsis thaliana]
MPNGIPGYTVEITNQCMSGCNISRIHVSCGWFSSVKLVNPRVFKRIHYDDCLVNNGKPLPYGSTLSFHYANTFPYRLAVAFVTCS

SEQ ID NO: 61422 - protein, 59 aa, Triticum aestivum
  peptide (1)..(59): Ceres Seq. ID no. 15220295
  misc_feature (1)..(46): Homolog of NCBI NO: 15724336 NR Description: At4g24973/At4g24973 [Arabidopsis thaliana]
  misc_feature (1)..(46): Homolog of NCBI NO: 38607340 NR Description: TPD1 [Arabidopsis thaliana]
MSRRRLLLSATILSYLLHGMALVSVVASGVEEVRDNVDLTKTNDVSYNLYASEDATSLS

SEQ ID NO: 61423 - DNA, 839 bp, Triticum aestivum
  misc_feature (1)..(839): Ceres Seq. ID no. 13661767
atattcattctattcgcgtggttttgacgacgaagaagggaacaacgcataacgaagacgacgatgggtgaagccgtgaaggatggaagaaaagaagtgattcaggcttggtacatggatgatagccaagatgatcagcgacttcctcaccacaaggatcctaaagagtttatctctctcgacaaacttgcagagcttggagtccttagctggagacttgatgctgataactacgaaaccgatgaggagttgaaaaagatccgcgagtctcgtggttactcctacatggacttttgtgaggtatgcccagagaagcttccaaattatgaagagaaagtaaagagcttcttcgaggaacatctccacactgatgaagagatccgttactgcgttgcaggaagtggctactttgatgtgagggatcgcaacgaagcttggatcagagtttgggtgaagaagggaggaatgatagtcttgcctgctggaatttatcatcgcttcaccgtggattctgacaactatatcaaggcaatgcgtcttttcgtgggtgaaccggtgtggacaccatacaatcgtccacacgaccatcttcctgcaaggaaagaatatgttgataacttcgtgaagaaagccattaacgcctctgcttagagagcgcgctctctctcctgcttccaaaaataagagaggttctataataaacttggcctacaataaagagagatcttgaatcgataatatgcatgtggagaatgatggctttggtatgcatgtgttgtatacttattaataacactctgttcgtctttraragcctttttttmwgmaaaaaaaaaaaa

SEQ ID NO: 61424 - protein, 195 aa, Triticum aestivum
  peptide (1)..(195): Ceres Seq. ID no. 15220133
  misc_feature (14)..(168): Pfam Name: ARD/ARD' family Pfam Description: ARD/ARD' family
  misc_feature (7)..(188): Homolog of NCBI NO: 37534408 NR Description: putative zinc finger protein ID1
  misc_feature (1)..(188): Homolog of NCBI NO: 7489558 NR Description: probable submergence induced protein 2 - rice
  misc_feature (5)..(189): Homolog of NCBI NO: 34902616 NR Description: Putative probable submergence induced,
  misc_feature (1)..(192): Homolog of NCBI NO: 14522834 NR Description: iron-deficiency induced gene [Hordeum vulgare]
  misc_feature (1)..(189): Homolog of NCBI NO: 7489559 NR Description: probable submergence induced, nickel-binding
  misc_feature (1)..(195): Homolog of NCBI NO: 15225298 NR Description: hypothetical protein [Arabidopsis thaliana]
  misc_feature (1)..(75): Homolog of NCBI NO: 7485194 NR Description: hypothetical protein - Arabidopsis thaliana
  misc_feature (69)..(179): Homolog of NCBI NO: 7485194 NR Description: hypothetical protein - Arabidopsis thaliana
  misc_feature (1)..(195): Homolog of NCBI NO: 18414293 NR Description: expressed protein [Arabidopsis thaliana]
  misc_feature (1)..(188): Homolog of NCBI NO: 18414289 NR Description: expressed protein [Arabidopsis thaliana]
MGEAVKDGRKEVIQAWYMDDSQDDQRLPHHKDPKEFISLDKLAELGVLSWRLDADNYETDEELKKIRESRGYSYMDFCEVCPEKLPNYEEKVKSFFEEHLHTDEEIRYCVAGSGYFDVRDRNEAWIRVWVKKGGMIVLPAGIYHRFTVDSDNYIKAMRLFVGEPVWTPYNRPHDHLPARKEYVDNFVKKAINASA

SEQ ID NO: 61425 - protein, 178 aa, Triticum aestivum
  peptide (1)..(178): Ceres Seq. ID no. 15220134
  misc_feature (1)..(151): Pfam Name: ARD/ARD' family Pfam Description: ARD/ARD' family
  misc_feature (1)..(171): Homolog of NCBI NO: 37534408 NR Description: putative zinc finger protein ID1
  misc_feature (1)..(171): Homolog of NCBI NO: 7489558 NR Description: probable submergence induced protein 2 - rice
  misc_feature (1)..(172): Homolog of NCBI NO: 34902616 NR Description: Putative probable submergence induced,
  misc_feature (1)..(175): Homolog of NCBI NO: 14522834 NR Description: iron-deficiency induced gene [Hordeum vulgare]
  misc_feature (1)..(172): Homolog of NCBI NO: 7489559 NR Description: probable submergence induced, nickel-binding
  misc_feature (1)..(178): Homolog of NCBI NO: 15225298 NR Description: hypothetical protein [Arabidopsis thaliana]
  misc_feature (1)..(58): Homolog of NCBI NO: 7485194 NR Description: hypothetical protein - Arabidopsis thaliana
  misc_feature (52)..(162): Homolog of NCBI NO: 7485194 NR Description: hypothetical protein - Arabidopsis thaliana
  misc_feature (1)..(178): Homolog of NCBI NO: 18414293 NR Description: expressed protein [Arabidopsis thaliana]
  misc_feature (1)..(171): Homolog of NCBI NO: 18414289 NR Description: expressed protein [Arabidopsis thaliana]
MDDSQDDQRLPHHKDPKEFISLDKLAELGVLSWRLDADNYETDEELKKIRESRGYSYMDFCEVCPEKLPNYEEKVKSFFEEHLHTDEEIRYCVAGSGYFDVRDRNEAWIRVWVKKGGMIVLPAGIYHRFTVDSDNYIKAMRLFVGEPVWTPYNRPHDHLPARKEYVDNFVKKAINASA

SEQ ID NO: 61426 - protein, 121 aa, Triticum aestivum
  peptide (1)..(121): Ceres Seq. ID no. 15220135
  misc_feature (1)..(94): Pfam Name: ARD/ARD' family Pfam Description: ARD/ARD' family
  misc_feature (1)..(115): Homolog of NCBI NO: 10177955 NR Description: gene_id:MQD19.21~pir||T02918~similar to unknown
  misc_feature (1)..(114): Homolog of NCBI NO: 37534408 NR Description: putative zinc finger protein ID1
  misc_feature (1)..(114): Homolog of NCBI NO: 7489558 NR Description: probable submergence induced protein 2 - rice
  misc_feature (1)..(115): Homolog of NCBI NO: 34902616 NR Description: Putative probable submergence induced,
  misc_feature (1)..(118): Homolog of NCBI NO: 14522834 NR Description: iron-deficiency induced gene [Hordeum vulgare]
  misc_feature (1)..(115): Homolog of NCBI NO: 7489559 NR Description: probable submergence induced, nickel-binding
  misc_feature (1)..(121): Homolog of NCBI NO: 15225298 NR Description: hypothetical protein [Arabidopsis thaliana]
  misc_feature (1)..(105): Homolog of NCBI NO: 7485194 NR Description: hypothetical protein - Arabidopsis thaliana
  misc_feature (1)..(121): Homolog of NCBI NO: 18414293 NR Description: expressed protein [Arabidopsis thaliana]
  misc_feature (1)..(114): Homolog of NCBI NO: 18414289 NR Description: expressed protein [Arabidopsis thaliana]
MDFCEVCPEKLPNYEEKVKSFFEEHLHTDEEIRYCVAGSGYFDVRDRNEAWIRVWVKKGGMIVLPAGIYHRFTVDSDNYIKAMRLFVGEPVWTPYNRPHDHLPARKEYVDNFVKKAINASA

SEQ ID NO: 61427 - DNA, 973 bp, Triticum aestivum
  misc_feature (1)..(973): Ceres Seq. ID no. 13661768
gtttaaggtcactaaggtacaagaaaaaaataggaatcataatcacttcaaatctaaaattctcatcaagtctcttatataaacatctccactcctcaaaaatcacaaacaatgcctttaagttttggatcggtccctatcttggccgcggtggccatacaactcctccttatatccagcgtttcttccctcaacattaccaatgagtatctccaccacgcatgcaacaacacccaagggaaatacaagccagggagtgtgttcgaggaaaatctcaacattgccctcaaaaacatatccgcttttaatctgcaaaaaggttttgcccttgactccaatatgaatagaccctacaaaaatatacctcccgataccgccttcgtcatgctccagtgtcgtggcgactcctacgggtctaagtgtcactcatgcctcaccacagccctctctgggcttcgtaagaaatgtccgagaaacaaagcaggaacaatatggtatgaccaatgcactctggatatttctacattcagtgccggtgacagcagaatcctctatgatgattatttatgtataaccaacccaaaggacctgagcggagataagaagatgttcgataagaaaaagaaggatttcaccgataagctaatatctgaagccggcaagttgggaaacaacagcaaggggtcactgtacgctacgggagagacgatgatcgggacaaagaagctttatggaatgatgcaatgtacggacgagttatatgagaatggttgctctgtgtgtctagattggcttgtcttgcaacatccattctgcggcgatggaaaaaacggagttcgatatatgtgtagaagctgtaatgcaaggtttgagctttacccttttcttagaacttaatactgtttgatgggagctcttaatttgctttatgtttgaataagtactatatcaagaaataaaaattgttaacctt

SEQ ID NO: 61428 - protein, 261 aa, Triticum aestivum
  peptide (1)..(261): Ceres Seq. ID no. 15220136
  misc_feature (90)..(138): Pfam Name: Domain of unknown function DUF26 Pfam Description: Domain of unknown function DUF26
  misc_feature (9)..(261): Homolog of NCBI NO: 15233236 NR Description: receptor-like protein kinase-related [Arabidopsis
  misc_feature (9)..(259): Homolog of NCBI NO: 9279746 NR Description: contains similarity to receptor protein
  misc_feature (9)..(261): Homolog of NCBI NO: 15233368 NR Description: receptor-like protein kinase-related [Arabidopsis
  misc_feature (8)..(260): Homolog of NCBI NO: 9279762 NR Description: emb|CAB45834.1~gene_id:MZN24.23~similar to
  misc_feature (5)..(260): Homolog of NCBI NO: 15233366 NR Description: pollen coat receptor kinase, putative
  misc_feature (5)..(228): Homolog of NCBI NO: 9279753 NR Description: emb|CAB45833.1~gene_id:MZN24.14~similar to
  misc_feature (5)..(260): Homolog of NCBI NO: 15233235 NR Description: receptor-like kinase-related [Arabidopsis
  misc_feature (14)..(260): Homolog of NCBI NO: 15228583 NR Description: receptor kinase, putative [Arabidopsis thaliana]
  misc_feature (10)..(260): Homolog of NCBI NO: 11994708 NR Description: contains similarity to serine/threonine
  misc_feature (5)..(260): Homolog of NCBI NO: 15233228 NR Description: receptor-like protein kinase-related [Arabidopsis
MPLSFGSVPILAAVAIQLLLISSVSSLNITNEYLHHACNNTQGKYKPGSVFEENLNIALKNISAFNLQKGFALDSNMNRPYKNIPPDTAFVMLQCRGDSYGSKCHSCLTTALSGLRKKCPRNKAGTIWYDQCTLDISTFSAGDSRILYDDYLCITNPKDLSGDKKMFDKKKKDFTDKLISEAGKLGNNSKGSLYATGETMIGTKKLYGMMQCTDELYENGCSVCLDWLVLQHPFCGDGKNGVRYMCRSCNARFELYPFLRT

SEQ ID NO: 61429 - protein, 185 aa, Triticum aestivum
  peptide (1)..(185): Ceres Seq. ID no. 15220137
  misc_feature (14)..(62): Pfam Name: Domain of unknown function DUF26 Pfam Description: Domain of unknown function DUF26
  misc_feature (1)..(185): Homolog of NCBI NO: 15233236 NR Description: receptor-like protein kinase-related [Arabidopsis
  misc_feature (1)..(183): Homolog of NCBI NO: 9279746 NR Description: contains similarity to receptor protein
  misc_feature (1)..(185): Homolog of NCBI NO: 15233368 NR Description: receptor-like protein kinase-related [Arabidopsis
  misc_feature (1)..(184): Homolog of NCBI NO: 9279762 NR Description: emb|CAB45834.1~gene_id:MZN24.23~similar to
  misc_feature (1)..(184): Homolog of NCBI NO: 15233366 NR Description: pollen coat receptor kinase, putative
  misc_feature (1)..(152): Homolog of NCBI NO: 9279753 NR Description: emb|CAB45833.1~gene_id:MZN24.14~similar to
  misc_feature (1)..(184): Homolog of NCBI NO: 15233235 NR Description: receptor-like kinase-related [Arabidopsis
  misc_feature (1)..(184): Homolog of NCBI NO: 15228583 NR Description: receptor kinase, putative [Arabidopsis thaliana]
  misc_feature (1)..(184): Homolog of NCBI NO: 11994708 NR Description: contains similarity to serine/threonine
  misc_feature (1)..(184): Homolog of NCBI NO: 15233228 NR Description: receptor-like protein kinase-related [Arabidopsis
MNRPYKNIPPDTAFVMLQCRGDSYGSKCHSCLTTALSGLRKKCPRNKAGTIWYDQCTLDISTFSAGDSRILYDDYLCITNPKDLSGDKKMFDKKKKDFTDKLISEAGKLGNNSKGSLYATGETMIGTKKLYGMMQCTDELYENGCSVCLDWLVLQHPFCGDGKNGVRYMCRSCNARFELYPFLRT

SEQ ID NO: 61430 - protein, 170 aa, Triticum aestivum
  peptide (1)..(170): Ceres Seq. ID no. 15220138
  misc_feature (1)..(47): Pfam Name: Domain of unknown function DUF26 Pfam Description: Domain of unknown function DUF26
  misc_feature (1)..(170): Homolog of NCBI NO: 15233236 NR Description: receptor-like protein kinase-related [Arabidopsis
  misc_feature (1)..(168): Homolog of NCBI NO: 9279746 NR Description: contains similarity to receptor protein
  misc_feature (1)..(170): Homolog of NCBI NO: 15233368 NR Description: receptor-like protein kinase-related [Arabidopsis
  misc_feature (1)..(169): Homolog of NCBI NO: 9279762 NR Description: emb|CAB45834.1~gene_id:MZN24.23~similar to
  misc_feature (1)..(169): Homolog of NCBI NO: 15233366 NR Description: pollen coat receptor kinase, putative
  misc_feature (1)..(137): Homolog of NCBI NO: 9279753 NR Description: emb|CAB45833.1~gene_id:MZN24.14~similar to
  misc_feature (1)..(169): Homolog of NCBI NO: 15233235 NR Description: receptor-like kinase-related [Arabidopsis
  misc_feature (1)..(169): Homolog of NCBI NO: 15228583 NR Description: receptor kinase, putative [Arabidopsis thaliana]
  misc_feature (1)..(169): Homolog of NCBI NO: 11994708 NR Description: contains similarity to serine/threonine
  misc_feature (1)..(169): Homolog of NCBI NO: 15233228 NR Description: receptor-like protein kinase-related [Arabidopsis
MLQCRGDSYGSKCHSCLTTALSGLRKKCPRNKAGTIWYDQCTLDISTFSAGDSRILYDDYLCITNPKDLSGDKKMFDKKKKDFTDKLISEAGKLGNNSKGSLYATGETMIGTKKLYGMMQCTDELYENGCSVCLDWLVLQHPFCGDGKNGVRYMCRSCNARFELYPFLRT

SEQ ID NO: 61431 - DNA, 799 bp, Triticum aestivum
  misc_feature (1)..(799): Ceres Seq. ID no. 13661453
ctagaacatcctaatcgaaaaaacacccgactgagtgagagagcgctagcgaccggataaggtttcgcctaccagctgccaacggccagcctcgacgccggcgggggctggtccgaccacgcgcctctccgcctcccgtcgcagcctctctcccccgagtttcccttctgcccaagctgcaccttgctagcaaggatactgcgcactccgatctataatatcagctctctatagcgaccgtcgctgtcgcccacctttcgccctgtaggcaagaacaagacggcatggcttgtgacgagtgccgcggtccgaaccataaacagaaagattgccccacactaccctgtcacaactgtgggggaactcttcacacccgaggcacttgctgttacacggatcctgtttaccgcgttggagaaagatgtcccagatgtggtggttttcaacacggggtacccggcaagcccccctgcccagtccaagaagctcatgctcgcccgcctatgtgcccgcggtgtcaagtgccacatcgtccaagagactgccctcatcgtggagccgaatattccgggtggacaagctccgacagatgcacgcaatgcaatgaaactggtcattttttccccgactgccctaacaaatactagtactagtttctctgtatcttgttattgtagctcgtaagtttgtttgagtatttttcaagactattagcttagtggtttgcccattgttgatgtatattattaagcctgaaagcacttcaattctcagtatcttttaatatatagtattattt

SEQ ID NO: 61432 - protein, 120 aa, Triticum aestivum
  peptide (1)..(120): Ceres Seq. ID no. 13661454
  misc_feature (2)..(118): Homolog of NCBI NO: 3661541 NR Description: poly-zinc finger protein 1 [Trypanosoma cruzi]
MACDECRGPNHKQKDCPTLPCHNCGGTLHTRGTCCYTDPVYRVGERCPRCGGFQHGVPGKPPCPVQEAHARPPMCPRCQVPHRPRDCPHRGAEYSGWTSSDRCTQCNETGHFFPDCPNKY

SEQ ID NO: 61433 - protein, 64 aa, Triticum aestivum
  peptide (1)..(64): Ceres Seq. ID no. 13661455
MLARLCARGVKCHIVQETALIVEPNIPGGQAPTDARNAMKLVIFSPTALTNTSTSFSVSCYCSS

SEQ ID NO: 61434 - protein, 61 aa, Triticum aestivum
  peptide (1)..(61): Ceres Seq. ID no. 13661456
MSQMWWFSTRGTRQAPLPSPRSSCSPAYVPAVSSATSSKRLPSSWSRIFRVDKLRQMHAMQ

SEQ ID NO: 61435 - DNA, 1013 bp, Triticum aestivum
  misc_feature (1)..(1013): Ceres Seq. ID no. 13661769
accgcaatacaccactcaccccctcacgctctcgctcatcacccccccaacaactaactccaccaccacagtatcaatcagccatgggcgccacggaggattcctcctccggctccgagaccaccacctcgtcctcggtggaggccctggcctcgccgccgtccccgacggccaccaccgcgtcgtcgaagaagaagcggccgcgcaacgacgggcggcacccgacgtaccgcggggtgcgcatgcggagctggggcaagtgggtgtcggagattcgggagccccgcaagaagtcgcgcatctggctcggcaccttcgccaccgcggagatggcggcgcgcgcgcacgacgtggccgccctcgccatcaagggccgtgccgcgcacctcaacttccccgamctcgcccacgagctcccgcgcccggccaccgccgcgcccaaagacgtccaggcgggcgccgcactcgccgcctccgccgacttcccggcctctgccactgcagctgccaatgccggcgccaagaaccccgacggcccggaacacagcggcgcctccgcctctgcctccgcctctgcctctgcctctgcctcgccgccgcctgacaccgctgaggatgcgctgttcgacctccccgacctcctcttcgacctcagacacggccctccgtcctgccagctttcgtgcgcctcctcgtgggacgacgacgtggccttcgccggccctggcgccggcgtgttccgcctggaggagccgctgcagtgggagtactaaagccaggcgccaactcgctcagtcaccggtgccatcaaaccgcgccgccgctgcatgcatgtatggctcgttcgtttccacatcgggccggaaatcatttcgaaaccattggagaaccaaaagaaggaagcaaaaccactggagtactactaaatttaggagtgagaccatgtacaaattggggttagccttgtgttctttatcataaaaaaaaaaaaaaaaaagcttatcgataccgtc

SEQ ID NO: 61436 - protein, 256 aa, Triticum aestivum
  peptide (1)..(256): Ceres Seq. ID no. 15220139
  misc_feature (73)..(137): Pfam Name: AP2 domain Pfam Description: AP2 domain
  misc_feature (2)..(204): Homolog of NCBI NO: 15225381 NR Description: AP2 domain transcription factor TINY, putative
  misc_feature (36)..(255): Homolog of NCBI NO: 15232340 NR Description: AP2 domain transcription factor TINY, putative
  misc_feature (26)..(254): Homolog of NCBI NO: 38605844 NR Description: OSJNBb0034G17.2 [Oryza sativa (japonica
  misc_feature (25)..(256): Homolog of NCBI NO: 38605845 NR Description: OSJNBb0034G17.3 [Oryza sativa (japonica
  misc_feature (9)..(232): Homolog of NCBI NO: 14140155 NR Description: putative AP2 domain transcription factor [Oryza
  misc_feature (2)..(255): Homolog of NCBI NO: 37536842 NR Description: putative DNA binding protein
  misc_feature (6)..(255): Homolog of NCBI NO: 25990951 NR Description: DREB-like protein [Zea mays]
  misc_feature (6)..(255): Homolog of NCBI NO: 21908034 NR Description: DRE binding factor 2 [Zea mays]
  misc_feature (28)..(256): Homolog of NCBI NO: 38605848 NR Description: OSJNBb0034G17.6 [Oryza sativa (japonica
  misc_feature (32)..(256): Homolog of NCBI NO: 14140163 NR Description: putative AP2 domain containing protein [Oryza
  misc_feature (133)..(133): Xaa is any aa, unknown or other
RNTPLTPSRSRSSPPQQLTPPPQYQSAMGATEDSSSGSETTTSSSVEALASPPSPTATTASSKKKRPRNDGRHPTYRGVRMRSWGKWVSEIREPRKKSRIWLGTFATAEMAARAHDVAALAIKGRAAHLNFPXLAHELPRPATAAPKDVQAGAALAASADFPASATAAANAGAKNPDGPEHSGASASASASASASASPPPDTAEDALFDLPDLLFDLRHGPPSCQLSCASSWDDDVAFAGPGAGVFRLEEPLQWEY

SEQ ID NO: 61437 - protein, 229 aa, Triticum aestivum
  peptide (1)..(229): Ceres Seq. ID no. 15220140
  misc_feature (46)..(110): Pfam Name: AP2 domain Pfam Description: AP2 domain
  misc_feature (1)..(177): Homolog of NCBI NO: 15225381 NR Description: AP2 domain transcription factor TINY, putative
  misc_feature (9)..(228): Homolog of NCBI NO: 15232340 NR Description: AP2 domain transcription factor TINY, putative
  misc_feature (1)..(227): Homolog of NCBI NO: 38605844 NR Description: OSJNBb0034G17.2 [Oryza sativa (japonica
  misc_feature (1)..(229): Homolog of NCBI NO: 38605845 NR Description: OSJNBb0034G17.3 [Oryza sativa (japonica
  misc_feature (1)..(205): Homolog of NCBI NO: 14140155 NR Description: putative AP2 domain transcription factor [Oryza
  misc_feature (1)..(228): Homolog of NCBI NO: 37536842 NR Description: putative DNA binding protein
  misc_feature (1)..(228): Homolog of NCBI NO: 25990951 NR Description: DREB-like protein [Zea mays]
  misc_feature (1)..(228): Homolog of NCBI NO: 21908034 NR Description: DRE binding factor 2 [Zea mays]
  misc_feature (1)..(229): Homolog of NCBI NO: 38605848 NR Description: OSJNBb0034G17.6 [Oryza sativa (japonica
  misc_feature (5)..(229): Homolog of NCBI NO: 14140163 NR Description: putative AP2 domain containing protein [Oryza
  misc_feature (106)..(106): Xaa is any aa, unknown or other
MGATEDSSSGSETTTSSSVEALASPPSPTATTASSKKKRPRNDGRHPTYRGVRMRSWGKWVSEIREPRKKSRIWLGTFATAEMAARAHDVAALAIKGRAAHLNFPXLAHELPRPATAAPKDVQAGAALAASADFPASATAAANAGAKNPDGPEHSGASASASASASASASPPPDTAEDALFDLPDLLFDLRHGPPSCQLSCASSWDDDVAFAGPGAGVFRLEEPLQWEY

SEQ ID NO: 61438 - protein, 200 aa, Triticum aestivum
  peptide (1)..(200): Ceres Seq. ID no. 15220141
  misc_feature (134)..(134): Xaa is any aa, unknown or other
PQYTTHPLTLSLITPPTTNSTTTVSISHGRHGGFLLRLRDHHLVLGGGPGLAAVPDGHHRVVEEEAAAQRRAAPDVPRGAHAELGQVGVGDSGAPQEVAHLARHLRHRGDGGARARRGRPRHQGPCRAPQLPRXRPRAPAPGHRRAQRRPGGRRTRRLRRLPGLCHCSCQCRRQEPRRPGTQRRLRLCLRLCLCLCLAAA

SEQ ID NO: 61439 - DNA, 1012 bp, Triticum aestivum
  misc_feature (1)..(1012): Ceres Seq. ID no. 13598179
tcgctcgttgtctctcccgtctcaggtcgccatcgaagcaccagtagcaggaactccttaacgccccagcgtgagatcgcgagattgtttgtagcttgatcgaggcagggaagaccggaagaggatgatgcagtcgccgtcgcagcaccagtcctcctactacgccgtgctcggcgtccacccaggcgcgtcctccgccgagatacgcgccgcgtaccaccgcctcgccatgaggtggcacccggataagattgccaatggccgtgtggatccggcgatcgcggaggaagccaagggaaggttccagaagatacacgaggcataccaggtgttgtcggatcagaagcggagggagctctatgacgccgggatgtacgaccccctcgacgacgaccaagaagaggtcgagggcttccatgatttccttcaggagatgctctcgctcatggccaccgttggtagagaggagcccgtatattccctgggcgaactccaatccatgcttgacgggatgatgcaggatttcacctccccccagccgccgccaccaagcagcttcttcagcagcaccagttcgtcgacgcggttcggcgcacccagcggcggagcgcagcagcagcgtcgacccccctcacgcgtacggcctcaggggttcggcagctcggcatgcttcagccagacggctttctccggctgctaagcacctgcgcgatctgcatcgcagttcatgcgtccgtggggatcaccggcgtgaagacgctgagttgcagagactgggagagacagggaacgtcgagcgctctagcgatgcacacggcgggagccggtactgtacatcacccactggatgagcggaataaagaagacggtagatatttctagttgacagcaactcgaaaggatttccattgttagtttttcttagatagatcgtaggtgtacatagatgagaacagaagtgaagacatgatgttttgcactgtggtgtgtatttacttcaaaagcaagcacg

SEQ ID NO: 61440 - protein, 191 aa, Triticum aestivum
  peptide (1)..(191): Ceres Seq. ID no. 13598180
  misc_feature (11)..(83): Pfam Name: DnaJ domain Pfam Description: DnaJ domain
  misc_feature (6)..(131): Homolog of NCBI NO: 18405757 NR Description: DnaJ protein family [Arabidopsis thaliana]
  misc_feature (6)..(131): Homolog of NCBI NO: 21554587 NR Description: DnaJ protein, putative [Arabidopsis thaliana]
  misc_feature (1)..(189): Homolog of NCBI NO: 34912486 NR Description: heat shock protein-like [Oryza sativa (japonica
MMQSPSQHQSSYYAVLGVHPGASSAEIRAAYHRLAMRWHPDKIANGRVDPAIAEEAKGRFQKIHEAYQVLSDQKRRELYDAGMYDPLDDDQEEVEGFHDFLQEMLSLMATVGREEPVYSLGELQSMLDGMMQDFTSPQPPPPSSFFSSTSSSTRFGAPSGGAQQQRRPPSRVRPQGFGSSACFSQTAFSGC

SEQ ID NO: 61441 - protein, 190 aa, Triticum aestivum
  peptide (1)..(190): Ceres Seq. ID no. 13598181
  misc_feature (10)..(82): Pfam Name: DnaJ domain Pfam Description: DnaJ domain
  misc_feature (5)..(130): Homolog of NCBI NO: 18405757 NR Description: DnaJ protein family [Arabidopsis thaliana]
  misc_feature (5)..(130): Homolog of NCBI NO: 21554587 NR Description: DnaJ protein, putative [Arabidopsis thaliana]
  misc_feature (1)..(188): Homolog of NCBI NO: 34912486 NR Description: heat shock protein-like [Oryza sativa (japonica
MQSPSQHQSSYYAVLGVHPGASSAEIRAAYHRLAMRWHPDKIANGRVDPAIAEEAKGRFQKIHEAYQVLSDQKRRELYDAGMYDPLDDDQEEVEGFHDFLQEMLSLMATVGREEPVYSLGELQSMLDGMMQDFTSPQPPPPSSFFSSTSSSTRFGAPSGGAQQQRRPPSRVRPQGFGSSACFSQTAFSGC

SEQ ID NO: 61442 - protein, 156 aa, Triticum aestivum
  peptide (1)..(156): Ceres Seq. ID no. 13598182
  misc_feature (1)..(96): Homolog of NCBI NO: 18405757 NR Description: DnaJ protein family [Arabidopsis thaliana]
  misc_feature (1)..(96): Homolog of NCBI NO: 21554587 NR Description: DnaJ protein, putative [Arabidopsis thaliana]
  misc_feature (1)..(154): Homolog of NCBI NO: 34912486 NR Description: heat shock protein-like [Oryza sativa (japonica
MRWHPDKIANGRVDPAIAEEAKGRFQKIHEAYQVLSDQKRRELYDAGMYDPLDDDQEEVEGFHDFLQEMLSLMATVGREEPVYSLGELQSMLDGMMQDFTSPQPPPPSSFFSSTSSSTRFGAPSGGAQQQRRPPSRVRPQGFGSSACFSQTAFSGC

SEQ ID NO: 61443 - DNA, 1085 bp, Triticum aestivum
  misc_feature (1)..(1085): Ceres Seq. ID no. 13598140
gccaaattatttttgcctgagtcgcactcgcacgcagccttccttcctacctccaccccgcagtagtagcagcagctccatcaccatctcccccctgcttccttcctcggatcggagggggagagcgaccggccgaccaggaggaagcggcggcaggatgagtctcttcggcctcggacggaatcagaagactttccgttccaagaaaagtgctccatcaggcagcaagggggcacagctccgaaagcacatagatgcaaccctcggtagtggaaaccttagggaagctgtgaggctgccttctggagaggatatcaatgaatggcttgctgttaacactgtggacttctttaatcaagttaacctgctgtatggcacactcacagagttctgcacatccgaaagctgcccaacaatgactgcaggcccaaagtatgagtaccgatgggctgatggtgtacagataaagaagcccatagaagtgtcagcaccaaaatacgtggagtacctaatggactggattgaaggccagcttgacaatgaatccttatttcctcagaagcttggcacaccatttccacccaacttcaaggatgttgtaaacacaattttcaagcgcttgtttcgtgtttatgcccacatatatcactcccattttcagaagattgtcagcctcaaggaggaggctcatcttaacacctgcttcaagcacttcattctgtttacgaacgaatttgggctgattgacaagaaagaactggctcccctccaggagctcatcgaatcaatcatcgttccatactgagaaggaaacactgaggctgaaccgaactaaacatggctgctactgagtcttctacaggaatggtcgagcgattgggctatctgcgccaataatttactggcacaaatcttcttgttccatttctttgacataaaaacacaaaaacatgtatattaccagtgatgtatttgtgtgtacatgttcagcagttctcctgtgcaaacgcgattgtactgctataacatgcatgtttgggttcggttgtgatagtaataacattgaaaagggcagttttaagatg

SEQ ID NO: 61444 - protein, 267 aa, Triticum aestivum
  peptide (1)..(267): Ceres Seq. ID no. 13598141
  misc_feature (81)..(264): Pfam Name: Mob1/phocein family Pfam Description: Mob1/phocein family
  misc_feature (55)..(263): Homolog of NCBI NO: 27735029 NR Description: hypothetical protein LOC92597 [Homo sapiens]
  misc_feature (55)..(263): Homolog of NCBI NO: 28277885 NR Description: Similar to hypothetical protein LOC92597 [Danio
  misc_feature (75)..(264): Homolog of NCBI NO: 10800806 NR Description: hypothetical protein [Cicer arietinum]
  misc_feature (60)..(264): Homolog of NCBI NO: 37534032 NR Description: putative F-box protein family
  misc_feature (53)..(264): Homolog of NCBI NO: 19309913 NR Description: Mob1-like protein [Medicago sativa subsp. falcata]
  misc_feature (61)..(267): Homolog of NCBI NO: 15234110 NR Description: expressed protein [Arabidopsis thaliana]
  misc_feature (53)..(267): Homolog of NCBI NO: 26449776 NR Description: unknown protein [Arabidopsis thaliana]
  misc_feature (53)..(267): Homolog of NCBI NO: 32470654 NR Description: unknown [Solanum bulbocastanum]
  misc_feature (53)..(267): Homolog of NCBI NO: 15242430 NR Description: expressed protein [Arabidopsis thaliana]
  misc_feature (53)..(267): Homolog of NCBI NO: 32470635 NR Description: putative Mob1/phocein family protein [Solanum
PNYFCLSRTRTQPSFLPPPRSSSSSSITISPLLPSSDRRGRATGRPGGSGGRMSLFGLGRNQKTFRSKKSAPSGSKGAQLRKHIDATLGSGNLREAVRLPSGEDINEWLAVNTVDFFNQVNLLYGTLTEFCTSESCPTMTAGPKYEYRWADGVQIKKPIEVSAPKYVEYLMDWIEGQLDNESLFPQKLGTPFPPNFKDVVNTIFKRLFRVYAHIYHSHFQKIVSLKEEAHLNTCFKHFILFTNEFGLIDKKELAPLQELIESIIVPY

SEQ ID NO: 61445 - protein, 215 aa, Triticum aestivum
  peptide (1)..(215): Ceres Seq. ID no. 13598142
  misc_feature (29)..(212): Pfam Name: Mob1/phocein family Pfam Description: Mob1/phocein family
  misc_feature (3)..(211): Homolog of NCBI NO: 27735029 NR Description: hypothetical protein LOC92597 [Homo sapiens]
  misc_feature (3)..(211): Homolog of NCBI NO: 28277885 NR Description: Similar to hypothetical protein LOC92597 [Danio
  misc_feature (23)..(212): Homolog of NCBI NO: 10800806 NR Description: hypothetical protein [Cicer arietinum]
  misc_feature (8)..(212): Homolog of NCBI NO: 37534032 NR Description: putative F-box protein family
  misc_feature (1)..(212): Homolog of NCBI NO: 19309913 NR Description: Mob1-like protein [Medicago sativa subsp. falcata]
  misc_feature (9)..(215): Homolog of NCBI NO: 15234110 NR Description: expressed protein [Arabidopsis thaliana]
  misc_feature (1)..(215): Homolog of NCBI NO: 26449776 NR Description: unknown protein [Arabidopsis thaliana]
  misc_feature (1)..(215): Homolog of NCBI NO: 32470654 NR Description: unknown [Solanum bulbocastanum]
  misc_feature (1)..(215): Homolog of NCBI NO: 15242430 NR Description: expressed protein [Arabidopsis thaliana]
  misc_feature (1)..(215): Homolog of NCBI NO: 32470635 NR Description: putative Mob1/phocein family protein [Solanum
MSLFGLGRNQKTFRSKKSAPSGSKGAQLRKHIDATLGSGNLREAVRLPSGEDINEWLAVNTVDFFNQVNLLYGTLTEFCTSESCPTMTAGPKYEYRWADGVQIKKPIEVSAPKYVEYLMDWIEGQLDNESLFPQKLGTPFPPNFKDVVNTIFKRLFRVYAHIYHSHFQKIVSLKEEAHLNTCFKHFILFTNEFGLIDKKELAPLQELIESIIVPY

SEQ ID NO: 61446 - DNA, 774 bp, Triticum aestivum
  misc_feature (1)..(774): Ceres Seq. ID no. 13661770
agataaggaaagctctggttctgcgcacaagctccaaccaaattccgactcctctgcgcagaccaatcaccaatgcctgggcctccttccaccatgtccctgccgaggccgagcaggtgctaccgctgctgctcgtcgtcgacgccgccgccgccgaagcagcgagccgcggagagcaagcggcggcctatccgcggagcgcggctgctgctgacccggagggcgctggcgggcgctgtggcgacggtgacgttggcggtggcgggccgtgccagggcggcggaggagggcggcgagggggtggtgggcgcgttcaagtcgctgttcgacccgaacgaggagaccaaggccgggaaggtgctgcccaaggcgtacctgaaggcggcgcgggaggtggtgcggacgctccgggagtcgctgggggagggcgacgccgccggcgactcggccagcttccgcaggggcgccgactccgccaagacgtccatccgagagttcctcggcggctggagaggccagcccgccgtcgccaaagaggagtcgtatgtggcgctggagaaggccatcaaatcgctggctgagttctactccaaggcagggcccttcgcctcgcttccgggagatgtcaaaaacaagatcctcgacgacctcaacgccgcagaggcctacctctaggtctctttgcttagcggcattgtattttccggcgtaaattcgttatacttgtgtccttttgttgcgacgttatgatgagtaaataataattgacatggt

SEQ ID NO: 61447 - protein, 200 aa, Triticum aestivum
  peptide (1)..(200): Ceres Seq. ID no. 13661771
  misc_feature (50)..(200): Homolog of NCBI NO: 26451618 NR Description: unknown protein [Arabidopsis thaliana]
  misc_feature (50)..(200): Homolog of NCBI NO: 18390518 NR Description: expressed protein [Arabidopsis thaliana]
  misc_feature (1)..(200): Homolog of NCBI NO: 14626275 NR Description: unknown protein [Oryza sativa (japonica
MPGPPSTMSLPRPSRCYRCCSSSTPPPPKQRAAESKRRPIRGARLLLTRRALAGAVATVTLAVAGRARAAEEGGEGVVGAFKSLFDPNEETKAGKVLPKAYLKAAREVVRTLRESLGEGDAAGDSASFRRGADSAKTSIREFLGGWRGQPAVAKEESYVALEKAIKSLAEFYSKAGPFASLPGDVKNKILDDLNAAEAYL

SEQ ID NO: 61448 - protein, 193 aa, Triticum aestivum
  peptide (1)..(193): Ceres Seq. ID no. 13661772
  misc_feature (43)..(193): Homolog of NCBI NO: 26451618 NR Description: unknown protein [Arabidopsis thaliana]
  misc_feature (43)..(193): Homolog of NCBI NO: 18390518 NR Description: expressed protein [Arabidopsis thaliana]
  misc_feature (1)..(193): Homolog of NCBI NO: 14626275 NR Description: unknown protein [Oryza sativa (japonica
MSLPRPSRCYRCCSSSTPPPPKQRAAESKRRPIRGARLLLTRRALAGAVATVTLAVAGRARAAEEGGEGVVGAFKSLFDPNEETKAGKVLPKAYLKAAREVVRTLRESLGEGDAAGDSASFRRGADSAKTSIREFLGGWRGQPAVAKEESYVALEKAIKSLAEFYSKAGPFASLPGDVKNKILDDLNAAEAYL

SEQ ID NO: 61449 - protein, 192 aa, Triticum aestivum
  peptide (1)..(192): Ceres Seq. ID no. 13661773
  misc_feature (48)..(140): Pfam Name: Protein of unknown function, DUF584 Pfam Description: Protein of unknown function, DUF584
  misc_feature (74)..(143): Homolog of NCBI NO: 7439998 NR Description: glycine-rich RNA-binding protein GRP1 -
  misc_feature (74)..(144): Homolog of NCBI NO: 1345540 NR Description: glycine-rich protein [Lycopersicon esculentum]
  misc_feature (74)..(144): Homolog of NCBI NO: 100221 NR Description: glycine-rich protein (clones wM and wN) - tomato
  misc_feature (48)..(136): Homolog of NCBI NO: 14573437 NR Description: mating type protein Mat3p [Chlamydomonas
  misc_feature (45)..(160): Homolog of NCBI NO: 33864553 NR Description: RNA-binding region RNP-1 (RNA recognition motif)
  misc_feature (57)..(144): Homolog of NCBI NO: 1345533 NR Description: glycine-rich protein [Lycopersicon esculentum]
  misc_feature (67)..(142): Homolog of NCBI NO: 15224376 NR Description: glycine-rich protein [Arabidopsis thaliana]
  misc_feature (64)..(192): Homolog of NCBI NO: 29829093 NR Description: putative translation initiation factor IF-2
IRKALVLRTSSNQIPTPLRRPITNAWASFHHVPAEAEQVLPLLLVVDAAAAEAASRGEQAAAYPRSAAAADPEGAGGRCGDGDVGGGGPCQGGGGGRRGGGGRVQVAVRPERGDQGREGAAQGVPEGGAGGGADAPGVAGGGRRRRRLGQLPQGRRLRQDVHPRVPRRLERPARRRQRGVVCGAGEGHQIAG

SEQ ID NO: 61450 - DNA, 971 bp, Triticum aestivum
  misc_feature (1)..(971): Ceres Seq. ID no. 13662063
agtcgtctcccctgtccccctcgtcctcctcccgcaatccaatcacggggacgggtgagcagcgagcgagcgagcgggatggcgacgctgacctcggagctgctgcggccggtgcacgcggcgcaggcgctggacgaggcggcgctgctgcgctacgcggccgcgcacgtcccgggcttccccacgcccgcgccggcgctcgccctcacgcagttcggccacggccagtccaaccccacctactgcatccaggcctccgcgcccggcggggagcccaggcgctacgtgctgcggaagaagcccgccggcgccatcctccagtccgcccacgccgtcgagcgcgagttccaggttctcaaagctttgggtgcctacacggatgttcctgtccctaaggtgttttgcctttgcactgatgccagtgtgatcggaaccccattctacataatggagtatctggaaggagcattatatcttaataacaagttaacgggagtaaccccagagaaacggaggaatatatacttggctgctgcaaaaactttggctgctgtacacaaaattgatacgactgcagttggattgcataagtatggaagaagagacaattattgcaaaagacaagtagaaagatggggaaaacaatatcttcattcaaccggtgaagggaagcctgcacgttatcagaagatgcttgatctgattggttggctgaaagaaaatataccagaagaagattcatcgacaggattgggaactggccttgttcatggtgattatcgtgttgataaccttgtttttcacccaactgaggatcgagtgataggtgtacttgattgggaattatctactttggggaatcagatgtgtgatgttgcttacagctgtatggtatgaaatatgaaactgtattagggaaaatgtgaaataccttcttatacataatattgttggaaattattcacctattt

SEQ ID NO: 61451 - protein, 298 aa, Triticum aestivum
  peptide (1)..(298): Ceres Seq. ID no. 13662064
  misc_feature (4)..(298): Homolog of NCBI NO: 23110028 NR Description: hypothetical protein [Novosphingobium
  misc_feature (27)..(297): Homolog of NCBI NO: 22978608 NR Description: hypothetical protein [Ralstonia metallidurans]
  misc_feature (36)..(297): Homolog of NCBI NO: 22137453 NR Description: 2410021P16Rik protein [Mus musculus]
  misc_feature (21)..(297): Homolog of NCBI NO: 16124554 NR Description: conserved hypothetical protein [Caulobacter
  misc_feature (36)..(297): Homolog of NCBI NO: 17546735 NR Description: CONSERVED HYPOTHETICAL PROTEIN [Ralstonia
  misc_feature (36)..(297): Homolog of NCBI NO: 22983218 NR Description: hypothetical protein [Burkholderia fungorum]
  misc_feature (36)..(297): Homolog of NCBI NO: 31543201 NR Description: hypothetical protein MGC5601 [Homo sapiens]
  misc_feature (27)..(297): Homolog of NCBI NO: 30680020 NR Description: acetyl-coA dehydrogenase -related [Arabidopsis
  misc_feature (27)..(298): Homolog of NCBI NO: 7549633 NR Description: hypothetical protein [Arabidopsis thaliana]
  misc_feature (30)..(297): Homolog of NCBI NO: 34393862 NR Description: putative acyl-CoA dehydrogenase
SRLPCPPRPPPAIQSRGRVSSERASGMATLTSELLRPVHAAQALDEAALLRYAAAHVPGFPTPAPALALTQFGHGQSNPTYCIQASAPGGEPRRYVLRKKPAGAILQSAHAVEREFQVLKALGAYTDVPVPKVFCLCTDASVIGTPFYIMEYLEGALYLNNKLTGVTPEKRRNIYLAAAKTLAAVHKIDTTAVGLHKYGRRDNYCKRQVERWGKQYLHSTGEGKPARYQKMLDLIGWLKENIPEEDSSTGLGTGLVHGDYRVDNLVFHPTEDRVIGVLDWELSTLGNQMCDVAYSCMV

SEQ ID NO: 61452 - protein, 272 aa, Triticum aestivum
  peptide (1)..(272): Ceres Seq. ID no. 13662065
  misc_feature (1)..(272): Homolog of NCBI NO: 23110028 NR Description: hypothetical protein [Novosphingobium
  misc_feature (1)..(271): Homolog of NCBI NO: 22978608 NR Description: hypothetical protein [Ralstonia metallidurans]
  misc_feature (10)..(271): Homolog of NCBI NO: 22137453 NR Description: 2410021P16Rik protein [Mus musculus]
  misc_feature (1)..(271): Homolog of NCBI NO: 16124554 NR Description: conserved hypothetical protein [Caulobacter
  misc_feature (10)..(271): Homolog of NCBI NO: 17546735 NR Description: CONSERVED HYPOTHETICAL PROTEIN [Ralstonia
  misc_feature (10)..(271): Homolog of NCBI NO: 22983218 NR Description: hypothetical protein [Burkholderia fungorum]
  misc_feature (10)..(271): Homolog of NCBI NO: 31543201 NR Description: hypothetical protein MGC5601 [Homo sapiens]
  misc_feature (1)..(271): Homolog of NCBI NO: 30680020 NR Description: acetyl-coA dehydrogenase -related [Arabidopsis
  misc_feature (1)..(272): Homolog of NCBI NO: 7549633 NR Description: hypothetical protein [Arabidopsis thaliana]
  misc_feature (4)..(271): Homolog of NCBI NO: 34393862 NR Description: putative acyl-CoA dehydrogenase
MATLTSELLRPVHAAQALDEAALLRYAAAHVPGFPTPAPALALTQFGHGQSNPTYCIQASAPGGEPRRYVLRKKPAGAILQSAHAVEREFQVLKALGAYTDVPVPKVFCLCTDASVIGTPFYIMEYLEGALYLNNKLTGVTPEKRRNIYLAAAKTLAAVHKIDTTAVGLHKYGRRDNYCKRQVERWGKQYLHSTGEGKPARYQKMLDLIGWLKENIPEEDSSTGLGTGLVHGDYRVDNLVFHPTEDRVIGVLDWELSTLGNQMCDVAYSCMV

SEQ ID NO: 61453 - protein, 149 aa, Triticum aestivum
  peptide (1)..(149): Ceres Seq. ID no. 13662066
  misc_feature (1)..(149): Homolog of NCBI NO: 23110028 NR Description: hypothetical protein [Novosphingobium
  misc_feature (1)..(148): Homolog of NCBI NO: 22978608 NR Description: hypothetical protein [Ralstonia metallidurans]
  misc_feature (1)..(148): Homolog of NCBI NO: 22137453 NR Description: 2410021P16Rik protein [Mus musculus]
  misc_feature (1)..(148): Homolog of NCBI NO: 16124554 NR Description: conserved hypothetical protein [Caulobacter
  misc_feature (1)..(148): Homolog of NCBI NO: 17546735 NR Description: CONSERVED HYPOTHETICAL PROTEIN [Ralstonia
  misc_feature (1)..(148): Homolog of NCBI NO: 22983218 NR Description: hypothetical protein [Burkholderia fungorum]
  misc_feature (1)..(148): Homolog of NCBI NO: 31543201 NR Description: hypothetical protein MGC5601 [Homo sapiens]
  misc_feature (1)..(148): Homolog of NCBI NO: 30680020 NR Description: acetyl-coA dehydrogenase -related [Arabidopsis
  misc_feature (1)..(149): Homolog of NCBI NO: 7549633 NR Description: hypothetical protein [Arabidopsis thaliana]
  misc_feature (1)..(148): Homolog of NCBI NO: 34393862 NR Description: putative acyl-CoA dehydrogenase
MEYLEGALYLNNKLTGVTPEKRRNIYLAAAKTLAAVHKIDTTAVGLHKYGRRDNYCKRQVERWGKQYLHSTGEGKPARYQKMLDLIGWLKENIPEEDSSTGLGTGLVHGDYRVDNLVFHPTEDRVIGVLDWELSTLGNQMCDVAYSCMV

SEQ ID NO: 61454 - DNA, 634 bp, Triticum aestivum
  misc_feature (1)..(634): Ceres Seq. ID no. 12624607
ccgaccctagcgacgcacctcaatggccatggccgcacgcccacgcggctcgccgctcctccgcgccctcgccggcacgagggggccgccgcgggcccgatccatccacgaggggcccgacaccatccacgagctcctggaccgccacctctccaagaagtcccccgccctcgacgacgacgcggcggaggccctggcgcggcggcggctgacgagctcgcggcgggaggcgctggggctgtaccgggacatcctgcgggcgacgcggctgttcgagtggcccgacgagcgcggcgtgccgtggcgcgacacgctgcgcgccaacgcgcgccgcgagttcgaggaggcccgcggcgagcgcgacccggaggtggtcgcgcggctcctcatcggcggccgcgacgcagtcgaccaggccctggagcgcgtcgccgacgcctcgcgccgcatggtccaggccgaggaggccaagcgccgcggcggggcgtagatccccccacacccccaccccgactcgatgcgccccatgcttcctcttcttcttcttcagctgctgctgcttatgtttgttaatttttgttgtaaaatttactatgtacgaaatgagttacttatgaagcatttcttccttgtc

SEQ ID NO: 61455 - protein, 190 aa, Triticum aestivum
  peptide (1)..(190): Ceres Seq. ID no. 12624608
  misc_feature (45)..(185): Pfam Name: Progesterone receptor Pfam Description: Progesterone receptor
  misc_feature (11)..(187): Homolog of NCBI NO: 29247944 NR Description: GLP_26_54603_52153 [Giardia lamblia ATCC 50803]
  misc_feature (7)..(178): Homolog of NCBI NO: 11024339 NR Description: PKSA putative O-methyltransferase; PKSA-ORF6
  misc_feature (18)..(165): Homolog of NCBI NO: 11362193 NR Description: hypothetical protein
  misc_feature (14)..(187): Homolog of NCBI NO: 22962211 NR Description: hypothetical protein [Rhodopseudomonas palustris]
  misc_feature (12)..(159): Homolog of NCBI NO: 25989119 NR Description: unknown [Streptomyces aureofaciens]
  misc_feature (32)..(158): Homolog of NCBI NO: 7469102 NR Description: vrlB protein - Dichelobacter nodosus
  misc_feature (13)..(190): Homolog of NCBI NO: 34894284 NR Description: unnamed protein product [Oryza sativa (japonica
  misc_feature (12)..(185): Homolog of NCBI NO: 29247944 NR Description: GLP_26_54603_52153 [Giardia lamblia ATCC 50803]
  misc_feature (10)..(174): Homolog of NCBI NO: 39583977 NR Description: Hypothetical protein CBG08669 [Caenorhabditis
  misc_feature (17)..(178): Homolog of NCBI NO: 39583977 NR Description: Hypothetical protein CBG08669 [Caenorhabditis
PTLATHLNGHGRTPTRLAAPPRPRRHEGAAAGPIHPRGARHHPRAPGPPPLQEVPRPRRRRGGGPGAAAADELAAGGAGAVPGHPAGDAAVRVARRARRAVARHAARQRAPRVRGGPRRARPGGGRAAPHRRPRRSRPGPGARRRRLAPHGPGRGGQAPRRGVDPPTPPPRLDAPHASSSSSSAAAAYVC

SEQ ID NO: 61456 - protein, 155 aa, Triticum aestivum
  peptide (1)..(155): Ceres Seq. ID no. 12624609
  misc_feature (65)..(134): Pfam Name: Complex 1 protein (LYR family) Pfam Description: Complex 1 protein (LYR family)
  misc_feature (26)..(153): Homolog of NCBI NO: 27754395 NR Description: unknown protein [Arabidopsis thaliana]
  misc_feature (26)..(153): Homolog of NCBI NO: 30699138 NR Description: expressed protein [Arabidopsis thaliana]
  misc_feature (26)..(153): Homolog of NCBI NO: 25373205 NR Description: protein T4O12.26 [imported] - Arabidopsis
MAMAARPRGSPLLRALAGTRGPPRARSIHEGPDTIHELLDRHLSKKSPALDDDAAEALARRRLTSSRREALGLYRDILRATRLFEWPDERGVPWRDTLRANARREFEEARGERDPEVVARLLIGGRDAVDQALERVADASRRMVQAEEAKRRGGA

SEQ ID NO: 61457 - protein, 153 aa, Triticum aestivum
  peptide (1)..(153): Ceres Seq. ID no. 12624610
  misc_feature (63)..(132): Pfam Name: Complex 1 protein (LYR family) Pfam Description: Complex 1 protein (LYR family)
  misc_feature (24)..(151): Homolog of NCBI NO: 27754395 NR Description: unknown protein [Arabidopsis thaliana]
  misc_feature (24)..(151): Homolog of NCBI NO: 30699138 NR Description: expressed protein [Arabidopsis thaliana]
  misc_feature (24)..(151): Homolog of NCBI NO: 25373205 NR Description: protein T4O12.26 [imported] - Arabidopsis
MAARPRGSPLLRALAGTRGPPRARSIHEGPDTIHELLDRHLSKKSPALDDDAAEALARRRLTSSRREALGLYRDILRATRLFEWPDERGVPWRDTLRANARREFEEARGERDPEVVARLLIGGRDAVDQALERVADASRRMVQAEEAKRRGGA

SEQ ID NO: 61458 - DNA, 851 bp, Triticum aestivum
  misc_feature (1)..(851): Ceres Seq. ID no. 12624185
acaggcaagcttagtaaccagccatgaagaccatgaagagatgcattattcctagcatcctgctgatgcattcactcgaggccgtcctcctcgtcgccgccggccgcccttccacggccaccggcgccgacgatgtgggcaccattctcctgccgagccaaggcaaaggtgaccatgccatcattttcttttcctagttcacttcagttcagttagctagctggtgcatgaggaaactggtcacagcttgggtcgttaactgaggacttgcaggcgaagcaggagtggtggcggcagcgaagaagaagggggaagaggaagagaggccatggaaatgctgcgactttgctctgtgcaccaggtcattcccaccgctgtgccgctgcatggacaaggtcgagcagtgtgctgcgacctgcgagaaatgcgagccggccacgtcggactcatcccgccgcgtctgcaacgactggtaccatggcttcccggggcccatgtgcacggaggctgttgcaacagcgaagaaggagaaggcggaagaagaagagaggccgtggaaatgctgtgacttggctctgtgcaccaggtcgttcccgccgatgtgccgctgcctggacaaggtcgagcagtgtgccgcaaactgcaagagctgcgatccggccgcgtcggactcgtcccgccgcgtctgcaacgactggtaccatggcttccccggcgccaagtgcaccgccgacggtaactagcatgcgcgttgatcacctgatcaacgccgtccagcctgagctttagtagctgcagcagcctgcagtgtctgtaagcaacaaaataaaatggaaagtcaggcaatcacg

SEQ ID NO: 61459 - protein, 118 aa, Triticum aestivum
  peptide (1)..(118): Ceres Seq. ID no. 12624186
  misc_feature (59)..(83): Pfam Name: Bowman-Birk serine protease inhibitor family Pfam Description: Bowman-Birk serine protease inhibitor family
  misc_feature (1)..(113): Homolog of NCBI NO: 34895448 NR Description: putative Bowman Birk tryspin inhibitor
  misc_feature (1)..(113): Homolog of NCBI NO: 7635919 NR Description: putative Bowman Birk trypsin inhibitor
  misc_feature (1)..(113): Homolog of NCBI NO: 34895440 NR Description: Bowman Birk trypsin inhibitor
  misc_feature (1)..(113): Homolog of NCBI NO: 7619801 NR Description: Bowman Birk trypsin inhibitor
  misc_feature (1)..(113): Homolog of NCBI NO: 34895436 NR Description: putative Bowman Birk trypsin inhibitor
  misc_feature (1)..(114): Homolog of NCBI NO: 7489819 NR Description: probable trypsin inhibitor - maize
  misc_feature (1)..(116): Homolog of NCBI NO: 7635923 NR Description: putative Bowman Birk tryspin inhibitor
  misc_feature (1)..(113): Homolog of NCBI NO: 34895496 NR Description: P0409B08.18 [Oryza sativa (japonica
  misc_feature (1)..(118): Homolog of NCBI NO: 34895446 NR Description: putative Bowman Birk tryspin inhibitor
  misc_feature (1)..(114): Homolog of NCBI NO: 6730112 NR Description: Chain A, Crystal Structure Of Barley Bbi
MDKVEQCAATCEKCEPATSDSSRRVCNDWYHGFPGPMCTEAVATAKKEKAEEEERPWKCCDLALCTRSFPPMCRCLDKVEQCAANCKSCDPAASDSSRRVCNDWYHGFPGAKCTADGN

SEQ ID NO: 61460 - protein, 103 aa, Triticum aestivum
  peptide (1)..(103): Ceres Seq. ID no. 12624187
MASRGPCARRLLQQRRRRRRKKKRGRGNAVTWLCAPGRSRRCAAAWTRSSSVPQTARAAIRPRRTRPAASATTGTMASPAPSAPPTVTSMRVDHLINAVQPEL

SEQ ID NO: 61461 - protein, 82 aa, Triticum aestivum
  peptide (1)..(82): Ceres Seq. ID no. 12624188
  misc_feature (23)..(47): Pfam Name: Bowman-Birk serine protease inhibitor family Pfam Description: Bowman-Birk serine protease inhibitor family
  misc_feature (1)..(77): Homolog of NCBI NO: 34895448 NR Description: putative Bowman Birk tryspin inhibitor
  misc_feature (1)..(77): Homolog of NCBI NO: 7635919 NR Description: putative Bowman Birk trypsin inhibitor
  misc_feature (1)..(77): Homolog of NCBI NO: 34895440 NR Description: Bowman Birk trypsin inhibitor
  misc_feature (1)..(77): Homolog of NCBI NO: 7619801 NR Description: Bowman Birk trypsin inhibitor
  misc_feature (1)..(77): Homolog of NCBI NO: 34895436 NR Description: putative Bowman Birk trypsin inhibitor
  misc_feature (1)..(78): Homolog of NCBI NO: 7489819 NR Description: probable trypsin inhibitor - maize
  misc_feature (1)..(80): Homolog of NCBI NO: 7635923 NR Description: putative Bowman Birk tryspin inhibitor
  misc_feature (1)..(77): Homolog of NCBI NO: 34895496 NR Description: P0409B08.18 [Oryza sativa (japonica
  misc_feature (1)..(82): Homolog of NCBI NO: 34895446 NR Description: putative Bowman Birk tryspin inhibitor
  misc_feature (1)..(78): Homolog of NCBI NO: 6730112 NR Description: Chain A, Crystal Structure Of Barley Bbi
MCTEAVATAKKEKAEEEERPWKCCDLALCTRSFPPMCRCLDKVEQCAANCKSCDPAASDSSRRVCNDWYHGFPGAKCTADGN

SEQ ID NO: 61462 - DNA, 1080 bp, Triticum aestivum
  misc_feature (1)..(1080): Ceres Seq. ID no. 13661672
agaacatcctaatcgaaaaaaccagacacagagcttgagagagagagagagaagatggcgtacaacgcgtgtttcctacatcagagcgcactagcctcctcctccgtcgcaagatcatcaccttcctcatcatcccagcgctacgtgtcactctctaaactagtctgcaaagcacaacagactcaagaagacgatacctccaccgtctctcgccgtctcgctctcgcacttctcgtcggcgccgctgcggttggttccaaagtgtctcccgccgatgctgcctacggtgaagctgcaaatgtgtttgggaagccaaagacaaacacagacttcactgcgtacaatggagatggattccaagtgcaggtgccagctaagtggaacccaagcagagaggtagagtatccaggacaagtccttaggtacgaagacaactttgacgctactagcaatctcaatgtcatggtcactcctaccgacaagaagtccatcactgattacggttctcctgaagagttcctctctcaggtcaactatcttctcgggaaacaagcgtacttcggtgagactgcctctgagggaggctttgacaacaatgcagtggcaacagcaaacattctggagacaaacattcaggacgttggtgggaaaccatactattacttgtcggtgttgacaagaacagccgatggagatgaaggtggtaagcatcagctgatcacagccaccgtgaatggagggaagctttatatctgcaaagcacaagctggagacaagaggtggttcaagggagccaataaatttgtggagaaagcagccatttctttcagtgttgcttgattaaaaaagctgcacaacagaagaactatatgctctgcttgttgttatcttcatttgtctcttgtaaagaatggaaaaatgaaacttagcttctgagaactatcaagatggtgatgttacctttgcggctttttcaaaattatattcggtagatctttgctcattagtataatggttgctcaaactaaagacactgactcaagaaaaagctatagactaattctaaatccttgaaaacct

SEQ ID NO: 61463 - protein, 261 aa, Triticum aestivum
  peptide (1)..(261): Ceres Seq. ID no. 13661673
  misc_feature (59)..(261): Pfam Name: PsbP Pfam Description: PsbP
  misc_feature (1)..(261): Homolog of NCBI NO: 417604 NR Description: 23 kDa polypeptide of water-oxidizing complex of
  misc_feature (1)..(261): Homolog of NCBI NO: 15224572 NR Description: photosystem II oxygen-evolving complex 23 (OEC23)
  misc_feature (6)..(261): Homolog of NCBI NO: 1345550 NR Description: 23-kDa ploypeptide of photosystem II
  misc_feature (8)..(261): Homolog of NCBI NO: 19898 NR Description: photosystem II 23 kDa polypeptide [Nicotiana
  misc_feature (1)..(261): Homolog of NCBI NO: 7443216 NR Description: photosystem II oxygen-evolving complex protein 2
  misc_feature (45)..(261): Homolog of NCBI NO: 11134091 NR Description: Oxygen-evolving enhancer protein 2, chloroplast (OEE2) (23 kDa subunit of oxygen evolving system of photosystem (OEC 23 kDa subunit) (23 kDa thylakoid membrane protein) of
  misc_feature (1)..(261): Homolog of NCBI NO: 11133887 NR Description: OXYGEN-EVOLVING ENHANCER PROTEIN 2-2, CHLOROPLAST (OEE2) (23 KDA SUBUNIT OF OXYGEN EVOLVING SYSTEM OF PHOTOSYSTEM
  misc_feature (1)..(261): Homolog of NCBI NO: 15222166 NR Description: photosystem II oxygen-evolving complex 23 (OEC23)
  misc_feature (15)..(261): Homolog of NCBI NO: 81723 NR Description: photosystem II oxygen-evolving complex protein 2
  misc_feature (1)..(261): Homolog of NCBI NO: 131391 NR Description: Oxygen-evolving enhancer protein 2, chloroplast (OEE2) (23 kDa subunit of oxygen evolving system of photosystem
MAYNACFLHQSALASSSVARSSPSSSSQRYVSLSKLVCKAQQTQEDDTSTVSRRLALALLVGAAAVGSKVSPADAAYGEAANVFGKPKTNTDFTAYNGDGFQVQVPAKWNPSREVEYPGQVLRYEDNFDATSNLNVMVTPTDKKSITDYGSPEEFLSQVNYLLGKQAYFGETASEGGFDNNAVATANILETNIQDVGGKPYYYLSVLTRTADGDEGGKHQLITATVNGGKLYICKAQAGDKRWFKGANKFVEKAAISFSVA

SEQ ID NO: 61464 - DNA, 869 bp, Triticum aestivum
  misc_feature (1)..(869): Ceres Seq. ID no. 13661512
atcgaaaaaccacaaaagctctgtttctcatatctcctctctgttttcatcagatatctaaagacagcgtttgatttcaacagctatggtgagaatcttccttctctacaatctcttaaactcttttctcctctctttagtaccaaagaagctacgaagtctcttccctctctcttggttcgacaaaactccccacaagarctcatccatgttaccatctccctcaccatcctctgctccaacgagaaaaacagatccctccgagctgaaacgcgttttccagaccttcgacaagaacggagacggccgaatcaccaaaaccgagctcaacgactcgctagagaatcttggaatctacataccagacaaagacctcactcagatgatccacaacatcgacgccaacggcgatgggtgcgtggacatagacgagttcgagtccctgtacagctccatcgtcgatgagcatcgcaaggatggagaaacagaggaagatgacatgaaagacgcgtttaacgtgtttgaccaggacggagatggtttcatcactgtggaggagttgaagtctgtgatgggttccttgggactcaagcaaggtaaaacattggaaggctgcaagaagatgattatgcaagtggatggtgatggagatggtagagtcaattacaaagagtttcttcagatgatgagaggtggtggttttagctgcagtaataactgatctttatttaggatttaacgtaagagtgtgtgtgtttatttgtttaacttgtttgttttcctttttatgtgtaaatattttttttttttgatgatgcatcaagtgtgtaattttttttttcctttttaggatttctctaaggttatgt

SEQ ID NO: 61465 - protein, 211 aa, Triticum aestivum
  peptide (1)..(211): Ceres Seq. ID no. 15220107
  misc_feature (176)..(204): Pfam Name: EF hand Pfam Description: EF hand
  misc_feature (18)..(205): Homolog of NCBI NO: 19386815 NR Description: B1147A04.10 [Oryza sativa (japonica
  misc_feature (35)..(207): Homolog of NCBI NO: 21740787 NR Description: OSJNBb0091E11.1 [Oryza sativa (japonica
  misc_feature (57)..(211): Homolog of NCBI NO: 15235516 NR Description: calcium-binding protein, putative [Arabidopsis
  misc_feature (57)..(209): Homolog of NCBI NO: 15236276 NR Description: calcium-binding protein, putative [Arabidopsis
  misc_feature (57)..(207): Homolog of NCBI NO: 15231470 NR Description: calcium-binding protein, putative [Arabidopsis
  misc_feature (57)..(207): Homolog of NCBI NO: 15221358 NR Description: calcium-binding protein, putative [Arabidopsis
  misc_feature (55)..(207): Homolog of NCBI NO: 28301674 NR Description: calcium-binding protein [Lotus japonicus]
  misc_feature (1)..(207): Homolog of NCBI NO: 15231685 NR Description: calcium-binding protein, putative [Arabidopsis
  misc_feature (42)..(210): Homolog of NCBI NO: 25295758 NR Description: probable calcium binding protein [imported] -
  misc_feature (1)..(210): Homolog of NCBI NO: 18406202 NR Description: calmodulin-like protein (MSS3) [Arabidopsis
  misc_feature (39)..(39): Xaa is any aa, unknown or other
MVRIFLLYNLLNSFLLSLVPKKLRSLFPLSWFDKTPHKXSSMLPSPSPSSAPTRKTDPSELKRVFQTFDKNGDGRITKTELNDSLENLGIYIPDKDLTQMIHNIDANGDGCVDIDEFESLYSSIVDEHRKDGETEEDDMKDAFNVFDQDGDGFITVEELKSVMGSLGLKQGKTLEGCKKMIMQVDGDGDGRVNYKEFLQMMRGGGFSCSNN

SEQ ID NO: 61466 - protein, 170 aa, Triticum aestivum
  peptide (1)..(170): Ceres Seq. ID no. 15220108
  misc_feature (135)..(163): Pfam Name: EF hand Pfam Description: EF hand
  misc_feature (1)..(164): Homolog of NCBI NO: 19386815 NR Description: B1147A04.10 [Oryza sativa (japonica
  misc_feature (1)..(166): Homolog of NCBI NO: 21740787 NR Description: OSJNBb0091E11.1 [Oryza sativa (japonica
  misc_feature (16)..(170): Homolog of NCBI NO: 15235516 NR Description: calcium-binding protein, putative [Arabidopsis
  misc_feature (16)..(168): Homolog of NCBI NO: 15236276 NR Description: calcium-binding protein, putative [Arabidopsis
  misc_feature (16)..(166): Homolog of NCBI NO: 15231470 NR Description: calcium-binding protein, putative [Arabidopsis
  misc_feature (16)..(166): Homolog of NCBI NO: 15221358 NR Description: calcium-binding protein, putative [Arabidopsis
  misc_feature (14)..(166): Homolog of NCBI NO: 28301674 NR Description: calcium-binding protein [Lotus japonicus]
  misc_feature (1)..(166): Homolog of NCBI NO: 15231685 NR Description: calcium-binding protein, putative [Arabidopsis
  misc_feature (1)..(169): Homolog of NCBI NO: 25295758 NR Description: probable calcium binding protein [imported] -
  misc_feature (1)..(169): Homolog of NCBI NO: 18406202 NR Description: calmodulin-like protein (MSS3) [Arabidopsis
MLPSPSPSSAPTRKTDPSELKRVFQTFDKNGDGRITKTELNDSLENLGIYIPDKDLTQMIHNIDANGDGCVDIDEFESLYSSIVDEHRKDGETEEDDMKDAFNVFDQDGDGFITVEELKSVMGSLGLKQGKTLEGCKKMIMQVDGDGDGRVNYKEFLQMMRGGGFSCSNN

SEQ ID NO: 61467 - protein, 154 aa, Triticum aestivum
  peptide (1)..(154): Ceres Seq. ID no. 15220109
  misc_feature (67)..(67): Xaa is any aa, unknown or other
IEKPQKLCFSYLLSVFIRYLKTAFDFNSYGENLPSLQSLKLFSPLFSTKEATKSLPSLLVRQNSPQXLIHVTISLTILCSNEKNRSLRAETRFPDLRQERRRPNHQNRAQRLARESWNLHTRQRPHSDDPQHRRQRRWVRGHRRVRVPVQLHRR

SEQ ID NO: 61468 - DNA, 1060 bp, Triticum aestivum
  misc_feature (1)..(1060): Ceres Seq. ID no. 13661778
actagcttccagcgcacacttgtcaccttcctccccgcaacgcatccagctaccccgtctcactcccgacccatcccaccagcaccaggacagacacggacaggacgatggagtcacccatggcggcccggaggctcctgcaggaggcggcgggcctgtccacgccgggcgcccggatcatcgccgacgacagggacatcgtcatcatcctcgcctcgctgctctgcgcgctcatcaccgtcctcggcatcggcctcgtcgcccgctggtgcgcgtgcggcggcgcggaagccagggcgcgcgccgccgccaaccngggcgtcaagaagtcggtgctccgcgccatccccaccgtcgcctacgtctccgccgacgccggcaagggcaagggcaaggaggcagaggaggccgccgcggcgccggagtgcgccatctgcctcgccgagttcgaggacggcgaggccatgcgcgtgctgccccagtgcggccacgccttccacgccgcctgcgtcgacaagtggctgcgcggccactcttcttgcccctcctgccgccggatcctcgccgtccagctgccggctgcccagcggtgccagcgctgcggcgcgcgccccgacccagccgtggcgacctggaagcctccggcccagtacggcgagatgccgcccttcttgccgtagcggctcgcgcgcgcgctcgatctccacagatctgggcgagagctagaagacgactagtagcagaggaaccagtcaaccaatcgatgagccttctgtttggtcaaatatctcggctgcttctcttaattaccttcctttgtttatctcatcatcagtagcagttcttcttaccgccgagctggaaatgcatagcatttctgaatttaggaccctggtatgcaggtgggtggtgatcaaggtgttgccactacatcttagcagctttgtacatttgtaaatagtaactataattactcctaaggagtaatcggcatcatcgattaggcttatctgaaactgtgaatacctttgctttccatgaatccatttggtcaattctg

SEQ ID NO: 61469 - protein, 278 aa, Triticum aestivum
  peptide (1)..(278): Ceres Seq. ID no. 13661779
  misc_feature (14)..(103): Pfam Name: Sperm histone P2 Pfam Description: Sperm histone P2
  misc_feature (105)..(105): Xaa is any aa, unknown or other
LASSAHLSPSSPQRIQLPRLTPDPSHQHQDRHGQDDGVTHGGPEAPAGGGGPVHAGRPDHRRRQGHRHHPRLAALRAHHRPRHRPRRPLVRVRRRGSQGARRRQXGRQEVGAPRHPHRRLRLRRRRQGQGQGGRGGRRGAGVRHLPRRVRGRRGHARAAPVRPRLPRRLRRQVAARPLFLPLLPPDPRRPAAGCPAVPALRRAPRPSRGDLEASGPVRRDAALLAVAARARARSPQIWARARRRLVAEEPVNQSMSLLFGQISRLLLLITFLCLSHHQ

SEQ ID NO: 61470 - protein, 241 aa, Triticum aestivum
  peptide (1)..(241): Ceres Seq. ID no. 13661780
  misc_feature (60)..(241): Pfam Name: Equine herpesvirus glycoprotein gp2 Pfam Description: Equine herpesvirus glycoprotein gp2
  misc_feature (47)..(241): Homolog of NCBI NO: 5420387 NR Description: proteophosphoglycan [Leishmania major]
  misc_feature (43)..(241): Homolog of NCBI NO: 13592175 NR Description: ppg3 [Leishmania major]
  misc_feature (12)..(241): Homolog of NCBI NO: 13592175 NR Description: ppg3 [Leishmania major]
  misc_feature (43)..(241): Homolog of NCBI NO: 5420387 NR Description: proteophosphoglycan [Leishmania major]
  misc_feature (13)..(241): Homolog of NCBI NO: 13592175 NR Description: ppg3 [Leishmania major]
  misc_feature (46)..(241): Homolog of NCBI NO: 13592175 NR Description: ppg3 [Leishmania major]
  misc_feature (12)..(241): Homolog of NCBI NO: 13592175 NR Description: ppg3 [Leishmania major]
  misc_feature (12)..(241): Homolog of NCBI NO: 13592175 NR Description: ppg3 [Leishmania major]
  misc_feature (12)..(241): Homolog of NCBI NO: 13592175 NR Description: ppg3 [Leishmania major]
  misc_feature (17)..(241): Homolog of NCBI NO: 11359723 NR Description: proteophosphoglycan, membrane-associated
  misc_feature (106)..(106): Xaa is any aa, unknown or other
TSFQRTLVTFLPATHPATPSHSRPIPPAPGQTRTGRWSHPWRPGGSCRRRRACPRRAPGSSPTTGTSSSSSPRCSARSSPSSASASSPAGARAAARKPGRAPPPTXASRSRCSAPSPPSPTSPPTPARARARRQRRPPRRRSAPSASPSSRTARPCACCPSAATPSTPPASTSGCAATLLAPPAAGSSPSSCRLPSGASAAARAPTQPWRPGSLRPSTARCRPSCRSGSRARSISTDLGES

SEQ ID NO: 61471 - protein, 190 aa, Triticum aestivum
  peptide (1)..(190): Ceres Seq. ID no. 13661781
  misc_feature (107)..(148): Pfam Name: Zinc finger, C3HC4 type (RING finger) Pfam Description: Zinc finger, C3HC4 type (RING finger)
  misc_feature (58)..(167): Homolog of NCBI NO: 37536508 NR Description: putative ring finger protein
  misc_feature (3)..(149): Homolog of NCBI NO: 34907826 NR Description: P0485B12.26 [Oryza sativa (japonica
  misc_feature (28)..(152): Homolog of NCBI NO: 15241087 NR Description: expressed protein [Arabidopsis thaliana]
  misc_feature (20)..(190): Homolog of NCBI NO: 15237013 NR Description: RING-H2 finger protein RHA3b [Arabidopsis
  misc_feature (9)..(169): Homolog of NCBI NO: 21555237 NR Description: putative RING zinc finger protein [Arabidopsis
  misc_feature (9)..(169): Homolog of NCBI NO: 15223041 NR Description: RING zinc finger protein -related [Arabidopsis
  misc_feature (9)..(169): Homolog of NCBI NO: 15218042 NR Description: RING zinc finger protein -related [Arabidopsis
  misc_feature (9)..(166): Homolog of NCBI NO: 15227839 NR Description: RING zinc finger protein -related [Arabidopsis
  misc_feature (1)..(182): Homolog of NCBI NO: 7489432 NR Description: probable ring finger protein - barley
  misc_feature (5)..(190): Homolog of NCBI NO: 32487554 NR Description: OSJNBa0013K16.6 [Oryza sativa (japonica
  misc_feature (70)..(70): Xaa is any aa, unknown or other
MESPMAARRLLQEAAGLSTPGARIIADDRDIVIILASLLCALITVLGIGLVARWCACGGAEARARAAANXGVKKSVLRAIPTVAYVSADAGKGKGKEAEEAAAAPECAICLAEFEDGEAMRVLPQCGHAFHAACVDKWLRGHSSCPSCRRILAVQLPAAQRCQRCGARPDPAVATWKPPAQYGEMPPFLP

SEQ ID NO: 61472 - DNA, 678 bp, Triticum aestivum
  misc_feature (1)..(678): Ceres Seq. ID no. 13598194
gtttttgagaggcttctggaaatccgtggtgtagtaagcggctaggcggtagccaccgatgcctgcgacgccggcggccagccccgggtgcgctgggctgccggcgcaacctccgacgagctcactccccggatttgaaggcccccctagccggctgggcgttcggaggccggcatgggtcgtccgcaccgagtctaatgttaggagagaaagaccaaaacgacctgatcctccatgcaccatctgcaaaggcactgggacaataaattgccgcaactgtttcggtagaggaagaataaatcatgtcgatctcgccgtgctccccaagggagaatggccgcaatggtgccaaatatgcgggggtagcggcctagattactgccaccggtgccatggaacaggtgaatatcgagaacccatgggctttcacttcacagtcaataggaaatgagtgtcgcacaggcagtgttggaaggccggccaagtcaaatggtcaggaaaaaaaaatgtcccattgaggccataggattaacatttgaatgagctgtgtgaagttactgtgaaaactttgatcttatgctaatgctgcagaattttcttgccagcaaagaaacattagatgtagattatgatcagaggctaagggtcttcagttttatcaaccggctaaatttgtgt

SEQ ID NO: 61473 - protein, 130 aa, Triticum aestivum
  peptide (1)..(130): Ceres Seq. ID no. 13598195
  misc_feature (65)..(115): Pfam Name: DnaJ central domain (4 repeats) Pfam Description: DnaJ central domain (4 repeats)
  misc_feature (2)..(116): Homolog of NCBI NO: 15229091 NR Description: hypothetical protein [Arabidopsis thaliana]
  misc_feature (2)..(125): Homolog of NCBI NO: 9294155 NR Description: gene_id:MKP6.23~unknown protein [Arabidopsis
  misc_feature (1)..(130): Homolog of NCBI NO: 38346709 NR Description: OSJNBa0086O06.7 [Oryza sativa (japonica
MPATPAASPGCAGLPAQPPTSSLPGFEGPPSRLGVRRPAWVVRTESNVRRERPKRPDPPCTICKGTGTINCRNCFGRGRINHVDLAVLPKGEWPQWCQICGGSGLDYCHRCHGTGEYREPMGFHFTVNRK

SEQ ID NO: 61474 - DNA, 1017 bp, Triticum aestivum
  misc_feature (1)..(1017): Ceres Seq. ID no. 13661548
gtcaacaattcatcgttgagacacgactcgaggcaccaaaacgccacacttcttctcgaaacatccatccagcctcgtcgccggcgacctcacccgccgccgcagccgccgccgaagatgccggtcagggtggtcgacaccgccaccccttcctcgcagtcctcatcaggacaagaggcaaatgctgtgcagccgtctcctcctagctgctcactcttaactgctggaagatgttttgcaggaactcagaatgtttcaagtttacaaaaagatgaagcatggaaagtcaatgttcgtatccatggttgtgatattgaacagggttatttatgtggaacaatggaggcacttaatgttcccttagccgacacacctgtggtgacattctgggagggggagatagtagatgctaaaaattataccttttttactggcaagtgggaggcatcagcagaggatgatgtaagacactggtccaagttcccatcatttacccctcttctgagtcagattgaggcagatggtggcaagtctgtggaccttagcaactatccttatatatttatgagatggaaagagcagtactttgttaatgtgggagtggactgcgggttgaccatagctggtttctattacgtctgcttttcttgtagcgatggatccattagtggcttttattacgacccaaacagcagtccatttcagaagcttgaattgaagtgcaccaacgagaaacaatctgggttcaccttttcttcgtatgagctgcagtgacatgcatgacgctattaattgaagtggcagagattaacgggcgaacttcctgtgcttgccaatatgaacatatactgtgtgtgtattgaacccgtagttcctgatgttcctttgaaatagttgagatgttatgtatgtatggttgtgccagaccaaacaattatgtaacttatccttttgcaatctcagtattctgggaaaaaagtatcaatttgtttattttatcgaaagttcgcctgtgtt

SEQ ID NO: 61475 - protein, 257 aa, Triticum aestivum
  peptide (1)..(257): Ceres Seq. ID no. 15220115
  misc_feature (4)..(240): Homolog of NCBI NO: 40747141 NR Description: hypothetical protein AN1179.2 [Aspergillus
  misc_feature (40)..(239): Homolog of NCBI NO: 34328469 NR Description: RIKEN cDNA 4933439F18 [Mus musculus]
  misc_feature (40)..(239): Homolog of NCBI NO: 12848536 NR Description: unnamed protein product [Mus musculus]
  misc_feature (40)..(239): Homolog of NCBI NO: 34870809 NR Description: similar to RIKEN cDNA 4933439F18 [Rattus
  misc_feature (8)..(239): Homolog of NCBI NO: 18676842 NR Description: unnamed protein product [Homo sapiens]
  misc_feature (8)..(239): Homolog of NCBI NO: 23111007 NR Description: hypothetical protein MGC3048 [Homo sapiens]
  misc_feature (165)..(257): Homolog of NCBI NO: 34895748 NR Description: P0024G09.20 [Oryza sativa (japonica
  misc_feature (182)..(232): Homolog of NCBI NO: 15224341 NR Description: expressed protein [Arabidopsis thaliana]
  misc_feature (74)..(167): Homolog of NCBI NO: 15224341 NR Description: expressed protein [Arabidopsis thaliana]
  misc_feature (40)..(257): Homolog of NCBI NO: 29150393 NR Description: unknown protein [Oryza sativa (japonica
VNNSSLRHDSRHQNATLLLETSIQPRRRRPHPPPQPPPKMPVRVVDTATPSSQSSSGQEANAVQPSPPSCSLLTAGRCFAGTQNVSSLQKDEAWKVNVRIHGCDIEQGYLCGTMEALNVPLADTPVVTFWEGEIVDAKNYTFFTGKWEASAEDDVRHWSKFPSFTPLLSQIEADGGKSVDLSNYPYIFMRWKEQYFVNVGVDCGLTIAGFYYVCFSCSDGSISGFYYDPNSSPFQKLELKCTNEKQSGFTFSSYELQ

SEQ ID NO: 61476 - protein, 218 aa, Triticum aestivum
  peptide (1)..(218): Ceres Seq. ID no. 15220116
  misc_feature (1)..(201): Homolog of NCBI NO: 40747141 NR Description: hypothetical protein AN1179.2 [Aspergillus
  misc_feature (1)..(200): Homolog of NCBI NO: 34328469 NR Description: RIKEN cDNA 4933439F18 [Mus musculus]
  misc_feature (1)..(200): Homolog of NCBI NO: 12848536 NR Description: unnamed protein product [Mus musculus]
  misc_feature (1)..(200): Homolog of NCBI NO: 34870809 NR Description: similar to RIKEN cDNA 4933439F18 [Rattus
  misc_feature (1)..(200): Homolog of NCBI NO: 18676842 NR Description: unnamed protein product [Homo sapiens]
  misc_feature (1)..(200): Homolog of NCBI NO: 23111007 NR Description: hypothetical protein MGC3048 [Homo sapiens]
  misc_feature (126)..(218): Homolog of NCBI NO: 34895748 NR Description: P0024G09.20 [Oryza sativa (japonica
  misc_feature (143)..(193): Homolog of NCBI NO: 15224341 NR Description: expressed protein [Arabidopsis thaliana]
  misc_feature (35)..(128): Homolog of NCBI NO: 15224341 NR Description: expressed protein [Arabidopsis thaliana]
  misc_feature (1)..(218): Homolog of NCBI NO: 29150393 NR Description: unknown protein [Oryza sativa (japonica
MPVRVVDTATPSSQSSSGQEANAVQPSPPSCSLLTAGRCFAGTQNVSSLQKDEAWKVNVRIHGCDIEQGYLCGTMEALNVPLADTPVVTFWEGEIVDAKNYTFFTGKWEASAEDDVRHWSKFPSFTPLLSQIEADGGKSVDLSNYPYIFMRWKEQYFVNVGVDCGLTIAGFYYVCFSCSDGSISGFYYDPNSSPFQKLELKCTNEKQSGFTFSSYELQ

SEQ ID NO: 61477 - protein, 144 aa, Triticum aestivum
  peptide (1)..(144): Ceres Seq. ID no. 15220117
  misc_feature (1)..(127): Homolog of NCBI NO: 40747141 NR Description: hypothetical protein AN1179.2 [Aspergillus
  misc_feature (1)..(126): Homolog of NCBI NO: 34328469 NR Description: RIKEN cDNA 4933439F18 [Mus musculus]
  misc_feature (1)..(126): Homolog of NCBI NO: 12848536 NR Description: unnamed protein product [Mus musculus]
  misc_feature (1)..(126): Homolog of NCBI NO: 34870809 NR Description: similar to RIKEN cDNA 4933439F18 [Rattus
  misc_feature (1)..(126): Homolog of NCBI NO: 18676842 NR Description: unnamed protein product [Homo sapiens]
  misc_feature (1)..(126): Homolog of NCBI NO: 23111007 NR Description: hypothetical protein MGC3048 [Homo sapiens]
  misc_feature (52)..(144): Homolog of NCBI NO: 34895748 NR Description: P0024G09.20 [Oryza sativa (japonica
  misc_feature (69)..(119): Homolog of NCBI NO: 15224341 NR Description: expressed protein [Arabidopsis thaliana]
  misc_feature (1)..(54): Homolog of NCBI NO: 15224341 NR Description: expressed protein [Arabidopsis thaliana]
  misc_feature (1)..(144): Homolog of NCBI NO: 29150393 NR Description: unknown protein [Oryza sativa (japonica
MEALNVPLADTPVVTFWEGEIVDAKNYTFFTGKWEASAEDDVRHWSKFPSFTPLLSQIEADGGKSVDLSNYPYIFMRWKEQYFVNVGVDCGLTIAGFYYVCFSCSDGSISGFYYDPNSSPFQKLELKCTNEKQSGFTFSSYELQ

SEQ ID NO: 61478 - DNA, 701 bp, Triticum aestivum
  misc_feature (1)..(701): Ceres Seq. ID no. 13661786
acctagaacatcctaatcgaaaaacacaacacacaatccaagttaaagaaaccgttacaaaaagaaaagaaaaactacgttgtttcttgaaaatggagattcttaagttcgctgtcatttttgtactttgctccatctcgtcgtctaacgccgcaactacaccgccgagcggcggagcaggagatgctcactcaatgccatgtatacaaaaactgatgccgtgtcagccgtatcttcgctcagtcactccgccgcctccagcgtcgtgttgtatgccgctgaaggagatcgtcgagaccgacgtgaactgtctttgctccgtcttcaacaacgtagatatgcttaaatcgcttaaccttactaaagaaaacgctcttgttctccccaaagcttgtggcgccaacgctgatgtgtcgcagtgcaaagccagcaccggtactacgacgccttcgacgtcaccaggaactactaaaactcctccggcagctcccgctgaaagcggatctacgggaggttcagcttcttcaacggccaaaccatcagactcggctccggccatcattttttctggaattagcttcgcctccgctttcgtggcattggcaacaatctttttctgatatcctactaattagtcacgtctttattcagcttagttggtttaaaatgttggaaactactattatcagacaatattcggt

SEQ ID NO: 61479 - protein, 205 aa, Triticum aestivum
  peptide (1)..(205): Ceres Seq. ID no. 13661787
  misc_feature (67)..(140): Pfam Name: Protease inhibitor/seed storage/LTP family Pfam Description: Protease inhibitor/seed storage/LTP family
  misc_feature (67)..(177): Homolog of NCBI NO: 30696757 NR Description: protease inhibitor/seed storage/lipid transfer
  misc_feature (67)..(192): Homolog of NCBI NO: 15221585 NR Description: protease inhibitor/seed storage/lipid transfer
  misc_feature (37)..(201): Homolog of NCBI NO: 25553602 NR Description: OJ1656_E11.34 [Oryza sativa (japonica
  misc_feature (61)..(203): Homolog of NCBI NO: 7484433 NR Description: lipid transfer protein - Norway spruce
  misc_feature (60)..(153): Homolog of NCBI NO: 25406275 NR Description: hypothetical protein F6D5.6 [imported] -
  misc_feature (60)..(153): Homolog of NCBI NO: 15219496 NR Description: protease inhibitor/seed storage/lipid transfer
  misc_feature (31)..(140): Homolog of NCBI NO: 25406276 NR Description: probable lipid transfer protein F6D5.5
  misc_feature (31)..(162): Homolog of NCBI NO: 21593596 NR Description: lipid transfer protein, putative [Arabidopsis
  misc_feature (31)..(162): Homolog of NCBI NO: 18410388 NR Description: lipid transfer protein family [Arabidopsis
  misc_feature (31)..(205): Homolog of NCBI NO: 15221052 NR Description: lipid transfer protein family [Arabidopsis
LEHPNRKTQHTIQVKETVTKRKEKLRCFLKMEILKFAVIFVLCSISSSNAATTPPSGGAGDAHSMPCIQKLMPCQPYLRSVTPPPPASCCMPLKEIVETDVNCLCSVFNNVDMLKSLNLTKENALVLPKACGANADVSQCKASTGTTTPSTSPGTTKTPPAAPAESGSTGGSASSTAKPSDSAPAIIFSGISFASAFVALATIFF

SEQ ID NO: 61480 - protein, 175 aa, Triticum aestivum
  peptide (1)..(175): Ceres Seq. ID no. 13661788
  misc_feature (37)..(110): Pfam Name: Protease inhibitor/seed storage/LTP family Pfam Description: Protease inhibitor/seed storage/LTP family
  misc_feature (37)..(147): Homolog of NCBI NO: 30696757 NR Description: protease inhibitor/seed storage/lipid transfer
  misc_feature (37)..(162): Homolog of NCBI NO: 15221585 NR Description: protease inhibitor/seed storage/lipid transfer
  misc_feature (7)..(171): Homolog of NCBI NO: 25553602 NR Description: OJ1656_E11.34 [Oryza sativa (japonica
  misc_feature (31)..(173): Homolog of NCBI NO: 7484433 NR Description: lipid transfer protein - Norway spruce
  misc_feature (30)..(123): Homolog of NCBI NO: 25406275 NR Description: hypothetical protein F6D5.6 [imported] -
  misc_feature (30)..(123): Homolog of NCBI NO: 15219496 NR Description: protease inhibitor/seed storage/lipid transfer
  misc_feature (1)..(110): Homolog of NCBI NO: 25406276 NR Description: probable lipid transfer protein F6D5.5
  misc_feature (1)..(132): Homolog of NCBI NO: 21593596 NR Description: lipid transfer protein, putative [Arabidopsis
  misc_feature (1)..(132): Homolog of NCBI NO: 18410388 NR Description: lipid transfer protein family [Arabidopsis
  misc_feature (1)..(175): Homolog of NCBI NO: 15221052 NR Description: lipid transfer protein family [Arabidopsis
MEILKFAVIFVLCSISSSNAATTPPSGGAGDAHSMPCIQKLMPCQPYLRSVTPPPPASCCMPLKEIVETDVNCLCSVFNNVDMLKSLNLTKENALVLPKACGANADVSQCKASTGTTTPSTSPGTTKTPPAAPAESGSTGGSASSTAKPSDSAPAIIFSGISFASAFVALATIFF

SEQ ID NO: 61481 - protein, 141 aa, Triticum aestivum
  peptide (1)..(141): Ceres Seq. ID no. 13661789
  misc_feature (3)..(76): Pfam Name: Protease inhibitor/seed storage/LTP family Pfam Description: Protease inhibitor/seed storage/LTP family
  misc_feature (3)..(113): Homolog of NCBI NO: 30696757 NR Description: protease inhibitor/seed storage/lipid transfer
  misc_feature (3)..(128): Homolog of NCBI NO: 15221585 NR Description: protease inhibitor/seed storage/lipid transfer
  misc_feature (1)..(137): Homolog of NCBI NO: 25553602 NR Description: OJ1656_E11.34 [Oryza sativa (japonica
  misc_feature (1)..(139): Homolog of NCBI NO: 7484433 NR Description: lipid transfer protein - Norway spruce
  misc_feature (1)..(89): Homolog of NCBI NO: 25406275 NR Description: hypothetical protein F6D5.6 [imported] -
  misc_feature (1)..(89): Homolog of NCBI NO: 15219496 NR Description: protease inhibitor/seed storage/lipid transfer
  misc_feature (1)..(76): Homolog of NCBI NO: 25406276 NR Description: probable lipid transfer protein F6D5.5
  misc_feature (1)..(98): Homolog of NCBI NO: 21593596 NR Description: lipid transfer protein, putative [Arabidopsis
  misc_feature (1)..(98): Homolog of NCBI NO: 18410388 NR Description: lipid transfer protein family [Arabidopsis
  misc_feature (1)..(141): Homolog of NCBI NO: 15221052 NR Description: lipid transfer protein family [Arabidopsis
MPCIQKLMPCQPYLRSVTPPPPASCCMPLKEIVETDVNCLCSVFNNVDMLKSLNLTKENALVLPKACGANADVSQCKASTGTTTPSTSPGTTKTPPAAPAESGSTGGSASSTAKPSDSAPAIIFSGISFASAFVALATIFF

SEQ ID NO: 61482 - DNA, 864 bp, Triticum aestivum
  misc_feature (1)..(864): Ceres Seq. ID no. 13661890
acatctctcccatccatcaaaccgccgcaaccttctctgaccgagcagctgcgagctccagcccaagttccaagctagaatcgcggcgatggcacggtcggagctggtcatggcgttgctggtggtggtcctcgccggcggctgctgcgcgtcggcgggcgccgtggcgtacctctccaagctgcctgtgatcctcgacgtcaccgcatcccccagtcccggccaagttcttcacgccggcgaggacgtgatcacggtgacttgggccctgaacgcgagccagccggccggcaaggacgccgactacaagaacgtgaaggtgagcctctgctacgcgccggtgagccagaaggagcgcgagtggcgcaagacccacgacgacctcaagaaggacaagacctgccagttcaaggtcacccagcaggcctaccccggcaccggcaaggtcgagtaccgcgtcgccctcgacatccccaccgccacctactatgtgcgtgcctacgcgctcgacgcctccggcacgcaggtcgcctacggccagaccgcgcccgccgccgccttcaacatcgtcagcatcaccggcgtcaccacctccatcaaggtcgccgccggcgtcttctccgccttctccgtcgcgtcgctcgccttcttcttcttcattgagaaacgcaagaagaacaactaaactcggaagtcggaaccgtggcaaagtgttcgtcttcgtccgtgcgcaatttcttcctgtccttcgcaacctacgcataattgtacggaaaaatgtactgtactgtactatatgtaagagattgtttgatgttccctttttcttatccggagactctcgtatataattggttatgttgt

SEQ ID NO: 61483 - protein, 198 aa, Triticum aestivum
  peptide (1)..(198): Ceres Seq. ID no. 13661891
  misc_feature (36)..(195): Homolog of NCBI NO: 15233944 NR Description: hypothetical protein [Arabidopsis thaliana]
  misc_feature (36)..(195): Homolog of NCBI NO: 21553714 NR Description: putative component of high affinity nitrate
  misc_feature (36)..(195): Homolog of NCBI NO: 13624657 NR Description: putative component of high affinity nitrate
  misc_feature (1)..(195): Homolog of NCBI NO: 15240632 NR Description: expressed protein [Arabidopsis thaliana]
  misc_feature (19)..(194): Homolog of NCBI NO: 20149062 NR Description: unknown [Capsicum annuum]
  misc_feature (1)..(197): Homolog of NCBI NO: 32488147 NR Description: OSJNBa0044K18.32 [Oryza sativa (japonica
MARSELVMALLVVVLAGGCCASAGAVAYLSKLPVILDVTASPSPGQVLHAGEDVITVTWALNASQPAGKDADYKNVKVSLCYAPVSQKEREWRKTHDDLKKDKTCQFKVTQQAYPGTGKVEYRVALDIPTATYYVRAYALDASGTQVAYGQTAPAAAFNIVSITGVTTSIKVAAGVFSAFSVASLAFFFFIEKRKKNN

SEQ ID NO: 61484 - protein, 191 aa, Triticum aestivum
  peptide (1)..(191): Ceres Seq. ID no. 13661892
  misc_feature (29)..(188): Homolog of NCBI NO: 15233944 NR Description: hypothetical protein [Arabidopsis thaliana]
  misc_feature (29)..(188): Homolog of NCBI NO: 21553714 NR Description: putative component of high affinity nitrate
  misc_feature (29)..(188): Homolog of NCBI NO: 13624657 NR Description: putative component of high affinity nitrate
  misc_feature (1)..(188): Homolog of NCBI NO: 15240632 NR Description: expressed protein [Arabidopsis thaliana]
  misc_feature (12)..(187): Homolog of NCBI NO: 20149062 NR Description: unknown [Capsicum annuum]
  misc_feature (1)..(190): Homolog of NCBI NO: 32488147 NR Description: OSJNBa0044K18.32 [Oryza sativa (japonica
MALLVVVLAGGCCASAGAVAYLSKLPVILDVTASPSPGQVLHAGEDVITVTWALNASQPAGKDADYKNVKVSLCYAPVSQKEREWRKTHDDLKKDKTCQFKVTQQAYPGTGKVEYRVALDIPTATYYVRAYALDASGTQVAYGQTAPAAAFNIVSITGVTTSIKVAAGVFSAFSVASLAFFFFIEKRKKNN

SEQ ID NO: 61485 - protein, 120 aa, Triticum aestivum
  peptide (1)..(120): Ceres Seq. ID no. 13661893
  misc_feature (1)..(74): Pfam Name: Glycoprotein GG/GX Pfam Description: Glycoprotein GG/GX
  misc_feature (1)..(55): Homolog of NCBI NO: 7441828 NR Description: extensin-like cell wall protein - sea-island
  misc_feature (1)..(53): Homolog of NCBI NO: 7441828 NR Description: extensin-like cell wall protein - sea-island
  misc_feature (1)..(53): Homolog of NCBI NO: 2429362 NR Description: proline rich protein [Santalum album]
  misc_feature (1)..(53): Homolog of NCBI NO: 7441829 NR Description: proline-rich cell wall protein - upland cotton
  misc_feature (1)..(57): Homolog of NCBI NO: 11360318 NR Description: probable mucin DKFZp434C196.1 - human (fragment)
  misc_feature (1)..(72): Homolog of NCBI NO: 25143299 NR Description: pre-mRNA splicing SR protein related RSR-1 (68.2
  misc_feature (1)..(57): Homolog of NCBI NO: 38345019 NR Description: OSJNBa0029H02.3 [Oryza sativa (japonica
  misc_feature (1)..(53): Homolog of NCBI NO: 7441829 NR Description: proline-rich cell wall protein - upland cotton
  misc_feature (1)..(53): Homolog of NCBI NO: 7441828 NR Description: extensin-like cell wall protein - sea-island
  misc_feature (1)..(67): Homolog of NCBI NO: 38175466 NR Description: putative high-affinity potassium transporter
MCVPTRSTPPARRSPTARPRPPPPSTSSASPASPPPSRSPPASSPPSPSRRSPSSSSLRNARRTTKLGSRNRGKVFVFVRAQFLPVLRNLRIIVRKNVLYCTICKRLFDVPFFLSGDSRI

SEQ ID NO: 61486 - DNA, 955 bp, Triticum aestivum
  misc_feature (1)..(955): Ceres Seq. ID no. 13664295
gttcactagcttcgaagtttctttcgaatagttaaaaaaaacaaacaatggcgacggttcagttcttcaaccaattcccctgccaaacccgagtccaaagcccatcaaactcaaaacccctctccaagccaccgtcttcgctggtgccaatgagcgcgctcactcgccgtccgtcgttttcccccggagaaatcgccgtttctcgttctgatttcagagtcagagtcatcgatgcggaagacgagttggatccggagacgagtgagggaggaggatctgctctattgatggcggaggaagcaatcgaatctgtggaggaaacggaggctctcaagagatcgctggtggattcgttgtacggcacagaccgagggttgagcgcatcgagcgagacgagagccgagatcggagatctaatcacacagctcgagtccaagaaccctacaccagctcccaccgatgctctcttccttctcaacggcaaatggatccagattaagttcgaggaaggtgtgatcggcactcctcagctaacggattcgattgagatcccggagtatgttgagtttcttggtcagaagattgatcttactccgatcagagggttgcttacatcggtacaagacacggctacgtctgtggctagaaccatatcgagccagccaccgttgaaattctctttgcctggggacagtgctcagtcgtggctgctcacgacttatctggacaaggacattaggatctctagaggagatggtggaagcgtctttgtgcttatcaaagaaggaagccctctgttgaacccttgaactctttaatgccaagtacaaactaagtgtttaatatattgttgttgtagtgttaatcgtttgtatgtattaactcggatggtatggagttaagtaataatgttgtagctgctataaaaatacaaaaaaaaaaatatacaaatgtt

SEQ ID NO: 61487 - protein, 253 aa, Triticum aestivum
  peptide (1)..(253): Ceres Seq. ID no. 13664296
  misc_feature (93)..(148): Pfam Name: PAP_fibrillin Pfam Description: PAP_fibrillin
  misc_feature (62)..(148): Homolog of NCBI NO: 7489179 NR Description: plastid-lipid-associated protein pap - common
  misc_feature (133)..(253): Homolog of NCBI NO: 7489179 NR Description: plastid-lipid-associated protein pap - common
  misc_feature (1)..(180): Homolog of NCBI NO: 14248550 NR Description: plastid-lipid associated protein PAP2 [Brassica
  misc_feature (1)..(180): Homolog of NCBI NO: 14248556 NR Description: plastid-lipid associated protein PAP2 [Brassica
  misc_feature (133)..(253): Homolog of NCBI NO: 25453087 NR Description: Light-induced protein, chloroplast precursor
  misc_feature (1)..(148): Homolog of NCBI NO: 25453087 NR Description: Light-induced protein, chloroplast precursor
  misc_feature (133)..(253): Homolog of NCBI NO: 22261807 NR Description: Light-induced protein, chloroplast precursor
  misc_feature (1)..(148): Homolog of NCBI NO: 22261807 NR Description: Light-induced protein, chloroplast precursor
  misc_feature (137)..(253): Homolog of NCBI NO: 21618237 NR Description: fibrillin precursor-like protein [Arabidopsis
  misc_feature (1)..(148): Homolog of NCBI NO: 21618237 NR Description: fibrillin precursor-like protein [Arabidopsis
MATVQFFNQFPCQTRVQSPSNSKPLSKPPSSLVPMSALTRRPSFSPGEIAVSRSDFRVRVIDAEDELDPETSEGGGSALLMAEEAIESVEETEALKRSLVDSLYGTDRGLSASSETRAEIGDLITQLESKNPTPAPTDALFLLNGKWIQIKFEEGVIGTPQLTDSIEIPEYVEFLGQKIDLTPIRGLLTSVQDTATSVARTISSQPPLKFSLPGDSAQSWLLTTYLDKDIRISRGDGGSVFVLIKEGSPLLNP

SEQ ID NO: 61488 - protein, 219 aa, Triticum aestivum
  peptide (1)..(219): Ceres Seq. ID no. 13664297
  misc_feature (59)..(114): Pfam Name: PAP_fibrillin Pfam Description: PAP_fibrillin
  misc_feature (28)..(114): Homolog of NCBI NO: 7489179 NR Description: plastid-lipid-associated protein pap - common
  misc_feature (99)..(219): Homolog of NCBI NO: 7489179 NR Description: plastid-lipid-associated protein pap - common
  misc_feature (1)..(146): Homolog of NCBI NO: 14248550 NR Description: plastid-lipid associated protein PAP2 [Brassica
  misc_feature (1)..(146): Homolog of NCBI NO: 14248556 NR Description: plastid-lipid associated protein PAP2 [Brassica
  misc_feature (99)..(219): Homolog of NCBI NO: 25453087 NR Description: Light-induced protein, chloroplast precursor
  misc_feature (1)..(114): Homolog of NCBI NO: 25453087 NR Description: Light-induced protein, chloroplast precursor
  misc_feature (99)..(219): Homolog of NCBI NO: 22261807 NR Description: Light-induced protein, chloroplast precursor
  misc_feature (1)..(114): Homolog of NCBI NO: 22261807 NR Description: Light-induced protein, chloroplast precursor
  misc_feature (103)..(219): Homolog of NCBI NO: 21618237 NR Description: fibrillin precursor-like protein [Arabidopsis
  misc_feature (1)..(114): Homolog of NCBI NO: 21618237 NR Description: fibrillin precursor-like protein [Arabidopsis
MSALTRRPSFSPGEIAVSRSDFRVRVIDAEDELDPETSEGGGSALLMAEEAIESVEETEALKRSLVDSLYGTDRGLSASSETRAEIGDLITQLESKNPTPAPTDALFLLNGKWIQIKFEEGVIGTPQLTDSIEIPEYVEFLGQKIDLTPIRGLLTSVQDTATSVARTISSQPPLKFSLPGDSAQSWLLTTYLDKDIRISRGDGGSVFVLIKEGSPLLNP

SEQ ID NO: 61489 - protein, 173 aa, Triticum aestivum
  peptide (1)..(173): Ceres Seq. ID no. 13664298
  misc_feature (13)..(68): Pfam Name: PAP_fibrillin Pfam Description: PAP_fibrillin
  misc_feature (1)..(68): Homolog of NCBI NO: 7489179 NR Description: plastid-lipid-associated protein pap - common
  misc_feature (53)..(173): Homolog of NCBI NO: 7489179 NR Description: plastid-lipid-associated protein pap - common
  misc_feature (1)..(100): Homolog of NCBI NO: 14248550 NR Description: plastid-lipid associated protein PAP2 [Brassica
  misc_feature (1)..(100): Homolog of NCBI NO: 14248556 NR Description: plastid-lipid associated protein PAP2 [Brassica
  misc_feature (53)..(173): Homolog of NCBI NO: 25453087 NR Description: Light-induced protein, chloroplast precursor
  misc_feature (1)..(68): Homolog of NCBI NO: 25453087 NR Description: Light-induced protein, chloroplast precursor
  misc_feature (53)..(173): Homolog of NCBI NO: 22261807 NR Description: Light-induced protein, chloroplast precursor
  misc_feature (1)..(68): Homolog of NCBI NO: 22261807 NR Description: Light-induced protein, chloroplast precursor
  misc_feature (57)..(173): Homolog of NCBI NO: 21618237 NR Description: fibrillin precursor-like protein [Arabidopsis
  misc_feature (1)..(68): Homolog of NCBI NO: 21618237 NR Description: fibrillin precursor-like protein [Arabidopsis
MAEEAIESVEETEALKRSLVDSLYGTDRGLSASSETRAEIGDLITQLESKNPTPAPTDALFLLNGKWIQIKFEEGVIGTPQLTDSIEIPEYVEFLGQKIDLTPIRGLLTSVQDTATSVARTISSQPPLKFSLPGDSAQSWLLTTYLDKDIRISRGDGGSVFVLIKEGSPLLNP

SEQ ID NO: 61490 - DNA, 920 bp, Triticum aestivum
  misc_feature (1)..(920): Ceres Seq. ID no. 13664149
gctcctccgcggtgacgggcgctctagnnntagtggatccmccgggytgcaggaattmgcaygagamcaktrcctagawcatcactaatcgaaaaacaccacttgatatcaacaaaccaactccatagacgccaaagaaaaactcatggctaagctcattttcttcttagccgtgcaaatcctcctcctcgctgtcgtttcttccaccggagacgacggagaaaactttgccagaaccatagatcggaagcttctcgggctccacaagaaagagaagctaacccatttcaaagtctattggcacgacatcttaagtggtccaaacccaacctccatcatgattcaaccaccagttacaaacacttcctacttcggagccatctccatgatcgataacgccttgacggcgagagttccgatgaactcaactgtcttgggccaagctcaaggcttctacgcgggagcggcccaaaaggagttgggttttctaatggctatgaactttgcttttaagacagggaagtacaatggaagcaccattacgattcttggtcggaatacggcgttgtcggaggttagagaaatgccaattgttggaggaagtgggcttttccgatttgctagaggctatgttgaggctcggacaaagtggattaatctcaagaacggcgatgctactgttgagtatagctgttatgttttgcattattgatgtttttgtcgtaattatatatttaatttgacgaggtaataataaagcagatttttaaaatttaagttttctttttgcatttggcttatggtgtgtggtggatttgtggttgtaggtttgtcgtttaataatatttgatatatagttttatttaaaaaaaaaaaaaaaaaagcttatcgataccgtcgacctcgaggkksgscccggt

SEQ ID NO: 61491 - protein, 188 aa, Triticum aestivum
  peptide (1)..(188): Ceres Seq. ID no. 15220733
  misc_feature (15)..(187): Pfam Name: Dirigent-like protein Pfam Description: Dirigent-like protein
  misc_feature (1)..(182): Homolog of NCBI NO: 25412014 NR Description: probable disease resistance response protein
  misc_feature (1)..(187): Homolog of NCBI NO: 30681257 NR Description: disease resistance response protein-related/
  misc_feature (1)..(187): Homolog of NCBI NO: 15218836 NR Description: disease resistance response protein-related/
  misc_feature (66)..(188): Homolog of NCBI NO: 15231315 NR Description: disease resistance response protein-related/
  misc_feature (4)..(188): Homolog of NCBI NO: 15217886 NR Description: disease resistance response protein-related/
  misc_feature (1)..(179): Homolog of NCBI NO: 15231318 NR Description: disease resistance response protein-related/
  misc_feature (1)..(188): Homolog of NCBI NO: 15231302 NR Description: disease resistance response protein-related/
  misc_feature (1)..(188): Homolog of NCBI NO: 15239779 NR Description: disease resistance response protein-related/
  misc_feature (1)..(188): Homolog of NCBI NO: 22135914 NR Description: unknown protein [Arabidopsis thaliana]
  misc_feature (1)..(188): Homolog of NCBI NO: 15222673 NR Description: disease resistance response protein-related/
MAKLIFFLAVQILLLAVVSSTGDDGENFARTIDRKLLGLHKKEKLTHFKVYWHDILSGPNPTSIMIQPPVTNTSYFGAISMIDNALTARVPMNSTVLGQAQGFYAGAAQKELGFLMAMNFAFKTGKYNGSTITILGRNTALSEVREMPIVGGSGLFRFARGYVEARTKWINLKNGDATVEYSCYVLHY

SEQ ID NO: 61492 - protein, 124 aa, Triticum aestivum
  peptide (1)..(124): Ceres Seq. ID no. 15220734
  misc_feature (1)..(123): Pfam Name: Dirigent-like protein Pfam Description: Dirigent-like protein
  misc_feature (1)..(118): Homolog of NCBI NO: 25412014 NR Description: probable disease resistance response protein
  misc_feature (1)..(123): Homolog of NCBI NO: 30681257 NR Description: disease resistance response protein-related/
  misc_feature (1)..(123): Homolog of NCBI NO: 15218836 NR Description: disease resistance response protein-related/
  misc_feature (2)..(124): Homolog of NCBI NO: 15231315 NR Description: disease resistance response protein-related/
  misc_feature (1)..(124): Homolog of NCBI NO: 15217886 NR Description: disease resistance response protein-related/
  misc_feature (1)..(115): Homolog of NCBI NO: 15231318 NR Description: disease resistance response protein-related/
  misc_feature (1)..(124): Homolog of NCBI NO: 15231302 NR Description: disease resistance response protein-related/
  misc_feature (1)..(124): Homolog of NCBI NO: 15239779 NR Description: disease resistance response protein-related/
  misc_feature (1)..(124): Homolog of NCBI NO: 22135914 NR Description: unknown protein [Arabidopsis thaliana]
  misc_feature (1)..(124): Homolog of NCBI NO: 15222673 NR Description: disease resistance response protein-related/
MIQPPVTNTSYFGAISMIDNALTARVPMNSTVLGQAQGFYAGAAQKELGFLMAMNFAFKTGKYNGSTITILGRNTALSEVREMPIVGGSGLFRFARGYVEARTKWINLKNGDATVEYSCYVLHY

SEQ ID NO: 61493 - protein, 108 aa, Triticum aestivum
  peptide (1)..(108): Ceres Seq. ID no. 15220735
  misc_feature (1)..(107): Pfam Name: Dirigent-like protein Pfam Description: Dirigent-like protein
  misc_feature (1)..(102): Homolog of NCBI NO: 25412014 NR Description: probable disease resistance response protein
  misc_feature (1)..(107): Homolog of NCBI NO: 30681257 NR Description: disease resistance response protein-related/
  misc_feature (1)..(107): Homolog of NCBI NO: 15218836 NR Description: disease resistance response protein-related/
  misc_feature (1)..(108): Homolog of NCBI NO: 15231315 NR Description: disease resistance response protein-related/
  misc_feature (1)..(108): Homolog of NCBI NO: 15217886 NR Description: disease resistance response protein-related/
  misc_feature (1)..(99): Homolog of NCBI NO: 15231318 NR Description: disease resistance response protein-related/
  misc_feature (1)..(108): Homolog of NCBI NO: 15231302 NR Description: disease resistance response protein-related/
  misc_feature (1)..(108): Homolog of NCBI NO: 15239779 NR Description: disease resistance response protein-related/
  misc_feature (1)..(108): Homolog of NCBI NO: 22135914 NR Description: unknown protein [Arabidopsis thaliana]
  misc_feature (1)..(108): Homolog of NCBI NO: 15222673 NR Description: disease resistance response protein-related/
MIDNALTARVPMNSTVLGQAQGFYAGAAQKELGFLMAMNFAFKTGKYNGSTITILGRNTALSEVREMPIVGGSGLFRFARGYVEARTKWINLKNGDATVEYSCYVLHY

SEQ ID NO: 61494 - DNA, 639 bp, Triticum aestivum
  misc_feature (1)..(639): Ceres Seq. ID no. 14302329
atattatcaacaccgaatctcaaacacaaacacacacatctttcttcaaaaaaaaacttttgcttctcccaagaatctgaatctgcttcacttttgttcaaccatgatgaacatagacgatacgacatctccaatggcccacccgatcgttccatctcaacctccttccgaccaaacccaacaagatccaagttcgcccaatgaagcttcttctgttaccgacaagaaagatgatcaagcttttcccgaagagaaaccgaagcagaatcaagaagaagagagagtggacacagggagagagaagctaaagaagcaccggagagacgtcgccggaagagtttggatacctgacatatggggacaagaagagcttcttaaggactggatcgactgttcaacgtttgatacgtgtctagtccctgccggaatctcgtcggcacgtgcagctctcgtagacgaagctaggcgagctgcttcggcttctggtgggttacatagtcgttgcttgatctcccgctgaatttttatataatatcatatataaatgtggttcttgttcctcaataatatatgtaagccattattgatatattgttgatatagagtctttttcattttcccaataattatattggccct

SEQ ID NO: 61495 - protein, 172 aa, Triticum aestivum
  peptide (1)..(172): Ceres Seq. ID no. 14302330
  misc_feature (92)..(167): Homolog of NCBI NO: 15229972 NR Description: expressed protein [Arabidopsis thaliana]
  misc_feature (39)..(156): Homolog of NCBI NO: 38346335 NR Description: OSJNBa0073L04.6 [Oryza sativa (japonica
  misc_feature (35)..(172): Homolog of NCBI NO: 18409685 NR Description: expressed protein [Arabidopsis thaliana]
YYQHRISNTNTHIFLQKKTFASPKNLNLLHFCSTMMNIDDTTSPMAHPIVPSQPPSDQTQQDPSSPNEASSVTDKKDDQAFPEEKPKQNQEEERVDTGREKLKKHRRDVAGRVWIPDIWGQEELLKDWIDCSTFDTCLVPAGISSARAALVDEARRAASASGGLHSRCLISR

SEQ ID NO: 61496 - protein, 138 aa, Triticum aestivum
  peptide (1)..(138): Ceres Seq. ID no. 14302331
  misc_feature (58)..(133): Homolog of NCBI NO: 15229972 NR Description: expressed protein [Arabidopsis thaliana]
  misc_feature (5)..(122): Homolog of NCBI NO: 38346335 NR Description: OSJNBa0073L04.6 [Oryza sativa (japonica
  misc_feature (1)..(138): Homolog of NCBI NO: 18409685 NR Description: expressed protein [Arabidopsis thaliana]
MMNIDDTTSPMAHPIVPSQPPSDQTQQDPSSPNEASSVTDKKDDQAFPEEKPKQNQEEERVDTGREKLKKHRRDVAGRVWIPDIWGQEELLKDWIDCSTFDTCLVPAGISSARAALVDEARRAASASGGLHSRCLISR

SEQ ID NO: 61497 - protein, 137 aa, Triticum aestivum
  peptide (1)..(137): Ceres Seq. ID no. 14302332
  misc_feature (57)..(132): Homolog of NCBI NO: 15229972 NR Description: expressed protein [Arabidopsis thaliana]
  misc_feature (4)..(121): Homolog of NCBI NO: 38346335 NR Description: OSJNBa0073L04.6 [Oryza sativa (japonica
  misc_feature (1)..(137): Homolog of NCBI NO: 18409685 NR Description: expressed protein [Arabidopsis thaliana]
MNIDDTTSPMAHPIVPSQPPSDQTQQDPSSPNEASSVTDKKDDQAFPEEKPKQNQEEERVDTGREKLKKHRRDVAGRVWIPDIWGQEELLKDWIDCSTFDTCLVPAGISSARAALVDEARRAASASGGLHSRCLISR

SEQ ID NO: 61498 - DNA, 747 bp, Triticum aestivum
  misc_feature (1)..(747): Ceres Seq. ID no. 13598188
acgagaccattacctagaacatcctaatcgaaaaatagccactacctgcttccacttctgattcagaaactcttaggcattccacattctcaaccccgaaccctaagagcagagcgaaaatgacaaccaccttcgcgaccgtcgcaggactcggtggcgcattactgtcatccacctcatctcgtttcacctcagggtttgtgaaatccccagtgattgctaggaatcccttgaggcaagctgtggcaatgggaaatgggaggattacatgctttgagaggaattggctgcgggcagattacagtgtgattgggtttgggttgattggttggctagcaccctcaagcataccggctatcaacggtaaaagtctgactggcctcttctttgagagcattggtgctgagcttgctcactttcccagccctcctgcccttacttcgtccttttggttatggctggttacgtggcaccttggcttgttcattgtcctcacttttgggcaaattggattcaagggaaggactgaagactacttttgaattctaaacctatggtctctgtttttacctttttttttctcttccttgtgtgcccccactgccccagtgccttgcaatctatgatgactctatgctacctttttccttcttactaggagaaatctatgtaatatcgccttcataatgttgtatattattattgttgtacttgctcctcatcaatgtcccaacttcttctagtcgt

SEQ ID NO: 61499 - protein, 140 aa, Triticum aestivum
  peptide (1)..(140): Ceres Seq. ID no. 13598189
  misc_feature (1)..(140): Homolog of NCBI NO: 6996562 NR Description: putative 16kDa membrane protein [Nicotiana
  misc_feature (1)..(140): Homolog of NCBI NO: 22531014 NR Description: expressed protein [Arabidopsis thaliana]
  misc_feature (1)..(140): Homolog of NCBI NO: 18390888 NR Description: expressed protein [Arabidopsis thaliana]
MTTTFATVAGLGGALLSSTSSRFTSGFVKSPVIARNPLRQAVAMGNGRITCFERNWLRADYSVIGFGLIGWLAPSSIPAINGKSLTGLFFESIGAELAHFPSPPALTSSFWLWLVTWHLGLFIVLTFGQIGFKGRTEDYF

SEQ ID NO: 61500 - protein, 97 aa, Triticum aestivum
  peptide (1)..(97): Ceres Seq. ID no. 13598190
  misc_feature (1)..(97): Homolog of NCBI NO: 6996562 NR Description: putative 16kDa membrane protein [Nicotiana
  misc_feature (1)..(97): Homolog of NCBI NO: 22531014 NR Description: expressed protein [Arabidopsis thaliana]
  misc_feature (1)..(97): Homolog of NCBI NO: 18390888 NR Description: expressed protein [Arabidopsis thaliana]
MGNGRITCFERNWLRADYSVIGFGLIGWLAPSSIPAINGKSLTGLFFESIGAELAHFPSPPALTSSFWLWLVTWHLGLFIVLTFGQIGFKGRTEDYF

SEQ ID NO: 61501 - DNA, 829 bp, Triticum aestivum
  misc_feature (1)..(829): Ceres Seq. ID no. 14301870
ataacttcaagacacttcactaaataatctataataaaatgaagatgataattcacatttttttcatcctctccctagtttcatcaacctcttttgcctctgttcaagacttctgtgtagctgatccaaagggtcctcaaagcccatcaggatactcttgcaagaaccctgaccaagtcaccgaaaatgactttgcattctccggcctcgccaaagctggaaacacttcgaacctcattaaagccgcagtgacgccagcctttgcccctgctttcgcaggcaccaatggtcttggagtctcaatggctcgtcttgacttagccggtggtggtgtcattcctcttcacacacatcctggtgcgtctgaggttcttgtagtcatacaaggaaccatctgcgccgggtttatttcctctgctaacaaagtttacttgaagactctccagagaggtgattctatggtgtttcctcaaggacttcttcattttcagcttaactctgggaaaggccctgctttggcttttgttgccttcggaagctcatccccaggacttcagattctaccttttgctctgtttgctaatgatttgccttcagagctcgttgaagccaccacctttcttagtgatgaagaagttaagaagcttaagggtgtgcttggaggaactgattaagcttatctttcgttttttttctaagttttgtgtgtgtgtttatgcgctttttattcaagttcgtttagcattttattgcgtgtaattgttctaagtgtttcattttcattgtctctaaggcttaaattttaattaagtaataagcattgcattgc

SEQ ID NO: 61502 - protein, 211 aa, Triticum aestivum
  peptide (1)..(211): Ceres Seq. ID no. 14301871
  misc_feature (55)..(201): Pfam Name: Cupin Pfam Description: Cupin
  misc_feature (3)..(210): Homolog of NCBI NO: 30841320 NR Description: auxin binding protein [Gossypium hirsutum]
  misc_feature (3)..(211): Homolog of NCBI NO: 31711507 NR Description: 24K germin like protein [Nicotiana tabacum]
  misc_feature (3)..(211): Homolog of NCBI NO: 18201941 NR Description: Auxin-binding protein ABP19b precursor
  misc_feature (3)..(211): Homolog of NCBI NO: 18201940 NR Description: Auxin-binding protein ABP20 precursor
  misc_feature (3)..(211): Homolog of NCBI NO: 18203684 NR Description: Auxin-binding protein ABP19a precursor
  misc_feature (1)..(210): Homolog of NCBI NO: 13277342 NR Description: Germin-like protein [Pisum sativum]
  misc_feature (24)..(211): Homolog of NCBI NO: 1755188 NR Description: germin-like protein [Arabidopsis thaliana]
  misc_feature (1)..(211): Homolog of NCBI NO: 15242028 NR Description: germin-like protein (AtGER3) [Arabidopsis
  misc_feature (1)..(211): Homolog of NCBI NO: 1169944 NR Description: Germin-like protein 1 precursor
  misc_feature (1)..(211): Homolog of NCBI NO: 1755154 NR Description: germin-like protein [Arabidopsis thaliana]
MKMIIHIFFILSLVSSTSFASVQDFCVADPKGPQSPSGYSCKNPDQVTENDFAFSGLAKAGNTSNLIKAAVTPAFAPAFAGTNGLGVSMARLDLAGGGVIPLHTHPGASEVLVVIQGTICAGFISSANKVYLKTLQRGDSMVFPQGLLHFQLNSGKGPALAFVAFGSSSPGLQILPFALFANDLPSELVEATTFLSDEEVKKLKGVLGGTD

SEQ ID NO: 61503 - protein, 209 aa, Triticum aestivum
  peptide (1)..(209): Ceres Seq. ID no. 14301872
  misc_feature (53)..(199): Pfam Name: Cupin Pfam Description: Cupin
  misc_feature (1)..(208): Homolog of NCBI NO: 30841320 NR Description: auxin binding protein [Gossypium hirsutum]
  misc_feature (1)..(209): Homolog of NCBI NO: 31711507 NR Description: 24K germin like protein [Nicotiana tabacum]
  misc_feature (1)..(209): Homolog of NCBI NO: 18201941 NR Description: Auxin-binding protein ABP19b precursor
  misc_feature (1)..(209): Homolog of NCBI NO: 18201940 NR Description: Auxin-binding protein ABP20 precursor
  misc_feature (1)..(209): Homolog of NCBI NO: 18203684 NR Description: Auxin-binding protein ABP19a precursor
  misc_feature (1)..(208): Homolog of NCBI NO: 13277342 NR Description: Germin-like protein [Pisum sativum]
  misc_feature (22)..(209): Homolog of NCBI NO: 1755188 NR Description: germin-like protein [Arabidopsis thaliana]
  misc_feature (1)..(209): Homolog of NCBI NO: 15242028 NR Description: germin-like protein (AtGER3) [Arabidopsis
  misc_feature (1)..(209): Homolog of NCBI NO: 1169944 NR Description: Germin-like protein 1 precursor
  misc_feature (1)..(209): Homolog of NCBI NO: 1755154 NR Description: germin-like protein [Arabidopsis thaliana]
MIIHIFFILSLVSSTSFASVQDFCVADPKGPQSPSGYSCKNPDQVTENDFAFSGLAKAGNTSNLIKAAVTPAFAPAFAGTNGLGVSMARLDLAGGGVIPLHTHPGASEVLVVIQGTICAGFISSANKVYLKTLQRGDSMVFPQGLLHFQLNSGKGPALAFVAFGSSSPGLQILPFALFANDLPSELVEATTFLSDEEVKKLKGVLGGTD

SEQ ID NO: 61504 - protein, 123 aa, Triticum aestivum
  peptide (1)..(123): Ceres Seq. ID no. 14301873
  misc_feature (1)..(113): Pfam Name: Cupin Pfam Description: Cupin
  misc_feature (1)..(122): Homolog of NCBI NO: 30841320 NR Description: auxin binding protein [Gossypium hirsutum]
  misc_feature (1)..(123): Homolog of NCBI NO: 31711507 NR Description: 24K germin like protein [Nicotiana tabacum]
  misc_feature (1)..(123): Homolog of NCBI NO: 18201941 NR Description: Auxin-binding protein ABP19b precursor
  misc_feature (1)..(123): Homolog of NCBI NO: 18201940 NR Description: Auxin-binding protein ABP20 precursor
  misc_feature (1)..(123): Homolog of NCBI NO: 18203684 NR Description: Auxin-binding protein ABP19a precursor
  misc_feature (1)..(122): Homolog of NCBI NO: 13277342 NR Description: Germin-like protein [Pisum sativum]
  misc_feature (1)..(123): Homolog of NCBI NO: 1755188 NR Description: germin-like protein [Arabidopsis thaliana]
  misc_feature (1)..(123): Homolog of NCBI NO: 15242028 NR Description: germin-like protein (AtGER3) [Arabidopsis
  misc_feature (1)..(123): Homolog of NCBI NO: 1169944 NR Description: Germin-like protein 1 precursor
  misc_feature (1)..(123): Homolog of NCBI NO: 1755154 NR Description: germin-like protein [Arabidopsis thaliana]
MARLDLAGGGVIPLHTHPGASEVLVVIQGTICAGFISSANKVYLKTLQRGDSMVFPQGLLHFQLNSGKGPALAFVAFGSSSPGLQILPFALFANDLPSELVEATTFLSDEEVKKLKGVLGGTD

SEQ ID NO: 61505 - DNA, 809 bp, Triticum aestivum
  misc_feature (1)..(809): Ceres Seq. ID no. 12623521
cacgaatagaagatgccactcttccccactccactccgagccctattctccccctccaccgccgcctcctccaccgccgccgccccgccgccccgtcgaccgccgctcgcgggggctctcctcttcctcagcctaggagccgtagccggttgcgccctctccactcgccgtgtccccttcctccgggcgataagttctgctagaatggaatctacttccacgaccgtgccttccattgttgtatttgtgacagttccaaatcgggaagcaggcaaaaagctatcagcaagcattatcagtgagaaacttgctgcttgtgtgaacatagtgcctggaatcgaatctgtttactggtgggagggaaaggtgcaaactgatgctgaagagctgctcatcatcaagaccagagaatctcttctaaatgccttgactgaacatgtcaaagctaaccatgagtacgacgttcctgaagtcattgcgctgcccatcagcggaggcaacctcaagtacttggagtggctcaagaacagcaccagggagaattaatctggccagagctgcttcccatggaccgcatctgtgagtagagtacctagtggtgtggagtgtctgttctggtttgggacattgtgcttgtgcagaaagactttagtggcctctgtgcgtctatggcgtggctgcgacgaatcggtcgatctgtactgtctcctagggtcaaataaactttcagaagcgtgtagcgccaagtcgactgcacaaattcctcttgtcgcgctcgtggattatctcatcaccatgttccttcagtt

SEQ ID NO: 61506 - protein, 177 aa, Triticum aestivum
  peptide (1)..(177): Ceres Seq. ID no. 12623522
  misc_feature (74)..(175): Pfam Name: CutA1 divalent ion tolerance protein Pfam Description: CutA1 divalent ion tolerance protein
  misc_feature (67)..(174): Homolog of NCBI NO: 21702737 NR Description: divalent cation tolerant protein CUTA [Mus
  misc_feature (76)..(174): Homolog of NCBI NO: 29726861 NR Description: Chain A, Divalent Cation Tolerance Protein (Cut
  misc_feature (67)..(177): Homolog of NCBI NO: 34852227 NR Description: similar to divalent cation tolerant protein CUTA
  misc_feature (74)..(170): Homolog of NCBI NO: 24641937 NR Description: CG11590-PA [Drosophila melanogaster]
  misc_feature (74)..(170): Homolog of NCBI NO: 21430094 NR Description: GM24986p [Drosophila melanogaster]
  misc_feature (62)..(174): Homolog of NCBI NO: 7706244 NR Description: divalent cation tolerant protein CUTA [Homo
  misc_feature (62)..(174): Homolog of NCBI NO: 7341255 NR Description: brain acetylcholinesterase putative membrane
  misc_feature (73)..(176): Homolog of NCBI NO: 23509167 NR Description: cutA, putative [Plasmodium falciparum 3D7]
  misc_feature (45)..(150): Homolog of NCBI NO: 30685818 NR Description: putative related to microbial divalent cation
  misc_feature (45)..(175): Homolog of NCBI NO: 15226156 NR Description: putative related to microbial divalent cation
MPLFPTPLRALFSPSTAASSTAAAPPPRRPPLAGALLFLSLGAVAGCALSTRRVPFLRAISSARMESTSTTVPSIVVFVTVPNREAGKKLSASIISEKLAACVNIVPGIESVYWWEGKVQTDAEELLIIKTRESLLNALTEHVKANHEYDVPEVIALPISGGNLKYLEWLKNSTREN

SEQ ID NO: 61507 - protein, 113 aa, Triticum aestivum
  peptide (1)..(113): Ceres Seq. ID no. 12623523
  misc_feature (10)..(111): Pfam Name: CutA1 divalent ion tolerance protein Pfam Description: CutA1 divalent ion tolerance protein
  misc_feature (3)..(110): Homolog of NCBI NO: 21702737 NR Description: divalent cation tolerant protein CUTA [Mus
  misc_feature (12)..(110): Homolog of NCBI NO: 29726861 NR Description: Chain A, Divalent Cation Tolerance Protein (Cut
  misc_feature (3)..(113): Homolog of NCBI NO: 34852227 NR Description: similar to divalent cation tolerant protein CUTA
  misc_feature (10)..(106): Homolog of NCBI NO: 24641937 NR Description: CG11590-PA [Drosophila melanogaster]
  misc_feature (10)..(106): Homolog of NCBI NO: 21430094 NR Description: GM24986p [Drosophila melanogaster]
  misc_feature (1)..(110): Homolog of NCBI NO: 7706244 NR Description: divalent cation tolerant protein CUTA [Homo
  misc_feature (1)..(110): Homolog of NCBI NO: 7341255 NR Description: brain acetylcholinesterase putative membrane
  misc_feature (9)..(112): Homolog of NCBI NO: 23509167 NR Description: cutA, putative [Plasmodium falciparum 3D7]
  misc_feature (1)..(86): Homolog of NCBI NO: 30685818 NR Description: putative related to microbial divalent cation
  misc_feature (1)..(111): Homolog of NCBI NO: 15226156 NR Description: putative related to microbial divalent cation
MESTSTTVPSIVVFVTVPNREAGKKLSASIISEKLAACVNIVPGIESVYWWEGKVQTDAEELLIIKTRESLLNALTEHVKANHEYDVPEVIALPISGGNLKYLEWLKNSTREN

SEQ ID NO: 61508 - DNA, 1062 bp, Triticum aestivum
  misc_feature (1)..(1062): Ceres Seq. ID no. 13598678
catcacaacacaaacaggagtagtactactactccagtctccggcgagtacataccctacaggtccaacaaggttcatagacgacctgtagcgccaatatggctggcgtctccagcaatgccattgcctttgtggcactcctctccgtgctcttcacgggcgtccgttctgcggtcaactacgacaccgccgtagctagatcctacaactccggctggctccccgccaaggccacctggtacggggcgcccaacggcgccggccccgacgacaacggtggtgcttgcggcttcaagaacgtgaaccagtacccaatctcctccatgggggcatgcggtaacgagcctattttcgccggcggcgagggctgtggcatgtgctacgagattaagtgcgactactccaacaacccttcctgctccggccagccgaggaggatcgtcatcaccgacatgaactactaccccgtggccaggtaccacctcgacctcagtggcaccgcattcggctccatggccaggtacggcctcaacgaccggctccgccacgccggcatcatcgacatgcagttcaggagggtgccctgcaacttcccgggtatgaaggtgaccttccacgtccagcgtgtctccaaccccaactatctcgcggtgctcgtggagtacgcgaacgtggacgggaccgtggtgcggatggagctcatgcagaccatcaacggccgcccgacgggctactatcaggatatgcgccgctcgtggggctccatctggcggatggacaccaaccgcccgctgcaggggccattcgccatccgcatcaccagcgataccggaaagacgctggtggccaacaatgccatcccggcttattggcagccggaccatgcctactggtccaacctccagttctattgattggcttacgtgcgtacttctccgatcgatgccgagttaatcattttggtgtcatcagcatgatccctatttgtgaggatctaatggttttaagttattgccaggcactatctactttcaagcgttaacaagcgtgttaactgtcgcc

SEQ ID NO: 61509 - protein, 271 aa, Triticum aestivum
  peptide (1)..(271): Ceres Seq. ID no. 13598679
  misc_feature (170)..(255): Pfam Name: Pollen allergen Pfam Description: Pollen allergen
  misc_feature (27)..(270): Homolog of NCBI NO: 8118425 NR Description: beta-expansin [Oryza sativa]
  misc_feature (19)..(270): Homolog of NCBI NO: 37536762 NR Description: beta-expansin EXPB4 [Oryza sativa (japonica
  misc_feature (27)..(270): Homolog of NCBI NO: 14193775 NR Description: beta-expansin 8 [Zea mays]
  misc_feature (1)..(270): Homolog of NCBI NO: 14330328 NR Description: beta expansin B2 [Festuca pratensis]
  misc_feature (39)..(270): Homolog of NCBI NO: 8118432 NR Description: beta-expansin [Oryza sativa]
  misc_feature (4)..(270): Homolog of NCBI NO: 14193771 NR Description: beta-expansin 6 [Zea mays]
  misc_feature (1)..(270): Homolog of NCBI NO: 7489455 NR Description: beta-expansin - rice
  misc_feature (1)..(270): Homolog of NCBI NO: 37536758 NR Description: beta-expansin EXPB2 [Oryza sativa (japonica
  misc_feature (2)..(270): Homolog of NCBI NO: 37536756 NR Description: beta-expansin EXPB6 [Oryza sativa (japonica
  misc_feature (1)..(271): Homolog of NCBI NO: 4099919 NR Description: pollen allergen homolog [Triticum aestivum]
MAGVSSNAIAFVALLSVLFTGVRSAVNYDTAVARSYNSGWLPAKATWYGAPNGAGPDDNGGACGFKNVNQYPISSMGACGNEPIFAGGEGCGMCYEIKCDYSNNPSCSGQPRRIVITDMNYYPVARYHLDLSGTAFGSMARYGLNDRLRHAGIIDMQFRRVPCNFPGMKVTFHVQRVSNPNYLAVLVEYANVDGTVVRMELMQTINGRPTGYYQDMRRSWGSIWRMDTNRPLQGPFAIRITSDTGKTLVANNAIPAYWQPDHAYWSNLQFY

SEQ ID NO: 61510 - protein, 196 aa, Triticum aestivum
  peptide (1)..(196): Ceres Seq. ID no. 13598680
  misc_feature (95)..(180): Pfam Name: Pollen allergen Pfam Description: Pollen allergen
  misc_feature (1)..(195): Homolog of NCBI NO: 8118425 NR Description: beta-expansin [Oryza sativa]
  misc_feature (1)..(195): Homolog of NCBI NO: 37536762 NR Description: beta-expansin EXPB4 [Oryza sativa (japonica
  misc_feature (1)..(195): Homolog of NCBI NO: 14193775 NR Description: beta-expansin 8 [Zea mays]
  misc_feature (1)..(195): Homolog of NCBI NO: 14330328 NR Description: beta expansin B2 [Festuca pratensis]
  misc_feature (1)..(195): Homolog of NCBI NO: 8118432 NR Description: beta-expansin [Oryza sativa]
  misc_feature (1)..(195): Homolog of NCBI NO: 14193771 NR Description: beta-expansin 6 [Zea mays]
  misc_feature (1)..(195): Homolog of NCBI NO: 7489455 NR Description: beta-expansin - rice
  misc_feature (1)..(195): Homolog of NCBI NO: 37536758 NR Description: beta-expansin EXPB2 [Oryza sativa (japonica
  misc_feature (1)..(195): Homolog of NCBI NO: 37536756 NR Description: beta-expansin EXPB6 [Oryza sativa (japonica
  misc_feature (1)..(196): Homolog of NCBI NO: 4099919 NR Description: pollen allergen homolog [Triticum aestivum]
MGACGNEPIFAGGEGCGMCYEIKCDYSNNPSCSGQPRRIVITDMNYYPVARYHLDLSGTAFGSMARYGLNDRLRHAGIIDMQFRRVPCNFPGMKVTFHVQRVSNPNYLAVLVEYANVDGTVVRMELMQTINGRPTGYYQDMRRSWGSIWRMDTNRPLQGPFAIRITSDTGKTLVANNAIPAYWQPDHAYWSNLQFY

SEQ ID NO: 61511 - protein, 179 aa, Triticum aestivum
  peptide (1)..(179): Ceres Seq. ID no. 13598681
  misc_feature (78)..(163): Pfam Name: Pollen allergen Pfam Description: Pollen allergen
  misc_feature (1)..(178): Homolog of NCBI NO: 8118425 NR Description: beta-expansin [Oryza sativa]
  misc_feature (1)..(178): Homolog of NCBI NO: 37536762 NR Description: beta-expansin EXPB4 [Oryza sativa (japonica
  misc_feature (1)..(178): Homolog of NCBI NO: 14193775 NR Description: beta-expansin 8 [Zea mays]
  misc_feature (1)..(178): Homolog of NCBI NO: 14330328 NR Description: beta expansin B2 [Festuca pratensis]
  misc_feature (1)..(178): Homolog of NCBI NO: 8118432 NR Description: beta-expansin [Oryza sativa]
  misc_feature (1)..(178): Homolog of NCBI NO: 14193771 NR Description: beta-expansin 6 [Zea mays]
  misc_feature (1)..(178): Homolog of NCBI NO: 7489455 NR Description: beta-expansin - rice
  misc_feature (1)..(178): Homolog of NCBI NO: 37536758 NR Description: beta-expansin EXPB2 [Oryza sativa (japonica
  misc_feature (1)..(178): Homolog of NCBI NO: 37536756 NR Description: beta-expansin EXPB6 [Oryza sativa (japonica
  misc_feature (1)..(179): Homolog of NCBI NO: 4099919 NR Description: pollen allergen homolog [Triticum aestivum]
MCYEIKCDYSNNPSCSGQPRRIVITDMNYYPVARYHLDLSGTAFGSMARYGLNDRLRHAGIIDMQFRRVPCNFPGMKVTFHVQRVSNPNYLAVLVEYANVDGTVVRMELMQTINGRPTGYYQDMRRSWGSIWRMDTNRPLQGPFAIRITSDTGKTLVANNAIPAYWQPDHAYWSNLQFY

SEQ ID NO: 61512 - DNA, 734 bp, Triticum aestivum
  misc_feature (1)..(734): Ceres Seq. ID no. 15225568
ctttataaatcattctcccctcaaccaacccctcttgtagtctccgctcatccaccctcccttttctgttctcgacttgtgcagcgcagttgcataaagaaatggcgacttttcaaatctcttccactagcatgaccaccaaggcggttcttagaagccagccgaccaacaagctcatcgctaacaagagccagcaagtctcagttggatccgtcaagaaagtctcgagatcctttggcttgaaatgctcagccaattctggtgccactatgtcagctgtatacaaggtcaagctcataggacccgaaggcgaagaacacgagttcgaggttcaggacgaccagttcatattggacgcagctgaagaggcaggagttgacttgccttactcttgcagagccggagcctgttccacctgcgccggtcagatcgtgaaaggccaagttgaccagtctgaaggttcgtttcttgaggatgatcacttggagaaaggttttgtcttgacatgtgtggcttacccgcagtcggactgtgtgatccatacccacaaggaaactgaactcttctaagtcacggtggtagtgatgcccaattgtcatttgagttattgttattattgttatcagtttccttctacgaatttgggtgtgtttaattgtatgcttttgtatggaaacgtctcaggatatgccttttagtgttcatcagtcttcaccgggttgcaactggttaat

SEQ ID NO: 61513 - protein, 155 aa, Triticum aestivum
  peptide (1)..(155): Ceres Seq. ID no. 15225569
  misc_feature (66)..(142): Pfam Name: 2Fe-2S iron-sulfur cluster binding domain Pfam Description: 2Fe-2S iron-sulfur cluster binding domain
  misc_feature (36)..(155): Homolog of NCBI NO: 3023750 NR Description: Ferredoxin VI, chloroplast precursor (Fd VI)
  misc_feature (1)..(155): Homolog of NCBI NO: 6970498 NR Description: non-photosynthetic ferredoxin [Ipomoea nil]
  misc_feature (27)..(155): Homolog of NCBI NO: 7430754 NR Description: ferredoxin [2Fe-2S], root - rice
  misc_feature (1)..(155): Homolog of NCBI NO: 40714664 NR Description: putative ferredoxin [Oryza sativa (japonica
  misc_feature (8)..(155): Homolog of NCBI NO: 119958 NR Description: Ferredoxin III, chloroplast precursor (Fd III)
  misc_feature (58)..(155): Homolog of NCBI NO: 119934 NR Description: Ferredoxin, root R-B1
  misc_feature (1)..(155): Homolog of NCBI NO: 13182955 NR Description: ferredoxin [Impatiens balsamina]
  misc_feature (1)..(154): Homolog of NCBI NO: 2129915 NR Description: ferredoxin
  misc_feature (58)..(155): Homolog of NCBI NO: 119952 NR Description: Ferredoxin, root R-B2
  misc_feature (1)..(155): Homolog of NCBI NO: 15225888 NR Description: ferredoxin, putative [Arabidopsis thaliana]
MATFQISSTSMTTKAVLRSQPTNKLIANKSQQVSVGSVKKVSRSFGLKCSANSGATMSAVYKVKLIGPEGEEHEFEVQDDQFILDAAEEAGVDLPYSCRAGACSTCAGQIVKGQVDQSEGSFLEDDHLEKGFVLTCVAYPQSDCVIHTHKETELF

SEQ ID NO: 61514 - protein, 145 aa, Triticum aestivum
  peptide (1)..(145): Ceres Seq. ID no. 15225570
  misc_feature (56)..(132): Pfam Name: 2Fe-2S iron-sulfur cluster binding domain Pfam Description: 2Fe-2S iron-sulfur cluster binding domain
  misc_feature (26)..(145): Homolog of NCBI NO: 3023750 NR Description: Ferredoxin VI, chloroplast precursor (Fd VI)
  misc_feature (1)..(145): Homolog of NCBI NO: 6970498 NR Description: non-photosynthetic ferredoxin [Ipomoea nil]
  misc_feature (17)..(145): Homolog of NCBI NO: 7430754 NR Description: ferredoxin [2Fe-2S], root - rice
  misc_feature (1)..(145): Homolog of NCBI NO: 40714664 NR Description: putative ferredoxin [Oryza sativa (japonica
  misc_feature (1)..(145): Homolog of NCBI NO: 119958 NR Description: Ferredoxin III, chloroplast precursor (Fd III)
  misc_feature (48)..(145): Homolog of NCBI NO: 119934 NR Description: Ferredoxin, root R-B1
  misc_feature (1)..(145): Homolog of NCBI NO: 13182955 NR Description: ferredoxin [Impatiens balsamina]
  misc_feature (1)..(144): Homolog of NCBI NO: 2129915 NR Description: ferredoxin
  misc_feature (48)..(145): Homolog of NCBI NO: 119952 NR Description: Ferredoxin, root R-B2
  misc_feature (1)..(145): Homolog of NCBI NO: 15225888 NR Description: ferredoxin, putative [Arabidopsis thaliana]
MTTKAVLRSQPTNKLIANKSQQVSVGSVKKVSRSFGLKCSANSGATMSAVYKVKLIGPEGEEHEFEVQDDQFILDAAEEAGVDLPYSCRAGACSTCAGQIVKGQVDQSEGSFLEDDHLEKGFVLTCVAYPQSDCVIHTHKETELF

SEQ ID NO: 61515 - protein, 99 aa, Triticum aestivum
  peptide (1)..(99): Ceres Seq. ID no. 15225571
  misc_feature (10)..(86): Pfam Name: 2Fe-2S iron-sulfur cluster binding domain Pfam Description: 2Fe-2S iron-sulfur cluster binding domain
  misc_feature (1)..(99): Homolog of NCBI NO: 3023750 NR Description: Ferredoxin VI, chloroplast precursor (Fd VI)
  misc_feature (1)..(99): Homolog of NCBI NO: 6970498 NR Description: non-photosynthetic ferredoxin [Ipomoea nil]
  misc_feature (1)..(99): Homolog of NCBI NO: 7430754 NR Description: ferredoxin [2Fe-2S], root - rice
  misc_feature (1)..(99): Homolog of NCBI NO: 40714664 NR Description: putative ferredoxin [Oryza sativa (japonica
  misc_feature (1)..(99): Homolog of NCBI NO: 119958 NR Description: Ferredoxin III, chloroplast precursor (Fd III)
  misc_feature (2)..(99): Homolog of NCBI NO: 119934 NR Description: Ferredoxin, root R-B1
  misc_feature (1)..(99): Homolog of NCBI NO: 13182955 NR Description: ferredoxin [Impatiens balsamina]
  misc_feature (1)..(98): Homolog of NCBI NO: 2129915 NR Description: ferredoxin
  misc_feature (2)..(99): Homolog of NCBI NO: 119952 NR Description: Ferredoxin, root R-B2
  misc_feature (1)..(99): Homolog of NCBI NO: 15225888 NR Description: ferredoxin, putative [Arabidopsis thaliana]
MSAVYKVKLIGPEGEEHEFEVQDDQFILDAAEEAGVDLPYSCRAGACSTCAGQIVKGQVDQSEGSFLEDDHLEKGFVLTCVAYPQSDCVIHTHKETELF

SEQ ID NO: 61516 - DNA, 911 bp, Triticum aestivum
  misc_feature (1)..(911): Ceres Seq. ID no. 13661323
aaaacttcacctgtacacatagttatatagatatttactccggccatgattctgaaggtcctcacgctgggcgcgctcctcggctgccttgcctatggtaccaatggctgggagccagtgtgcggcgagaaggctggccgcatggagtgccccgacaacaagtgctgcagcaaggatgggcagtgtggcctaggccccgacttctgcggcgagggttgccaaagcggcgcctgctgcgtgagcttgcgctgtggctcgcagaacgacggcaagacgtgccccaacaaccagtgttgtggccaagacggggtatgcgggttcggcaacgagtactgcggctctggctgccagagcggcgcgtgctcgcagggcatgcaatgcggcagccacaggccatgccccgggaacttgtgctgcagccacgcaggttggtgcggtcttggccctcccttctgcgggactgggtgccagagcggagcctgttgcagctcggaccttaagccgtgcggcaacaggggctgtggccgagtgtgcgacaacaatctgtgttgcggcagggatggctactgcggtgacggcaagccctactgcggtggcggctgccagggcggtccatgctcctgcgccgctgccggcggcggtttcagctccactctactacggggactaggtgagtcatgatgagctcagcgtcgcctgcaatgttgcgccatggatggaagcactagatttgcaacgacgccaaataatatatggtagtaccagtttacattatcattactgccaaggtgtcggcgttttgatttcccacttttagttctctctccttgcaccatgtgaggttataatgggatcatatttataagtcgccagaattttatttttagtgtaaagtcacttttattgtgtgt

SEQ ID NO: 61517 - protein, 211 aa, Triticum aestivum
  peptide (1)..(211): Ceres Seq. ID no. 13661324
  misc_feature (66)..(106): Pfam Name: Chitin recognition protein Pfam Description: Chitin recognition protein
  misc_feature (1)..(204): Homolog of NCBI NO: 113509 NR Description: Lectin precursor (Agglutinin)
  misc_feature (26)..(204): Homolog of NCBI NO: 4689400 NR Description: lectin [Oryza sativa subsp. japonica]
  misc_feature (26)..(191): Homolog of NCBI NO: 230392 NR Description: Chain A, Wheat Germ Agglutinin (Isolectin 1)
  misc_feature (26)..(191): Homolog of NCBI NO: 230784 NR Description: Chain A, Wheat Germ Agglutinin (Isolectin 2)
  misc_feature (26)..(205): Homolog of NCBI NO: 1065091 NR Description: Chain A, Wheat Germ Agglutinin (Isolectin 3)
  misc_feature (26)..(205): Homolog of NCBI NO: 113507 NR Description: Agglutinin isolectin 3 precursor (WGA3)
  misc_feature (1)..(205): Homolog of NCBI NO: 113508 NR Description: Root-specific lectin precursor
  misc_feature (1)..(206): Homolog of NCBI NO: 113505 NR Description: Agglutinin isolectin 1 precursor (WGA1)
  misc_feature (26)..(205): Homolog of NCBI NO: 220977 NR Description: agglutinin isolectin 2 precursor [synthetic
  misc_feature (1)..(205): Homolog of NCBI NO: 113506 NR Description: Agglutinin isolectin 2 precursor (WGA2)
MILKVLTLGALLGCLAYGTNGWEPVCGEKAGRMECPDNKCCSKDGQCGLGPDFCGEGCQSGACCVSLRCGSQNDGKTCPNNQCCGQDGVCGFGNEYCGSGCQSGACSQGMQCGSHRPCPGNLCCSHAGWCGLGPPFCGTGCQSGACCSSDLKPCGNRGCGRVCDNNLCCGRDGYCGDGKPYCGGGCQGGPCSCAAAGGGFSSTLLRGLGES

SEQ ID NO: 61518 - protein, 179 aa, Triticum aestivum
  peptide (1)..(179): Ceres Seq. ID no. 13661325
  misc_feature (34)..(74): Pfam Name: Chitin recognition protein Pfam Description: Chitin recognition protein
  misc_feature (1)..(172): Homolog of NCBI NO: 113509 NR Description: Lectin precursor (Agglutinin)
  misc_feature (1)..(172): Homolog of NCBI NO: 4689400 NR Description: lectin [Oryza sativa subsp. japonica]
  misc_feature (1)..(159): Homolog of NCBI NO: 230392 NR Description: Chain A, Wheat Germ Agglutinin (Isolectin 1)
  misc_feature (1)..(159): Homolog of NCBI NO: 230784 NR Description: Chain A, Wheat Germ Agglutinin (Isolectin 2)
  misc_feature (1)..(173): Homolog of NCBI NO: 1065091 NR Description: Chain A, Wheat Germ Agglutinin (Isolectin 3)
  misc_feature (1)..(173): Homolog of NCBI NO: 113507 NR Description: Agglutinin isolectin 3 precursor (WGA3)
  misc_feature (1)..(173): Homolog of NCBI NO: 113508 NR Description: Root-specific lectin precursor
  misc_feature (1)..(174): Homolog of NCBI NO: 113505 NR Description: Agglutinin isolectin 1 precursor (WGA1)
  misc_feature (1)..(173): Homolog of NCBI NO: 220977 NR Description: agglutinin isolectin 2 precursor [synthetic
  misc_feature (1)..(173): Homolog of NCBI NO: 113506 NR Description: Agglutinin isolectin 2 precursor (WGA2)
MECPDNKCCSKDGQCGLGPDFCGEGCQSGACCVSLRCGSQNDGKTCPNNQCCGQDGVCGFGNEYCGSGCQSGACSQGMQCGSHRPCPGNLCCSHAGWCGLGPPFCGTGCQSGACCSSDLKPCGNRGCGRVCDNNLCCGRDGYCGDGKPYCGGGCQGGPCSCAAAGGGFSSTLLRGLGES

SEQ ID NO: 61519 - protein, 165 aa, Triticum aestivum
  peptide (1)..(165): Ceres Seq. ID no. 13661326
NFTCTHSYIDIYSGHDSEGPHAGRAPRLPCLWYQWLGASVRREGWPHGVPRQQVLQQGWAVWPRPRLLRRGLPKRRLLRELALWLAERRQDVPQQPVLWPRRGMRVRQRVLRLWLPERRVLAGHAMRQPQAMPRELVLQPRRLVRSWPSLLRDWVPERSLLQLGP

SEQ ID NO: 61520 - DNA, 1368 bp, Triticum aestivum
  misc_feature (1)..(1368): Ceres Seq. ID no. 14313354
atctctctctttactctgacgtgtttaccttcttcagtttctctccttcatctccggcgactttcgaggaagcgaagcttaagatttagggaactatggacagcttctggcaattgggcgatgagctccgaggtcagtcacgagcctcagaggatcacaaatggtccactgtcgcaaccaagctcgctgagcagactaggatgaaaggggaaaggatgaacaacctcgatctctccaagccctactctgagttcaggccaaccgacaagtttagtttccaggacaacaacaaccttaatttcaacatgttgaacctggacggcaagtatgtgcaaggcatgggcaaagctccgatgcagagcaatgtttacaacaacgtgaacaatgttttccagaagaacgacttcaagagtggaggcaacatgaaggttaacaagtacagtggcaatgttgttgctaacaaggagctgagcaacaacaacaacaagcacagcaataatgataatgtgaatatgaatgttgacaagaggtttaagactttgcctgcatcggagacgcttccgaggaatgaagttcttggcggctacatctttgtttgcaacaatgataccatgcaggaggacttgaaacgccacctatttggtttacctccaaggtacagggactctgtccgggcgataacacctgggttacctctgtttctttacaattacaccactcaccagctccatggtatctttgaggcaacaacttttggaggtactaatattgatgcgactgcctgggaagacaaaaagtgcaaaggagagtcaagatttccggctcaggtgaggatcagagtgaggaaaatatgcaaagccttggaagaggattccttcaggcctgttcttcaccactatgatggcccaaaattccgccttgagctctctgttcctgagacattggatctgctagatctgtgcgaacaagctggttctgcataagccgatcaaccctgcaatgccacgttgctaggggaagtgatctgaaatctatctatatatatgcatattaccataagagcgtaagcttttgggagttagataagagtcgaattcaaatgtatggtttactaagaagtgaggagttgtgtgcgtcttgaggcaagcaaaagggtgaagaagctctgccgaataagcgactacccttgttcttgttgtgtctaatgtgtgagtgtctgtgctttgtgagagatttgaaacaaacaatttatgtagagagaaagtgagactaaataacagagccaaaccaatggtatgagctactgtttgtgtttgctttgtgcaagggaaaaacaaatgttttaaatagcaagtttaacttttaagc

SEQ ID NO: 61521 - protein, 295 aa, Triticum aestivum
  peptide (1)..(295): Ceres Seq. ID no. 14313355
  misc_feature (140)..(288): Homolog of NCBI NO: 34896110 NR Description: P0701D05.9 [Oryza sativa (japonica
  misc_feature (173)..(284): Homolog of NCBI NO: 7488804 NR Description: gda-1 protein - garden pea
  misc_feature (63)..(282): Homolog of NCBI NO: 34913876 NR Description: B1156H12.22 [Oryza sativa (japonica
  misc_feature (97)..(288): Homolog of NCBI NO: 9757950 NR Description: gene_id:MJC20.15~similar to unknown
  misc_feature (118)..(291): Homolog of NCBI NO: 584825 NR Description: B2 PROTEIN
  misc_feature (47)..(288): Homolog of NCBI NO: 18422167 NR Description: expressed protein [Arabidopsis thaliana]
  misc_feature (82)..(295): Homolog of NCBI NO: 21665866 NR Description: GDA2 protein [Pisum sativum]
  misc_feature (1)..(295): Homolog of NCBI NO: 2369766 NR Description: hypothetical protein [Citrus x paradisi]
  misc_feature (1)..(295): Homolog of NCBI NO: 21592623 NR Description: gda-1, putative [Arabidopsis thaliana]
  misc_feature (1)..(295): Homolog of NCBI NO: 15232081 NR Description: gda-1 -related [Arabidopsis thaliana]
MDSFWQLGDELRGQSRASEDHKWSTVATKLAEQTRMKGERMNNLDLSKPYSEFRPTDKFSFQDNNNLNFNMLNLDGKYVQGMGKAPMQSNVYNNVNNVFQKNDFKSGGNMKVNKYSGNVVANKELSNNNNKHSNNDNVNMNVDKRFKTLPASETLPRNEVLGGYIFVCNNDTMQEDLKRHLFGLPPRYRDSVRAITPGLPLFLYNYTTHQLHGIFEATTFGGTNIDATAWEDKKCKGESRFPAQVRIRVRKICKALEEDSFRPVLHHYDGPKFRLELSVPETLDLLDLCEQAGSA

SEQ ID NO: 61522 - protein, 260 aa, Triticum aestivum
  peptide (1)..(260): Ceres Seq. ID no. 14313356
  misc_feature (105)..(253): Homolog of NCBI NO: 34896110 NR Description: P0701D05.9 [Oryza sativa (japonica
  misc_feature (138)..(249): Homolog of NCBI NO: 7488804 NR Description: gda-1 protein - garden pea
  misc_feature (28)..(247): Homolog of NCBI NO: 34913876 NR Description: B1156H12.22 [Oryza sativa (japonica
  misc_feature (62)..(253): Homolog of NCBI NO: 9757950 NR Description: gene_id:MJC20.15~similar to unknown
  misc_feature (83)..(256): Homolog of NCBI NO: 584825 NR Description: B2 PROTEIN
  misc_feature (12)..(253): Homolog of NCBI NO: 18422167 NR Description: expressed protein [Arabidopsis thaliana]
  misc_feature (47)..(260): Homolog of NCBI NO: 21665866 NR Description: GDA2 protein [Pisum sativum]
  misc_feature (1)..(260): Homolog of NCBI NO: 2369766 NR Description: hypothetical protein [Citrus x paradisi]
  misc_feature (1)..(260): Homolog of NCBI NO: 21592623 NR Description: gda-1, putative [Arabidopsis thaliana]
  misc_feature (1)..(260): Homolog of NCBI NO: 15232081 NR Description: gda-1 -related [Arabidopsis thaliana]
MKGERMNNLDLSKPYSEFRPTDKFSFQDNNNLNFNMLNLDGKYVQGMGKAPMQSNVYNNVNNVFQKNDFKSGGNMKVNKYSGNVVANKELSNNNNKHSNNDNVNMNVDKRFKTLPASETLPRNEVLGGYIFVCNNDTMQEDLKRHLFGLPPRYRDSVRAITPGLPLFLYNYTTHQLHGIFEATTFGGTNIDATAWEDKKCKGESRFPAQVRIRVRKICKALEEDSFRPVLHHYDGPKFRLELSVPETLDLLDLCEQAGSA

SEQ ID NO: 61523 - protein, 255 aa, Triticum aestivum
  peptide (1)..(255): Ceres Seq. ID no. 14313357
  misc_feature (100)..(248): Homolog of NCBI NO: 34896110 NR Description: P0701D05.9 [Oryza sativa (japonica
  misc_feature (133)..(244): Homolog of NCBI NO: 7488804 NR Description: gda-1 protein - garden pea
  misc_feature (23)..(242): Homolog of NCBI NO: 34913876 NR Description: B1156H12.22 [Oryza sativa (japonica
  misc_feature (57)..(248): Homolog of NCBI NO: 9757950 NR Description: gene_id:MJC20.15~similar to unknown
  misc_feature (78)..(251): Homolog of NCBI NO: 584825 NR Description: B2 PROTEIN
  misc_feature (7)..(248): Homolog of NCBI NO: 18422167 NR Description: expressed protein [Arabidopsis thaliana]
  misc_feature (42)..(255): Homolog of NCBI NO: 21665866 NR Description: GDA2 protein [Pisum sativum]
  misc_feature (1)..(255): Homolog of NCBI NO: 2369766 NR Description: hypothetical protein [Citrus x paradisi]
  misc_feature (1)..(255): Homolog of NCBI NO: 21592623 NR Description: gda-1, putative [Arabidopsis thaliana]
  misc_feature (1)..(255): Homolog of NCBI NO: 15232081 NR Description: gda-1 -related [Arabidopsis thaliana]
MNNLDLSKPYSEFRPTDKFSFQDNNNLNFNMLNLDGKYVQGMGKAPMQSNVYNNVNNVFQKNDFKSGGNMKVNKYSGNVVANKELSNNNNKHSNNDNVNMNVDKRFKTLPASETLPRNEVLGGYIFVCNNDTMQEDLKRHLFGLPPRYRDSVRAITPGLPLFLYNYTTHQLHGIFEATTFGGTNIDATAWEDKKCKGESRFPAQVRIRVRKICKALEEDSFRPVLHHYDGPKFRLELSVPETLDLLDLCEQAGSA

SEQ ID NO: 61524 - DNA, 594 bp, Triticum aestivum
  misc_feature (1)..(594): Ceres Seq. ID no. 12624601
atctgcacaccgctgaatgctgatcagctgacatcgagttcttgaagacacaccactattcgctagaatacgatgggggatctgcagatcgtgctgtccggggggacgatcgaggcgcagcacgtggagatgaaggtgcccctctactcctacgggtgcgagaagaagatcaagaaggcgctgtcgaatctgaaagggattcactcggttcaggtggattaccaccagcagcaggtgatggtgtgggggatctgcacccggaacgacgtgctggccgccgtccggcggaagcggcgagcggcgcggttctggggcgcggaccacccggatctgggcgaggacgctaggctgggggacgcccagaagcactacctgcgggcgttcgccgcgtacaggagtaggaagtcgtggaagaagctcttccccatgatccggctgtaacagcagcagaccgcgagcgtgatgttttgtcgcaatgcttgctgcatgcgtggccgcgtgtgtgttgcactgcaggaatgtccaggagttgctagtagtttggtacagtagcgcatgatgttacatatcgaataaatgtgctctgttcttgtc

SEQ ID NO: 61525 - protein, 122 aa, Triticum aestivum
  peptide (1)..(122): Ceres Seq. ID no. 12624602
  misc_feature (20)..(86): Homolog of NCBI NO: 15218813 NR Description: hypothetical protein; protein id: At1g29100.1
  misc_feature (5)..(80): Homolog of NCBI NO: 21397273 NR Description: Putative atfp6-like protein
  misc_feature (13)..(86): Homolog of NCBI NO: 25406916 NR Description: hypothetical protein [imported] - Arabidopsis
  misc_feature (13)..(86): Homolog of NCBI NO: 15221451 NR Description: hypothetical protein; protein id: At1g06330.1
  misc_feature (13)..(87): Homolog of NCBI NO: 34902222 NR Description: Hypothetical protein [Oryza sativa (japonica
  misc_feature (13)..(115): Homolog of NCBI NO: 37536458 NR Description: hypothetical protein [Oryza sativa (japonica
  misc_feature (20)..(86): Homolog of NCBI NO: 21536757 NR Description: unknown [Arabidopsis thaliana]
  misc_feature (1)..(86): Homolog of NCBI NO: 18417024 NR Description: Expressed protein
  misc_feature (1)..(86): Homolog of NCBI NO: 7487518 NR Description: hypothetical protein T29A15.80 - Arabidopsis
  misc_feature (1)..(122): Homolog of NCBI NO: 38346796 NR Description: OSJNBa0088A01.3 [Oryza sativa (japonica
MGDLQIVLSGGTIEAQHVEMKVPLYSYGCEKKIKKALSNLKGIHSVQVDYHQQQVMVWGICTRNDVLAAVRRKRRAARFWGADHPDLGEDARLGDAQKHYLRAFAAYRSRKSWKKLFPMIRL

SEQ ID NO: 61526 - protein, 103 aa, Triticum aestivum
  peptide (1)..(103): Ceres Seq. ID no. 12624603
  misc_feature (1)..(67): Homolog of NCBI NO: 15218813 NR Description: hypothetical protein; protein id: At1g29100.1
  misc_feature (1)..(61): Homolog of NCBI NO: 21397273 NR Description: Putative atfp6-like protein
  misc_feature (1)..(67): Homolog of NCBI NO: 25406916 NR Description: hypothetical protein [imported] - Arabidopsis
  misc_feature (1)..(67): Homolog of NCBI NO: 15221451 NR Description: hypothetical protein; protein id: At1g06330.1
  misc_feature (1)..(68): Homolog of NCBI NO: 34902222 NR Description: Hypothetical protein [Oryza sativa (japonica
  misc_feature (1)..(96): Homolog of NCBI NO: 37536458 NR Description: hypothetical protein [Oryza sativa (japonica
  misc_feature (1)..(67): Homolog of NCBI NO: 21536757 NR Description: unknown [Arabidopsis thaliana]
  misc_feature (1)..(67): Homolog of NCBI NO: 18417024 NR Description: Expressed protein
  misc_feature (1)..(67): Homolog of NCBI NO: 7487518 NR Description: hypothetical protein T29A15.80 - Arabidopsis
  misc_feature (1)..(103): Homolog of NCBI NO: 38346796 NR Description: OSJNBa0088A01.3 [Oryza sativa (japonica
MKVPLYSYGCEKKIKKALSNLKGIHSVQVDYHQQQVMVWGICTRNDVLAAVRRKRRAARFWGADHPDLGEDARLGDAQKHYLRAFAAYRSRKSWKKLFPMIRL

SEQ ID NO: 61527 - protein, 67 aa, Triticum aestivum
  peptide (1)..(67): Ceres Seq. ID no. 12624604
  misc_feature (1)..(31): Homolog of NCBI NO: 15218813 NR Description: hypothetical protein; protein id: At1g29100.1
  misc_feature (1)..(25): Homolog of NCBI NO: 21397273 NR Description: Putative atfp6-like protein
  misc_feature (1)..(31): Homolog of NCBI NO: 25406916 NR Description: hypothetical protein [imported] - Arabidopsis
  misc_feature (1)..(31): Homolog of NCBI NO: 15221451 NR Description: hypothetical protein; protein id: At1g06330.1
  misc_feature (1)..(32): Homolog of NCBI NO: 34902222 NR Description: Hypothetical protein [Oryza sativa (japonica
  misc_feature (1)..(60): Homolog of NCBI NO: 37536458 NR Description: hypothetical protein [Oryza sativa (japonica
  misc_feature (1)..(31): Homolog of NCBI NO: 21536757 NR Description: unknown [Arabidopsis thaliana]
  misc_feature (1)..(31): Homolog of NCBI NO: 18417024 NR Description: Expressed protein
  misc_feature (1)..(31): Homolog of NCBI NO: 7487518 NR Description: hypothetical protein T29A15.80 - Arabidopsis
  misc_feature (1)..(67): Homolog of NCBI NO: 38346796 NR Description: OSJNBa0088A01.3 [Oryza sativa (japonica
MVWGICTRNDVLAAVRRKRRAARFWGADHPDLGEDARLGDAQKHYLRAFAAYRSRKSWKKLFPMIRL

SEQ ID NO: 61528 - DNA, 604 bp, Triticum aestivum
  misc_feature (1)..(604): Ceres Seq. ID no. 14301855
gagagatgagcgggaacgaggttgagaaggccaaggctgccgccggcggcggcgtaggggagtacgggacgttccatggtccgcccagctacccgcccccgcgcccgcccgtcgggcacccgcagcccgccccgccgcccggcctccacggccatcgcgagcccaactcgcgccaccgcggcggctaccaggccgggaacgctcaagatcacgaagcaggtgcgcgtggacatagacctgaccgccttccatgctgcggtattggcatgggctggtttctattcataatcggtttctttcttggtgccatcccctggtatgtcggagcatttctgttgtggtattctagagtggattacagggagaaaccaggatatgtggcatgcacaatagcggctgtccttgctacaattgccgtcatcatcggggcaaccgctggagctcacgtttattgatgtcagtctacattgtgtcactgtacatattgtacatttcatggatgaagaaagatgtcatgtcgcgtcttctgcactgtatttgattattaactttgaaatattcaatgtatgacgaggagaaccaagtccttgttatggtcacaaat

SEQ ID NO: 61529 - protein, 150 aa, Triticum aestivum
  peptide (1)..(150): Ceres Seq. ID no. 14301856
  misc_feature (66)..(141): Homolog of NCBI NO: 18423932 NR Description: expressed protein [Arabidopsis thaliana]
  misc_feature (66)..(141): Homolog of NCBI NO: 8777446 NR Description: gene_id:MHM17.20~pir||T04261~similar to unknown
  misc_feature (31)..(150): Homolog of NCBI NO: 21554784 NR Description: unknown [Arabidopsis thaliana]
  misc_feature (31)..(150): Homolog of NCBI NO: 18400450 NR Description: expressed protein [Arabidopsis thaliana]
  misc_feature (21)..(131): Homolog of NCBI NO: 25518134 NR Description: probable 60S ribosomal protein L18A - Arabidopsis
  misc_feature (21)..(150): Homolog of NCBI NO: 21593837 NR Description: 60S ribosomal protein L18A, putative [Arabidopsis
  misc_feature (21)..(150): Homolog of NCBI NO: 18397305 NR Description: expressed protein [Arabidopsis thaliana]
  misc_feature (4)..(150): Homolog of NCBI NO: 18404524 NR Description: expressed protein [Arabidopsis thaliana]
  misc_feature (4)..(150): Homolog of NCBI NO: 21554011 NR Description: unknown [Arabidopsis thaliana]
  misc_feature (2)..(147): Homolog of NCBI NO: 18394436 NR Description: expressed protein [Arabidopsis thaliana]
EMSGNEVEKAKAAAGGGVGEYGTFHGPPSYPPPRPPVGHPQPAPPPGLHGHREPNSRHRGGYQAGNAQDHEAGARGHRPDRLPCCGIGMGWFLFIIGFFLGAIPWYVGAFLLWYSRVDYREKPGYVACTIAAVLATIAVIIGATAGAHVY

SEQ ID NO: 61530 - protein, 149 aa, Triticum aestivum
  peptide (1)..(149): Ceres Seq. ID no. 14301857
  misc_feature (65)..(140): Homolog of NCBI NO: 18423932 NR Description: expressed protein [Arabidopsis thaliana]
  misc_feature (65)..(140): Homolog of NCBI NO: 8777446 NR Description: gene_id:MHM17.20~pir||T04261~similar to unknown
  misc_feature (30)..(149): Homolog of NCBI NO: 21554784 NR Description: unknown [Arabidopsis thaliana]
  misc_feature (30)..(149): Homolog of NCBI NO: 18400450 NR Description: expressed protein [Arabidopsis thaliana]
  misc_feature (20)..(130): Homolog of NCBI NO: 25518134 NR Description: probable 60S ribosomal protein L18A - Arabidopsis
  misc_feature (20)..(149): Homolog of NCBI NO: 21593837 NR Description: 60S ribosomal protein L18A, putative [Arabidopsis
  misc_feature (20)..(149): Homolog of NCBI NO: 18397305 NR Description: expressed protein [Arabidopsis thaliana]
  misc_feature (3)..(149): Homolog of NCBI NO: 18404524 NR Description: expressed protein [Arabidopsis thaliana]
  misc_feature (3)..(149): Homolog of NCBI NO: 21554011 NR Description: unknown [Arabidopsis thaliana]
  misc_feature (1)..(146): Homolog of NCBI NO: 18394436 NR Description: expressed protein [Arabidopsis thaliana]
MSGNEVEKAKAAAGGGVGEYGTFHGPPSYPPPRPPVGHPQPAPPPGLHGHREPNSRHRGGYQAGNAQDHEAGARGHRPDRLPCCGIGMGWFLFIIGFFLGAIPWYVGAFLLWYSRVDYREKPGYVACTIAAVLATIAVIIGATAGAHVY

SEQ ID NO: 61531 - DNA, 763 bp, Triticum aestivum
  misc_feature (1)..(763): Ceres Seq. ID no. 13598124
gggatttgctaggcttgcgcaaaagtacaaaaatgttacaagaaattcagagaaggggaaaaagacgaggggaaaatcagcattctgacagcgacttgatcggaccgatcggcacgcgtggcacaccttctttccacacctcccggctgaagctgctgtagaatcctcaaaccaatcaaccaccatccatcaccaaagagcagagcaaggaaatctgtggacgttctgcccgtccaccaaatcccttcagcgcgccgcctccctcgctcgcgaggactctgcggatctctctcagcggcagcaagcagagcggagagagcaatccgccatggccatggtcgcctccacctccatcgcccaccacaagccgcgtttgtcggtgctgtgcaggaagaaggaccgggacagggagctggagcgggagaaggagcacaagtaccccttcaaggtcgtcgagatcacgccgccaccgcgatgcctcggcgtccgctgcttccccacgaacatccactgcggggagagcgtgacgatcgaagggcaggcgtacaccgtgtcggcggtgacgcaccggtaccagctgcgcaaggggcggtacgagccgagcgagaagcgcctcgacgtcctctccaccggcagatacatcctcaacctctacctcgacagcctcctcgacaagtcctagactctctatgctctactctacactactagtacaaatttatttattctactacttcagcaaatttatttatgcctctactgc

SEQ ID NO: 61532 - protein, 117 aa, Triticum aestivum
  peptide (1)..(117): Ceres Seq. ID no. 13598125
  misc_feature (15)..(117): Homolog of NCBI NO: 22327475 NR Description: expressed protein [Arabidopsis thaliana]
  misc_feature (2)..(117): Homolog of NCBI NO: 32488468 NR Description: OSJNBa0081L15.1 [Oryza sativa (japonica
MAMVASTSIAHHKPRLSVLCRKKDRDRELEREKEHKYPFKVVEITPPPRCLGVRCFPTNIHCGESVTIEGQAYTVSAVTHRYQLRKGRYEPSEKRLDVLSTGRYILNLYLDSLLDKS

SEQ ID NO: 61533 - protein, 115 aa, Triticum aestivum
  peptide (1)..(115): Ceres Seq. ID no. 13598126
  misc_feature (13)..(115): Homolog of NCBI NO: 22327475 NR Description: expressed protein [Arabidopsis thaliana]
  misc_feature (1)..(115): Homolog of NCBI NO: 32488468 NR Description: OSJNBa0081L15.1 [Oryza sativa (japonica
MVASTSIAHHKPRLSVLCRKKDRDRELEREKEHKYPFKVVEITPPPRCLGVRCFPTNIHCGESVTIEGQAYTVSAVTHRYQLRKGRYEPSEKRLDVLSTGRYILNLYLDSLLDKS

SEQ ID NO: 61534 - protein, 78 aa, Triticum aestivum
  peptide (1)..(78): Ceres Seq. ID no. 13598127
MPRRPLLPHEHPLRGERDDRRAGVHRVGGDAPVPAAQGAVRAEREAPRRPLHRQIHPQPLPRQPPRQVLDSLCSTLHY

SEQ ID NO: 61535 - DNA, 785 bp, Triticum aestivum
  misc_feature (1)..(785): Ceres Seq. ID no. 12783998
acaccacaccatcttcatcccccctcacatcccacacctccacacgttcgaaccaccaccaccagaagcagcacccatggcacccaaggcggcagagaagaagctggcgccggccacggcagagaagacgacggcggggaagaagcccaaggcggagaagcgggcgccggcgaccaaggaggccggcggcgagggcaagacgaggggccggaagaagggcagcaaggccaagaagggcgtggagacgtacaagatctacatcttcaaggtgctcaagcaggtgcacccggacgtcggcatctcctccaaggccatgtccatcatgaactccttcatcaacgacatcttcgagaagctcgccggggagtccgccaagctggcgaggtacaacaagaagcccaccatcacgtcccgggagatccagacctccgtccgcctcgtcctccccggggagctcgccaagcacgccgtctccgagggcaccaaggccgtcaccaagttcacatcatcctaggctggcttcgtcgtcgtcgtttcatgagttgatggcggcaggcatcgtgtatgtagttggcagtagtatgatgttacaacctttgtaagaattgtgctgcttgcttgtgggactgaagaaacagtgatgttgctgtttaaatcaatgttcgtgtgtgcttgcgtgtcgcttcagagttcagactgactcctcttgatgccatttgtttatgtcagcaagtttctaccgtgatagtttatctagtaattttaatttgctgtcattttatctg

SEQ ID NO: 61536 - protein, 181 aa, Triticum aestivum
  peptide (1)..(181): Ceres Seq. ID no. 12783999
  misc_feature (54)..(168): Homolog of NCBI NO: 17505204 NR Description: histone 1, H2bc; H2B histone family, member S
TPHHLHPPSHPTPPHVRTTTTRSSTHGTQGGREEAGAGHGREDDGGEEAQGGEAGAGDQGGRRRGQDEGPEEGQQGQEGRGDVQDLHLQGAQAGAPGRRHLLQGHVHHELLHQRHLREARRGVRQAGEVQQEAHHHVPGDPDLRPPRPPRGARQARRLRGHQGRHQVHIILGWLRRRRFMS

SEQ ID NO: 61537 - protein, 170 aa, Triticum aestivum
  peptide (1)..(170): Ceres Seq. ID no. 12784000
  misc_feature (40)..(170): Pfam Name: Core histone H2A/H2B/H3/H4 Pfam Description: Core histone H2A/H2B/H3/H4
  misc_feature (17)..(170): Homolog of NCBI NO: 15231304 NR Description: histone H2B; protein id: At3g45980.1, supported
  misc_feature (19)..(170): Homolog of NCBI NO: 399854 NR Description: Histone H2B.2
  misc_feature (19)..(170): Homolog of NCBI NO: 3913804 NR Description: Histone H2B.3
  misc_feature (19)..(170): Homolog of NCBI NO: 34895832 NR Description: putative histone H2B [Oryza sativa (japonica
  misc_feature (19)..(170): Homolog of NCBI NO: 34895888 NR Description: putative histone H2B [Oryza sativa (japonica
  misc_feature (19)..(170): Homolog of NCBI NO: 34895896 NR Description: putative histone H2B [Oryza sativa (japonica
  misc_feature (19)..(170): Homolog of NCBI NO: 34895838 NR Description: putative histone H2B [Oryza sativa (japonica
  misc_feature (19)..(170): Homolog of NCBI NO: 122022 NR Description: Histone H2B
  misc_feature (19)..(170): Homolog of NCBI NO: 34895900 NR Description: putative histone H2B [Oryza sativa (japonica
  misc_feature (25)..(170): Homolog of NCBI NO: 122033 NR Description: HISTONE H2B.2
HHTIFIPPHIPHLHTFEPPPPEAAPMAPKAAEKKLAPATAEKTTAGKKPKAEKRAPATKEAGGEGKTRGRKKGSKAKKGVETYKIYIFKVLKQVHPDVGISSKAMSIMNSFINDIFEKLAGESAKLARYNKKPTITSREIQTSVRLVLPGELAKHAVSEGTKAVTKFTSS

SEQ ID NO: 61538 - protein, 145 aa, Triticum aestivum
  peptide (1)..(145): Ceres Seq. ID no. 12784001
  misc_feature (15)..(145): Pfam Name: Core histone H2A/H2B/H3/H4 Pfam Description: Core histone H2A/H2B/H3/H4
  misc_feature (1)..(145): Homolog of NCBI NO: 15231304 NR Description: histone H2B; protein id: At3g45980.1, supported
  misc_feature (1)..(145): Homolog of NCBI NO: 399854 NR Description: Histone H2B.2
  misc_feature (1)..(145): Homolog of NCBI NO: 3913804 NR Description: Histone H2B.3
  misc_feature (1)..(145): Homolog of NCBI NO: 34895832 NR Description: putative histone H2B [Oryza sativa (japonica
  misc_feature (1)..(145): Homolog of NCBI NO: 34895888 NR Description: putative histone H2B [Oryza sativa (japonica
  misc_feature (1)..(145): Homolog of NCBI NO: 34895896 NR Description: putative histone H2B [Oryza sativa (japonica
  misc_feature (1)..(145): Homolog of NCBI NO: 34895838 NR Description: putative histone H2B [Oryza sativa (japonica
  misc_feature (1)..(145): Homolog of NCBI NO: 122022 NR Description: Histone H2B
  misc_feature (1)..(145): Homolog of NCBI NO: 34895900 NR Description: putative histone H2B [Oryza sativa (japonica
  misc_feature (1)..(145): Homolog of NCBI NO: 122033 NR Description: HISTONE H2B.2
MAPKAAEKKLAPATAEKTTAGKKPKAEKRAPATKEAGGEGKTRGRKKGSKAKKGVETYKIYIFKVLKQVHPDVGISSKAMSIMNSFINDIFEKLAGESAKLARYNKKPTITSREIQTSVRLVLPGELAKHAVSEGTKAVTKFTSS

SEQ ID NO: 61539 - DNA, 1203 bp, Triticum aestivum
  misc_feature (1)..(1203): Ceres Seq. ID no. 13662054
aatattcttctctgttttgtattcgtctgaggtgttttatcttcttcttcttcttcttagacgaagcagtgaaaggattcggattctctgtcaatttttcgagaagagaagtttctaacagtattgggatagagatagatagatagatgagttcatctctacctatgaggctcctcgtgcctctcacacttcccttgattcctcctccttcttcggattctctagctccgtctccgctcagatcgaaaaaccctaactttattctccgatcctcttcttctagtacctcctgttcatcttccctgtggcagctcttccccaggagatccagatcctcttctccttgtgttcccatgtgcacgaaagaccaagacatcacagatacttggagaaatgaagatgatcctattacatgtgggccgcttgaatctgatgaagattccggaggcctccggattcctactcaggctcaggccatcgttgaaggctccggttcagttgctgtctctgagctcagaccttcccctgatgttgattacattcaagagcttctggcgatacagcagcaagggcctagaaccattggcttctttgggactaggaacatgggtttcatgcatcaagaactcatcgagattcttagctacgccatggttattactaaaaatcatatatatacttcaggtgcatctggaactaatgcagctgttatcagaggtgcgttgagagctgagaggccagagcttcttacagtaatcttacctcaaagtttgaaaaaacaacctcctgagagccaagagctattgtctaaggtgcaaaacgtggtagaaaagccacacaatgatcatttgccattactagaagctagcaggctgtgtaatatggacatcatatcacaagtacagcaagtgatctgcttcgcgtttcatgacagtaggcttctcatggagacatgtcaagaagctaaaaatctccgcaagatcgtcactctcttctacctcgattgattcccactctcttctcctgggaacacaagaggatggatacaagtttctttgtaaattgtgaatctctcccccatcccaaaacatattttactattcttttgtctagattttgaaaactccatcattatgatttgtaggattaaattctcagctattttgtaactttacatgggttataaaatatttcttctcatct

SEQ ID NO: 61540 - protein, 286 aa, Triticum aestivum
  peptide (1)..(286): Ceres Seq. ID no. 13662055
  misc_feature (154)..(286): Homolog of NCBI NO: 17232156 NR Description: hypothetical protein [Nostoc sp. PCC 7120]
  misc_feature (136)..(286): Homolog of NCBI NO: 37522470 NR Description: hypothetical protein gll2901 [Gloeobacter
  misc_feature (150)..(286): Homolog of NCBI NO: 23043068 NR Description: hypothetical protein [Trichodesmium erythraeum
  misc_feature (119)..(286): Homolog of NCBI NO: 16331173 NR Description: unknown protein [Synechocystis sp. PCC 6803]
  misc_feature (117)..(286): Homolog of NCBI NO: 13812204 NR Description: hypothetical protein [Guillardia theta]
  misc_feature (85)..(222): Homolog of NCBI NO: 34894968 NR Description: B1088D01.6 [Oryza sativa (japonica
  misc_feature (1)..(262): Homolog of NCBI NO: 7486491 NR Description: hypothetical protein At2g43940 [imported] -
  misc_feature (1)..(286): Homolog of NCBI NO: 15232185 NR Description: expressed protein [Arabidopsis thaliana]
  misc_feature (1)..(286): Homolog of NCBI NO: 21537298 NR Description: unknown [Arabidopsis thaliana]
  misc_feature (1)..(286): Homolog of NCBI NO: 30689549 NR Description: predicted protein [Arabidopsis thaliana]
MSSSLPMRLLVPLTLPLIPPPSSDSLAPSPLRSKNPNFILRSSSSSTSCSSSLWQLFPRRSRSSSPCVPMCTKDQDITDTWRNEDDPITCGPLESDEDSGGLRIPTQAQAIVEGSGSVAVSELRPSPDVDYIQELLAIQQQGPRTIGFFGTRNMGFMHQELIEILSYAMVITKNHIYTSGASGTNAAVIRGALRAERPELLTVILPQSLKKQPPESQELLSKVQNVVEKPHNDHLPLLEASRLCNMDIISQVQQVICFAFHDSRLLMETCQEAKNLRKIVTLFYLD

SEQ ID NO: 61541 - protein, 280 aa, Triticum aestivum
  peptide (1)..(280): Ceres Seq. ID no. 13662056
  misc_feature (148)..(280): Homolog of NCBI NO: 17232156 NR Description: hypothetical protein [Nostoc sp. PCC 7120]
  misc_feature (130)..(280): Homolog of NCBI NO: 37522470 NR Description: hypothetical protein gll2901 [Gloeobacter
  misc_feature (144)..(280): Homolog of NCBI NO: 23043068 NR Description: hypothetical protein [Trichodesmium erythraeum
  misc_feature (113)..(280): Homolog of NCBI NO: 16331173 NR Description: unknown protein [Synechocystis sp. PCC 6803]
  misc_feature (111)..(280): Homolog of NCBI NO: 13812204 NR Description: hypothetical protein [Guillardia theta]
  misc_feature (79)..(216): Homolog of NCBI NO: 34894968 NR Description: B1088D01.6 [Oryza sativa (japonica
  misc_feature (1)..(256): Homolog of NCBI NO: 7486491 NR Description: hypothetical protein At2g43940 [imported] -
  misc_feature (1)..(280): Homolog of NCBI NO: 15232185 NR Description: expressed protein [Arabidopsis thaliana]
  misc_feature (1)..(280): Homolog of NCBI NO: 21537298 NR Description: unknown [Arabidopsis thaliana]
  misc_feature (1)..(280): Homolog of NCBI NO: 30689549 NR Description: predicted protein [Arabidopsis thaliana]
MRLLVPLTLPLIPPPSSDSLAPSPLRSKNPNFILRSSSSSTSCSSSLWQLFPRRSRSSSPCVPMCTKDQDITDTWRNEDDPITCGPLESDEDSGGLRIPTQAQAIVEGSGSVAVSELRPSPDVDYIQELLAIQQQGPRTIGFFGTRNMGFMHQELIEILSYAMVITKNHIYTSGASGTNAAVIRGALRAERPELLTVILPQSLKKQPPESQELLSKVQNVVEKPHNDHLPLLEASRLCNMDIISQVQQVICFAFHDSRLLMETCQEAKNLRKIVTLFYLD

SEQ ID NO: 61542 - protein, 217 aa, Triticum aestivum
  peptide (1)..(217): Ceres Seq. ID no. 13662057
  misc_feature (85)..(217): Homolog of NCBI NO: 17232156 NR Description: hypothetical protein [Nostoc sp. PCC 7120]
  misc_feature (67)..(217): Homolog of NCBI NO: 37522470 NR Description: hypothetical protein gll2901 [Gloeobacter
  misc_feature (81)..(217): Homolog of NCBI NO: 23043068 NR Description: hypothetical protein [Trichodesmium erythraeum
  misc_feature (50)..(217): Homolog of NCBI NO: 16331173 NR Description: unknown protein [Synechocystis sp. PCC 6803]
  misc_feature (48)..(217): Homolog of NCBI NO: 13812204 NR Description: hypothetical protein [Guillardia theta]
  misc_feature (16)..(153): Homolog of NCBI NO: 34894968 NR Description: B1088D01.6 [Oryza sativa (japonica
  misc_feature (1)..(193): Homolog of NCBI NO: 7486491 NR Description: hypothetical protein At2g43940 [imported] -
  misc_feature (1)..(217): Homolog of NCBI NO: 15232185 NR Description: expressed protein [Arabidopsis thaliana]
  misc_feature (1)..(217): Homolog of NCBI NO: 21537298 NR Description: unknown [Arabidopsis thaliana]
  misc_feature (1)..(217): Homolog of NCBI NO: 30689549 NR Description: predicted protein [Arabidopsis thaliana]
MCTKDQDITDTWRNEDDPITCGPLESDEDSGGLRIPTQAQAIVEGSGSVAVSELRPSPDVDYIQELLAIQQQGPRTIGFFGTRNMGFMHQELIEILSYAMVITKNHIYTSGASGTNAAVIRGALRAERPELLTVILPQSLKKQPPESQELLSKVQNVVEKPHNDHLPLLEASRLCNMDIISQVQQVICFAFHDSRLLMETCQEAKNLRKIVTLFYLD

SEQ ID NO: 61543 - DNA, 1066 bp, Triticum aestivum
  misc_feature (1)..(1066): Ceres Seq. ID no. 12784852
agtcggccgcctcccccctccacctcctccccagcgtcgcctcccgttcggaaccccaagctcccccgccgccggcgaaatggccccgaagcgaggcggcaaggccccggtgccggcgaagaagaaggcggcggacaaggtggtgaacccgctgttcgagaagaggccgaagcagttcggcatcggcggggcgctgccgcccaagaaggacctccaccggttcgtcaagtggcccaaggtcgtccgcattcagcgccagcgccgcatcctcaagcagcgcctcaaggtgcccccggcgctccaccagttcacccgcaccctcgacaagaacctcgccaccaacctgtttaagatgcttctcaagtaccgccctgaggacaaggtggctaagaaggagaggcttctgaagagggcccaggctgaggctgaggggaaaaccgttgaggcctagaagccaattgttgtgaagtatggtcttaaccatgtcacttacctcatcgagcagagcaaggctcagctggtcgtcatcgctcatgatgttgacccaattgagctggttgtgtggctcccagccctgtgcaggaagatggaggtcccatactgcattgttaagggaaagtcacgccttggatcgatcgttcacaagaagactgcctcagttctgtgccttaccactgtgaagaacgaggacaagcttgagttcagcaagatcttggaggctatcaaggctaacttcaatgacaagttcgacgaggtcaggaagaagtggggcggtggtgtcatgggctccaagtcgcaggccaagaccaaggccagggaaaggctcatcgccaaggaggctgcgcagaggatgaactaagcctagccttatatgtcagagcatatgccatgtagtttccctttcagtgtgtcctgattttgacgaggaactcgaacccttttagcagcactgtggaatcgtattgtggttttctgattctctgttccgttcgccagacttatgcaaagatcagatgaggtttacccatgtttggattctatatagttttatgccctttgtcgagtc

SEQ ID NO: 61544 - protein, 149 aa, Triticum aestivum
  peptide (1)..(149): Ceres Seq. ID no. 12784853
  misc_feature (31)..(149): Homolog of NCBI NO: 30410942 NR Description: Rpl7a protein [Mus musculus]
  misc_feature (31)..(149): Homolog of NCBI NO: 7305443 NR Description: ribosomal protein L7a; surfeit 3 [Mus musculus]
  misc_feature (31)..(149): Homolog of NCBI NO: 4506661 NR Description: ribosomal protein L7a
  misc_feature (1)..(149): Homolog of NCBI NO: 34853132 NR Description: similar to 60S ribosomal protein L7a (Surfeit
  misc_feature (30)..(149): Homolog of NCBI NO: 1173062 NR Description: 60S RIBOSOMAL PROTEIN L7A
  misc_feature (30)..(149): Homolog of NCBI NO: 17530825 NR Description: Ribosomal protein L7A CG3314-PD
  misc_feature (19)..(149): Homolog of NCBI NO: 20161741 NR Description: putative 60S ribosomal protein
  misc_feature (27)..(149): Homolog of NCBI NO: 15229338 NR Description: 60S RIBOSOMAL PROTEIN L7A protein
  misc_feature (27)..(149): Homolog of NCBI NO: 15226635 NR Description: 60S ribosomal protein L7A
  misc_feature (27)..(149): Homolog of NCBI NO: 548774 NR Description: 60S RIBOSOMAL PROTEIN L7A
VGRLPPPPPPQRRLPFGTPSSPAAGEMAPKRGGKAPVPAKKKAADKVVNPLFEKRPKQFGIGGALPPKKDLHRFVKWPKVVRIQRQRRILKQRLKVPPALHQFTRTLDKNLATNLFKMLLKYRPEDKVAKKERLLKRAQAEAEGKTVEA

SEQ ID NO: 61545 - protein, 123 aa, Triticum aestivum
  peptide (1)..(123): Ceres Seq. ID no. 12784854
  misc_feature (5)..(123): Homolog of NCBI NO: 30410942 NR Description: Rpl7a protein [Mus musculus]
  misc_feature (5)..(123): Homolog of NCBI NO: 7305443 NR Description: ribosomal protein L7a; surfeit 3 [Mus musculus]
  misc_feature (5)..(123): Homolog of NCBI NO: 4506661 NR Description: ribosomal protein L7a
  misc_feature (1)..(123): Homolog of NCBI NO: 34853132 NR Description: similar to 60S ribosomal protein L7a (Surfeit
  misc_feature (4)..(123): Homolog of NCBI NO: 1173062 NR Description: 60S RIBOSOMAL PROTEIN L7A
  misc_feature (4)..(123): Homolog of NCBI NO: 17530825 NR Description: Ribosomal protein L7A CG3314-PD
  misc_feature (1)..(123): Homolog of NCBI NO: 20161741 NR Description: putative 60S ribosomal protein
  misc_feature (1)..(123): Homolog of NCBI NO: 15229338 NR Description: 60S RIBOSOMAL PROTEIN L7A protein
  misc_feature (1)..(123): Homolog of NCBI NO: 15226635 NR Description: 60S ribosomal protein L7A
  misc_feature (1)..(123): Homolog of NCBI NO: 548774 NR Description: 60S RIBOSOMAL PROTEIN L7A
MAPKRGGKAPVPAKKKAADKVVNPLFEKRPKQFGIGGALPPKKDLHRFVKWPKVVRIQRQRRILKQRLKVPPALHQFTRTLDKNLATNLFKMLLKYRPEDKVAKKERLLKRAQAEAEGKTVEA

SEQ ID NO: 61546 - protein, 116 aa, Triticum aestivum
  peptide (1)..(116): Ceres Seq. ID no. 12784855
SRPPPPSTSSPASPPVRNPKLPRRRRNGPEARRQGPGAGEEEGGGQGGEPAVREEAEAVRHRRGAAAQEGPPPVRQVAQGRPHSAPAPHPQAAPQGAPGAPPVHPHPRQEPRHQPV

SEQ ID NO: 61547 - DNA, 1182 bp, Triticum aestivum
  misc_feature (1)..(1182): Ceres Seq. ID no. 13662053
attctctctctctctctcgctgcctggccaggtagcttctctctctcctccacgctcctgccgacaaaaacaagaaacgacgtagcacggtagcagcaaagagaaagagagagagaccactggtagccaagggtgggagagaagcaggagtgccgctgccgatcgaccatggagccgggccccgacgcgcctcgcggcgagggagcgagcgcgccggaggagtctggaccgtcctcatcctcggtggccgtggagaaagctgaagagccacaggcacaagcgcagccgccggaaggaggaggccagcaagtcgcactgcaggagcacctgcagccgcagccgctgtcgcagcagccgccggtgccagcggggctgagccgctacgagtcgcagaagcgccgcgactggaacacgttcctgcagtacctgcgcaaccacaagccgccgctgacactcgcgcggtgcagcggcgcgcacgtcatcgagttcctcaagtacctggaccagttcggcaagaccaaggtgcacgccgacggctgcgcctacttcggccagcccaacccgccggctccgtgcgcgtgcccgctccgacaggcatggggcagcctcgacgcgctcattggccgcctgcgcgccgcctacgaggagtccggcggccgccctgagtccaaccccttcgccgcgcgcgccgtgcgcatctatctgcgcgaggtgcgcgaggcgcaggccaaggcgcgcgggataccctacgagaagaagaagcgcaagcgcggcagcacgtccgcccccgcggcgccgcctcccgttgtcaccgccgcggaggcggcagcgacctccggaggcggcgaggacgacgaggacgagccgtcacagtccgctgagcaacagcacacaacgccagcgtctcctccgactagaattagtagcgccggcgctactagtaccaccgcagcggcggcagccacaacgacgacgacgacaacgagagggaaggagaaggaagcggcagaaggatcagcgtgataagtgtagaccatcaaattacccttttgattattccatcgcatccaaattctaatctctgcaccatcataattttagttgtttgttattataattactgtgctgttatgatttgttggatatatatatatatataagagagaggtctaagtagttcgt

SEQ ID NO: 61548 - protein, 284 aa, Triticum aestivum
  peptide (1)..(284): Ceres Seq. ID no. 15220155
  misc_feature (63)..(185): Pfam Name: Protein of unknown function (DUF640) Pfam Description: Protein of unknown function (DUF640)
  misc_feature (42)..(201): Homolog of NCBI NO: 18412120 NR Description: expressed protein [Arabidopsis thaliana]
  misc_feature (62)..(201): Homolog of NCBI NO: 18406012 NR Description: expressed protein [Arabidopsis thaliana]
  misc_feature (51)..(213): Homolog of NCBI NO: 15229310 NR Description: hypothetical protein [Arabidopsis thaliana]
  misc_feature (55)..(213): Homolog of NCBI NO: 15241821 NR Description: expressed protein [Arabidopsis thaliana]
  misc_feature (67)..(209): Homolog of NCBI NO: 37535384 NR Description: hypothetical protein [Oryza sativa (japonica
  misc_feature (57)..(209): Homolog of NCBI NO: 18402578 NR Description: expressed protein [Arabidopsis thaliana]
  misc_feature (40)..(201): Homolog of NCBI NO: 38344650 NR Description: OSJNBb0072M01.12 [Oryza sativa (japonica
  misc_feature (70)..(225): Homolog of NCBI NO: 15237680 NR Description: hypothetical protein [Arabidopsis thaliana]
  misc_feature (56)..(229): Homolog of NCBI NO: 18390725 NR Description: expressed protein [Arabidopsis thaliana]
  misc_feature (41)..(227): Homolog of NCBI NO: 34907938 NR Description: B1088C09.17 [Oryza sativa (japonica
MEPGPDAPRGEGASAPEESGPSSSSVAVEKAEEPQAQAQPPEGGGQQVALQEHLQPQPLSQQPPVPAGLSRYESQKRRDWNTFLQYLRNHKPPLTLARCSGAHVIEFLKYLDQFGKTKVHADGCAYFGQPNPPAPCACPLRQAWGSLDALIGRLRAAYEESGGRPESNPFAARAVRIYLREVREAQAKARGIPYEKKKRKRGSTSAPAAPPPVVTAAEAAATSGGGEDDEDEPSQSAEQQHTTPASPPTRISSAGATSTTAAAAATTTTTTTRGKEKEAAEGSA

SEQ ID NO: 61549 - DNA, 1423 bp, Triticum aestivum
  misc_feature (1)..(1423): Ceres Seq. ID no. 13661403
agacctcgaaatcatctagcgaggtcgtcgggctaatcgaagttgggcaccaccgtttattcactgaatggactcgaccaccaaccaattcgccggcgccgccgccgccgctggcgcgtcatcggcgaacacggcaccgctgccggccatgctcgctgacgcccttatcggcgccggagctggaggaggagatggggaccccagcgccgctctccaacggctggcggccctcggcgatcgcatggctgctgtccggcgcctcctcgtcgcctccatttctggggaatcgcagcccctctcctcctcggatattcagtccgtgtcctccgagatctcatctgccgctcacctcgtcgtcctcaacgccgcctccctcctttcttcgtccctcccttttcccgccccatctgccactcccgcccctcccgctcctatacaagagcttcccgcagcggcctccaccgccgatgtgcttccccaagaagctaccaagggctacgatgtcgtggagctcgatgccgacgagctgctcgcggagcatgcccacttctgcaatatctgcggcaagggcttccgccgcgacgccaacctcaggatgcacatgcgcgcgcacggcgaccgattcaagaccctggacgcgctctcccggcccggtcaggcaaagccagttgatggccgcgatgtgcgcttttcctgtcctttcacggggtgcaaccggaaccgtgcgcaccgccgcttccggccgctcaagtcagcggtgtgcgcgcgcaaccacttccgccgcagccactgccccaaactctacgcgtgtgagcgctgcggtggcaagaagcgttttgctgttcttgccgatctccgcggccacctccgccactgcggtgaggaggcacagtggcgctgctcctgcggcaccaccttctcccgcaaggacaagctgttcggccatctcgccctctttgaaggccatatgccagccatgtcccctccgaacaaggatgcagtgacaacgactacagaggcaccccttgatataatggatgaaggaggaatcgaagagcaggaagatggcggtgaaggtggttttgatccggagttcttcaaggagtggatggaggagctcaaagatgatggcgtgcctgctggtggcacagtctggcctggacgggcagcagctgggcaatagcctgtgttgcaagttctgtttggggtgtatggtaacagccgcaaggggcattggctgccaaagtgtctgaaagagcggtggggagatgcttctgaagaacagcacagaggtttctaacaagagcagtgggggcatgcccttgtttgtatggcacagtagtagtctggaatcactttgccagtctccttgtcgctccctcgttattctgtacctattgtcctgttggcagaagtacattcc

SEQ ID NO: 61550 - protein, 371 aa, Triticum aestivum
  peptide (1)..(371): Ceres Seq. ID no. 13661404
  misc_feature (160)..(182): Pfam Name: Zinc finger, C2H2 type Pfam Description: Zinc finger, C2H2 type
  misc_feature (111)..(369): Homolog of NCBI NO: 33146841 NR Description: zinc finger protein-like protein
  misc_feature (144)..(313): Homolog of NCBI NO: 30688719 NR Description: expressed protein [Arabidopsis thaliana]
  misc_feature (144)..(313): Homolog of NCBI NO: 10177236 NR Description: contains similarity to C2H2-type zinc finger
  misc_feature (144)..(319): Homolog of NCBI NO: 28376689 NR Description: putative zinc finger protein
  misc_feature (144)..(340): Homolog of NCBI NO: 21593564 NR Description: zinc finger protein, putative [Arabidopsis
  misc_feature (144)..(340): Homolog of NCBI NO: 15218606 NR Description: zinc finger protein -related [Arabidopsis
  misc_feature (145)..(321): Homolog of NCBI NO: 10241636 NR Description: putative zinc finger protein
  misc_feature (145)..(329): Homolog of NCBI NO: 38346456 NR Description: OSJNBa0019G23.4 [Oryza sativa (japonica
  misc_feature (144)..(319): Homolog of NCBI NO: 34908682 NR Description: putative zinc finger protein
MDSTTNQFAGAAAAAGASSANTAPLPAMLADALIGAGAGGGDGDPSAALQRLAALGDRMAAVRRLLVASISGESQPLSSSDIQSVSSEISSAAHLVVLNAASLLSSSLPFPAPSATPAPPAPIQELPAAASTADVLPQEATKGYDVVELDADELLAEHAHFCNICGKGFRRDANLRMHMRAHGDRFKTLDALSRPGQAKPVDGRDVRFSCPFTGCNRNRAHRRFRPLKSAVCARNHFRRSHCPKLYACERCGGKKRFAVLADLRGHLRHCGEEAQWRCSCGTTFSRKDKLFGHLALFEGHMPAMSPPNKDAVTTTTEAPLDIMDEGGIEEQEDGGEGGFDPEFFKEWMEELKDDGVPAGGTVWPGRAAAGQ

SEQ ID NO: 61551 - protein, 344 aa, Triticum aestivum
  peptide (1)..(344): Ceres Seq. ID no. 13661405
  misc_feature (133)..(155): Pfam Name: Zinc finger, C2H2 type Pfam Description: Zinc finger, C2H2 type
  misc_feature (84)..(342): Homolog of NCBI NO: 33146841 NR Description: zinc finger protein-like protein
  misc_feature (117)..(286): Homolog of NCBI NO: 30688719 NR Description: expressed protein [Arabidopsis thaliana]
  misc_feature (117)..(286): Homolog of NCBI NO: 10177236 NR Description: contains similarity to C2H2-type zinc finger
  misc_feature (117)..(292): Homolog of NCBI NO: 28376689 NR Description: putative zinc finger protein
  misc_feature (117)..(313): Homolog of NCBI NO: 21593564 NR Description: zinc finger protein, putative [Arabidopsis
  misc_feature (117)..(313): Homolog of NCBI NO: 15218606 NR Description: zinc finger protein -related [Arabidopsis
  misc_feature (118)..(294): Homolog of NCBI NO: 10241636 NR Description: putative zinc finger protein
  misc_feature (118)..(302): Homolog of NCBI NO: 38346456 NR Description: OSJNBa0019G23.4 [Oryza sativa (japonica
  misc_feature (117)..(292): Homolog of NCBI NO: 34908682 NR Description: putative zinc finger protein
MLADALIGAGAGGGDGDPSAALQRLAALGDRMAAVRRLLVASISGESQPLSSSDIQSVSSEISSAAHLVVLNAASLLSSSLPFPAPSATPAPPAPIQELPAAASTADVLPQEATKGYDVVELDADELLAEHAHFCNICGKGFRRDANLRMHMRAHGDRFKTLDALSRPGQAKPVDGRDVRFSCPFTGCNRNRAHRRFRPLKSAVCARNHFRRSHCPKLYACERCGGKKRFAVLADLRGHLRHCGEEAQWRCSCGTTFSRKDKLFGHLALFEGHMPAMSPPNKDAVTTTTEAPLDIMDEGGIEEQEDGGEGGFDPEFFKEWMEELKDDGVPAGGTVWPGRAAAGQ

SEQ ID NO: 61552 - protein, 333 aa, Triticum aestivum
  peptide (1)..(333): Ceres Seq. ID no. 13661406
  misc_feature (26)..(155): Pfam Name: Extensin-like region Pfam Description: Extensin-like region
  misc_feature (27)..(325): Homolog of NCBI NO: 13592175 NR Description: ppg3 [Leishmania major]
  misc_feature (7)..(327): Homolog of NCBI NO: 30984464 NR Description: very large tegument protein [Cercopithecine
  misc_feature (51)..(325): Homolog of NCBI NO: 13592175 NR Description: ppg3 [Leishmania major]
  misc_feature (26)..(325): Homolog of NCBI NO: 13592175 NR Description: ppg3 [Leishmania major]
  misc_feature (51)..(325): Homolog of NCBI NO: 13592175 NR Description: ppg3 [Leishmania major]
  misc_feature (25)..(325): Homolog of NCBI NO: 13592175 NR Description: ppg3 [Leishmania major]
  misc_feature (50)..(325): Homolog of NCBI NO: 13592175 NR Description: ppg3 [Leishmania major]
  misc_feature (27)..(325): Homolog of NCBI NO: 13592175 NR Description: ppg3 [Leishmania major]
  misc_feature (32)..(318): Homolog of NCBI NO: 5420387 NR Description: proteophosphoglycan [Leishmania major]
  misc_feature (27)..(325): Homolog of NCBI NO: 13592175 NR Description: ppg3 [Leishmania major]
TSKSSSEVVGLIEVGHHRLFTEWTRPPTNSPAPPPPLARHRRTRHRCRPCSLTPLSAPELEEEMGTPAPLSNGWRPSAIAWLLSGASSSPPFLGNRSPSPPRIFSPCPPRSHLPLTSSSSTPPPSFLRPSLFPPHLPLPPLPLLYKSFPQRPPPPMCFPKKLPRATMSWSSMPTSCSRSMPTSAISAARASAATPTSGCTCARTATDSRPWTRSPGPVRQSQLMAAMCAFPVLSRGATGTVRTAASGRSSQRCARATTSAAATAPNSTRVSAAVARSVLLFLPISAATSATAVRRHSGAAPAAPPSPARTSCSAISPSLKAICQPCPLRTRMQ

SEQ ID NO: 61553 - DNA, 905 bp, Triticum aestivum
  misc_feature (1)..(905): Ceres Seq. ID no. 13662000
gattcaccgctccccctccacctccacccggacccgcaagatcccgacccgccgcggcccccgctcctcgatcgattgatatcagacgcggccgggtgggcggaagaaggcggcggcggcggcgatgagcgcggtgaacatcaccaacgtggcggtgctggacaaccccaccgccttcctcaaccccttccagttcgagatctcctacgagtgcctcgtcccgctcgacgacgatctggaatggaagctcacatatgttggatcagctgaagacgaaacctatgatcagcaacttgagagcgtgcttgttggacctgtcaatgttgggacctaccgttttgtcttccaggctgacccaccggaccctttgaagatacgtgaagaagacatcattggtgtcaccgtgctgctgttgacatgctcctacgtgggtcaggagttcatgagggtgggttattatgtgaacaatgattacgacgaggagcagctgagagaagagcccccggcaaagctattacttgacagggtgcagagaaacattttggctgacaagccccgtgtcaccaagttcccaatcaacttccaccctgaacctggcacgagctcagaacagccgcaacaggatgcagaacagcagcagcagccgacttcaccggaaccacagacggctccagtagagccacatatggcgccactagagaatgtccccattgccgccgaccaatgatcagagttggggtgctaacggtctgttctccatgccttctatggtgtcttaatgttacgaatcgagagtggtggttctgcaatgtactgatctgttgtttacatttcacaatctgttctgtggcaaatgttgggtgtctagctatttcttgataaagagtacttctgcctattttgtt

SEQ ID NO: 61554 - protein, 200 aa, Triticum aestivum
  peptide (1)..(200): Ceres Seq. ID no. 13662001
  misc_feature (1)..(155): Pfam Name: Anti-silencing protein, ASF1-like Pfam Description: Anti-silencing protein, ASF1-like
  misc_feature (1)..(167): Homolog of NCBI NO: 21313226 NR Description: ASF1 anti-silencing function 1 homolog B [Mus
  misc_feature (1)..(169): Homolog of NCBI NO: 6841514 NR Description: HSPC146 [Homo sapiens]
  misc_feature (1)..(169): Homolog of NCBI NO: 7661592 NR Description: ASF1 anti-silencing function 1 homolog A
  misc_feature (1)..(195): Homolog of NCBI NO: 33416731 NR Description: Unknown (protein for MGC:69151) [Xenopus laevis]
  misc_feature (1)..(157): Homolog of NCBI NO: 31215032 NR Description: ENSANGP00000013594 [Anopheles gambiae]
  misc_feature (1)..(193): Homolog of NCBI NO: 17737649 NR Description: anti-silencing factor 1 CG9383-PA [Drosophila
  misc_feature (25)..(178): Homolog of NCBI NO: 34911252 NR Description: putative anti-silencing factor 1-like protein
  misc_feature (12)..(186): Homolog of NCBI NO: 6069498 NR Description: S-locus protein 7 [Brassica rapa]
  misc_feature (1)..(174): Homolog of NCBI NO: 15240842 NR Description: anti-silencing factor 1-related protein
  misc_feature (1)..(186): Homolog of NCBI NO: 15219729 NR Description: (ASF1a) anti-silencing function 1a protein
MSAVNITNVAVLDNPTAFLNPFQFEISYECLVPLDDDLEWKLTYVGSAEDETYDQQLESVLVGPVNVGTYRFVFQADPPDPLKIREEDIIGVTVLLLTCSYVGQEFMRVGYYVNNDYDEEQLREEPPAKLLLDRVQRNILADKPRVTKFPINFHPEPGTSSEQPQQDAEQQQQPTSPEPQTAPVEPHMAPLENVPIAADQ

SEQ ID NO: 61555 - DNA, 888 bp, Triticum aestivum
  misc_feature (1)..(888): Ceres Seq. ID no. 13598758
atatcaggttcaggttcgggttctgcagccgccgtagaaccctagcgtgtctcattaaaccctcaacctccaccttccgacttgcttccagtaattcttccctccccaccaagaaaatcacagccgagaaatagccgaccgaccgcacccttccctcccttctcccccttcctcaagacaggccggaaccaaatcgtgaagctcgatggaccacgtgggctccatggaggagaggatcgtggcggaccggatccggaagaagctggaggaggtgaacgtcgccgcccagaagcacctcgagggcgtgcaggaccatgtcaacttcactctgcagaaagagtacttcaagtgtgcacatgactgctttgataggcgacggactcaagaggggatcaccagctgtgtagagaactgtggtgtgcccgctctttctgccaacaatgttgttgagactgagatggccaagttccaggaaaggttgaatcgctcgttgatggtctgccaagataagtttgaagcagcaaagctccagaagatgaagacagacgcaaccaatgagctggagtcgtgcgtgaacaggtccatcgatgacagcatcagggtcctgccccatctggttgagcagatcaagtccaccattaacatgaagtagaggaatcagaaactttcaaattgtcccccggctcgtttttgccatcgttagctgaatctatccagagtctctagcagcactagtgtaacatgctcattactgccatgagaaccatgtctagagaagagttttttgctgagagattagtgcgtctaaatggcgccgcgataccagactaaatgttgcaaacgtagcttttgcataacatcttaaaatcttaaaatcttttttttttc

SEQ ID NO: 61556 - protein, 148 aa, Triticum aestivum
  peptide (1)..(148): Ceres Seq. ID no. 13598759
  misc_feature (15)..(143): Pfam Name: Eukaryotic protein of unknown function (DUF842) Pfam Description: Eukaryotic protein of unknown function (DUF842)
  misc_feature (19)..(146): Homolog of NCBI NO: 15489002 NR Description: 2010309E21Rik protein [Mus musculus]
  misc_feature (19)..(146): Homolog of NCBI NO: 13385042 NR Description: RIKEN cDNA 2010309E21 [Mus musculus]
  misc_feature (15)..(146): Homolog of NCBI NO: 37589716 NR Description: Unknown (protein for MGC:73247) [Danio rerio]
  misc_feature (19)..(146): Homolog of NCBI NO: 27712200 NR Description: similar to RIKEN cDNA 2010309E21
  misc_feature (12)..(145): Homolog of NCBI NO: 15929034 NR Description: hypothetical protein FLJ14668 [Homo sapiens]
  misc_feature (12)..(145): Homolog of NCBI NO: 14249520 NR Description: hypothetical protein FLJ14668 [Homo sapiens]
  misc_feature (1)..(124): Homolog of NCBI NO: 15221247 NR Description: hypothetical protein [Arabidopsis thaliana]
  misc_feature (8)..(147): Homolog of NCBI NO: 15224344 NR Description: expressed protein [Arabidopsis thaliana]
  misc_feature (1)..(147): Homolog of NCBI NO: 15221245 NR Description: hypothetical Protein [Arabidopsis thaliana]
  misc_feature (1)..(147): Homolog of NCBI NO: 18402744 NR Description: expressed protein [Arabidopsis thaliana]
MDHVGSMEERIVADRIRKKLEEVNVAAQKHLEGVQDHVNFTLQKEYFKCAHDCFDRRRTQEGITSCVENCGVPALSANNVVETEMAKFQERLNRSLMVCQDKFEAAKLQKMKTDATNELESCVNRSIDDSIRVLPHLVEQIKSTINMK

SEQ ID NO: 61557 - protein, 142 aa, Triticum aestivum
  peptide (1)..(142): Ceres Seq. ID no. 13598760
  misc_feature (9)..(137): Pfam Name: Eukaryotic protein of unknown function (DUF842) Pfam Description: Eukaryotic protein of unknown function (DUF842)
  misc_feature (13)..(140): Homolog of NCBI NO: 15489002 NR Description: 2010309E21Rik protein [Mus musculus]
  misc_feature (13)..(140): Homolog of NCBI NO: 13385042 NR Description: RIKEN cDNA 2010309E21 [Mus musculus]
  misc_feature (9)..(140): Homolog of NCBI NO: 37589716 NR Description: Unknown (protein for MGC:73247) [Danio rerio]
  misc_feature (13)..(140): Homolog of NCBI NO: 27712200 NR Description: similar to RIKEN cDNA 2010309E21
  misc_feature (6)..(139): Homolog of NCBI NO: 15929034 NR Description: hypothetical protein FLJ14668 [Homo sapiens]
  misc_feature (6)..(139): Homolog of NCBI NO: 14249520 NR Description: hypothetical protein FLJ14668 [Homo sapiens]
  misc_feature (1)..(118): Homolog of NCBI NO: 15221247 NR Description: hypothetical protein [Arabidopsis thaliana]
  misc_feature (2)..(141): Homolog of NCBI NO: 15224344 NR Description: expressed protein [Arabidopsis thaliana]
  misc_feature (1)..(141): Homolog of NCBI NO: 15221245 NR Description: hypothetical Protein [Arabidopsis thaliana]
  misc_feature (1)..(141): Homolog of NCBI NO: 18402744 NR Description: expressed protein [Arabidopsis thaliana]
MEERIVADRIRKKLEEVNVAAQKHLEGVQDHVNFTLQKEYFKCAHDCFDRRRTQEGITSCVENCGVPALSANNVVETEMAKFQERLNRSLMVCQDKFEAAKLQKMKTDATNELESCVNRSIDDSIRVLPHLVEQIKSTINMK

SEQ ID NO: 61558 - DNA, 1296 bp, Triticum aestivum
  misc_feature (1)..(1296): Ceres Seq. ID no. 13664216
agaacatcctaatcgaaaaagtcgtctcccgccaccgcgtcgcccagcaccttcttaaccaacaccaagccaagtaggcaacccagagtcgagtcctcgggaccccgagctcttgcggatgggttgcctgcggcgccggccggagccggcggccatcgacatcacctgggtgtcgtgccggggcgtcaggtcgtcgctcccgttccacacgccgtgcctctacgcctccgtctccgtcacgccgtcgtctgccggcaagaacgtccgccgccaccgcgtcaagacccccaccgaccgcgccggcggcgagaaccccgagtgggacgagcgcctgcggctccgccttcccgacgacgcctcgctggcgtcagagcaggaagccgcggggaaaaagaaggacgggcacgttgaccacgacgacagcgtccttctcgtgcggttcgagctcaaggccgaggtggccgtcctcggggacgtgctcgccgcgtcggccgtcgtgccgctctccgacctcgtcgccgacggcaggacgcgccgcgtgtcctaccagcttgccgcgtccgcggacggcaggcarmcrcaayvdcgtyatctccttctcgtacgccttccaccacggaagcaccatcgacgacgaccaggaggaccgcagcagcgacggcgagccggtatcgcccgctagcccggcccctcccccgccgccgccgcctgagtcgacggtgtcgtcctccgggatgtacccggtgatggagtgggggccactggagcacctcgcggtttacccaccggtgaacgccgacacggtcacgtgctcaagctcaccggagccgattgcggtctacccaccgttgcaggagacatcgagccgtggaatttacccgatggtgggggagccggatagcagtttgtaccccacagtagactttgctccggtgagctgttacccgccgatgacggcgccgtactactacggtggtggttccgggtgtccggcagctcctgcatgggacgggcgatgtttgtacggttgaaacctcggtttccaccctgattttccagcgtttcgttggacggtgtgccggtggcttgtacttttttccgtaaaattcacgtggtgatgccgccatactaggcatccttggccggcgcagcagtgatgccgggattgtgctgtgcgttattggtggtattcgatatgttcgagccgataaaattcgtatgtatatttgtgaaatttgtgtatgttgtcacatgtgcttgataaattaaaggcacctttgatttgaaggttctttt

SEQ ID NO: 61559 - protein, 187 aa, Triticum aestivum
  peptide (1)..(187): Ceres Seq. ID no. 15220296
  misc_feature (153)..(153): Xaa is any aa, unknown or other
  misc_feature (154)..(154): Xaa is any aa, unknown or other
  misc_feature (156)..(156): Xaa is any aa, unknown or other
  misc_feature (158)..(158): Xaa is any aa, unknown or other
MGCLRRRPEPAAIDITWVSCRGVRSSLPFHTPCLYASVSVTPSSAGKNVRRHRVKTPTDRAGGENPEWDERLRLRLPDDASLASEQEAAGKKKDGHVDHDDSVLLVRFELKAEVAVLGDVLAASAVVPLSDLVADGRTRRVSYQLAASADGRXXQXRXLLLVRLPPRKHHRRRPGGPQQRRRAGIAR

SEQ ID NO: 61560 - protein, 98 aa, Triticum aestivum
  peptide (1)..(98): Ceres Seq. ID no. 15220297
  misc_feature (1)..(85): Homolog of NCBI NO: 13592175 NR Description: ppg3 [Leishmania major]
MYPVMEWGPLEHLAVYPPVNADTVTCSSSPEPIAVYPPLQETSSRGIYPMVGEPDSSLYPTVDFAPVSCYPPMTAPYYYGGGSGCPAAPAWDGRCLYG

SEQ ID NO: 61561 - protein, 94 aa, Triticum aestivum
  peptide (1)..(94): Ceres Seq. ID no. 15220298
  misc_feature (1)..(81): Homolog of NCBI NO: 13592175 NR Description: ppg3 [Leishmania major]
MEWGPLEHLAVYPPVNADTVTCSSSPEPIAVYPPLQETSSRGIYPMVGEPDSSLYPTVDFAPVSCYPPMTAPYYYGGGSGCPAAPAWDGRCLYG

SEQ ID NO: 61562 - DNA, 924 bp, Triticum aestivum
  misc_feature (1)..(924): Ceres Seq. ID no. 13598153
acacagtcgtaagggcaaacccgctctctctccccccaaatcgatggagtctgacggcgaggaggaggcggcggcgacgccggcggcggggcggctgaagggctgcccagagctgtcggtggagggggacatgcgggagatggccaagacggcggcctggagcgtcagctcctgcaagcccggcaacggcgtcgcctccctccgcgacgacagcctcgacacctactggcagtctgacggcgcgcagccgcacctggtcaacatccagttccagaagaaggtgcagctgcagcttgttgtgctctacgtggatttcaagctggacgagagctacacgcccagcaagatctccatccgggccggcgacggcttccacaatctcaaggaaattaaaacggtggaccttttgaagccagtaggatgggttcatatatcattatctggcactgatcccggagaaacattcattcatacatttatgctccaaatcgcggtgttggccaatcacctgaacgggagggacacccatgtccggcagatcaagatatatgggccacgaccgaaccccgttccccaccagcctttccacttcacttccagggaatgcatcatgtactccaccatcaggtgatggttcgtgaaccctggtcgcgtgggatcctccatatcagagacctttatcgtgtggcctgtgcgcttcagtcctccatgacaaacgagtcactgaagtatccagcatatgttatcatgtactactgtagattaagttgctgctgaagcattaggctgtctctctgaacatctaacacgtactaattcatgttgtattccattccatccatgtattcttggtagtacatctttttcctccatttaatgtaacatttcactatttctggaatggattggaagtttctcctggtt

SEQ ID NO: 61563 - protein, 209 aa, Triticum aestivum
  peptide (1)..(209): Ceres Seq. ID no. 13598154
  misc_feature (21)..(209): Pfam Name: Anaphase-promoting complex, subunit 10 (APC10) Pfam Description: Anaphase-promoting complex, subunit 10 (APC10)
  misc_feature (15)..(148): Homolog of NCBI NO: 40746784 NR Description: hypothetical protein AN0911.2 [Aspergillus
  misc_feature (41)..(190): Homolog of NCBI NO: 39595285 NR Description: Hypothetical protein CBG03913 [Caenorhabditis
  misc_feature (15)..(209): Homolog of NCBI NO: 28573741 NR Description: CG11419-PA [Drosophila melanogaster]
  misc_feature (37)..(185): Homolog of NCBI NO: 16975123 NR Description: Chain A, Crystal Structure Of The Apc10DOC1
  misc_feature (37)..(209): Homolog of NCBI NO: 34395509 NR Description: Anaphase promoting complex subunit 10 (APC10)
  misc_feature (37)..(209): Homolog of NCBI NO: 4836700 NR Description: anaphase promoting complex subunit 10 [Homo
  misc_feature (37)..(209): Homolog of NCBI NO: 7657035 NR Description: anaphase-promoting complex subunit 10
  misc_feature (22)..(209): Homolog of NCBI NO: 21592739 NR Description: unknown [Arabidopsis thaliana]
  misc_feature (22)..(209): Homolog of NCBI NO: 18398701 NR Description: expressed protein [Arabidopsis thaliana]
  misc_feature (15)..(209): Homolog of NCBI NO: 5091606 NR Description: ESTs dbj|D15316 and dbj|C98044 come from this
HSRKGKPALSPPKSMESDGEEEAAATPAAGRLKGCPELSVEGDMREMAKTAAWSVSSCKPGNGVASLRDDSLDTYWQSDGAQPHLVNIQFQKKVQLQLVVLYVDFKLDESYTPSKISIRAGDGFHNLKEIKTVDLLKPVGWVHISLSGTDPGETFIHTFMLQIAVLANHLNGRDTHVRQIKIYGPRPNPVPHQPFHFTSRECIMYSTIR

SEQ ID NO: 61564 - protein, 195 aa, Triticum aestivum
  peptide (1)..(195): Ceres Seq. ID no. 13598155
  misc_feature (7)..(195): Pfam Name: Anaphase-promoting complex, subunit 10 (APC10) Pfam Description: Anaphase-promoting complex, subunit 10 (APC10)
  misc_feature (1)..(134): Homolog of NCBI NO: 40746784 NR Description: hypothetical protein AN0911.2 [Aspergillus
  misc_feature (27)..(176): Homolog of NCBI NO: 39595285 NR Description: Hypothetical protein CBG03913 [Caenorhabditis
  misc_feature (1)..(195): Homolog of NCBI NO: 28573741 NR Description: CG11419-PA [Drosophila melanogaster]
  misc_feature (23)..(171): Homolog of NCBI NO: 16975123 NR Description: Chain A, Crystal Structure Of The Apc10DOC1
  misc_feature (23)..(195): Homolog of NCBI NO: 34395509 NR Description: Anaphase promoting complex subunit 10 (APC10)
  misc_feature (23)..(195): Homolog of NCBI NO: 4836700 NR Description: anaphase promoting complex subunit 10 [Homo
  misc_feature (23)..(195): Homolog of NCBI NO: 7657035 NR Description: anaphase-promoting complex subunit 10
  misc_feature (8)..(195): Homolog of NCBI NO: 21592739 NR Description: unknown [Arabidopsis thaliana]
  misc_feature (8)..(195): Homolog of NCBI NO: 18398701 NR Description: expressed protein [Arabidopsis thaliana]
  misc_feature (1)..(195): Homolog of NCBI NO: 5091606 NR Description: ESTs dbj|D15316 and dbj|C98044 come from this
MESDGEEEAAATPAAGRLKGCPELSVEGDMREMAKTAAWSVSSCKPGNGVASLRDDSLDTYWQSDGAQPHLVNIQFQKKVQLQLVVLYVDFKLDESYTPSKISIRAGDGFHNLKEIKTVDLLKPVGWVHISLSGTDPGETFIHTFMLQIAVLANHLNGRDTHVRQIKIYGPRPNPVPHQPFHFTSRECIMYSTIR

SEQ ID NO: 61565 - protein, 166 aa, Triticum aestivum
  peptide (1)..(166): Ceres Seq. ID no. 13598156
  misc_feature (1)..(166): Pfam Name: Anaphase-promoting complex, subunit 10 (APC10) Pfam Description: Anaphase-promoting complex, subunit 10 (APC10)
  misc_feature (1)..(105): Homolog of NCBI NO: 40746784 NR Description: hypothetical protein AN0911.2 [Aspergillus
  misc_feature (1)..(147): Homolog of NCBI NO: 39595285 NR Description: Hypothetical protein CBG03913 [Caenorhabditis
  misc_feature (1)..(166): Homolog of NCBI NO: 28573741 NR Description: CG11419-PA [Drosophila melanogaster]
  misc_feature (1)..(142): Homolog of NCBI NO: 16975123 NR Description: Chain A, Crystal Structure Of The Apc10DOC1
  misc_feature (1)..(166): Homolog of NCBI NO: 34395509 NR Description: Anaphase promoting complex subunit 10 (APC10)
  misc_feature (1)..(166): Homolog of NCBI NO: 4836700 NR Description: anaphase promoting complex subunit 10 [Homo
  misc_feature (1)..(166): Homolog of NCBI NO: 7657035 NR Description: anaphase-promoting complex subunit 10
  misc_feature (1)..(166): Homolog of NCBI NO: 21592739 NR Description: unknown [Arabidopsis thaliana]
  misc_feature (1)..(166): Homolog of NCBI NO: 18398701 NR Description: expressed protein [Arabidopsis thaliana]
  misc_feature (1)..(166): Homolog of NCBI NO: 5091606 NR Description: ESTs dbj|D15316 and dbj|C98044 come from this
MREMAKTAAWSVSSCKPGNGVASLRDDSLDTYWQSDGAQPHLVNIQFQKKVQLQLVVLYVDFKLDESYTPSKISIRAGDGFHNLKEIKTVDLLKPVGWVHISLSGTDPGETFIHTFMLQIAVLANHLNGRDTHVRQIKIYGPRPNPVPHQPFHFTSRECIMYSTIR

SEQ ID NO: 61566 - DNA, 805 bp, Triticum aestivum
  misc_feature (1)..(805): Ceres Seq. ID no. 13662830
atcggtctagttagtgttgatctcggctggtgatttcactagtccgcgcaggtgcgaagccggattcggcccgctgctcccctctcgtctcccgtcgtcggacccccggcgacccctcttccaagccgccatcgtcctcacctccagcgcgacttcgtcttctccaccactcgacccagctcagcagcaaggcggcggacgggaggatgatgggaagcaacaaccccggcggcgcagggggagggggagggatggccccgggcacgggggccggcggcagcgacgggcggcatgacgacgaggccgtgctcaccgagttcctctcctccctcatggactacaatcccacgatcccggacgagctcgtggagcactacctcggccgaagcggcttccactgccccgacatacgcctaacaaggctggttgctgtagctgctcaaaagttcatttcagacattgcaagcgactctcttcagcactgcaaagccagggttgcagcacctatcaaagataacaagagcaaacaaccgaaggatagacgccttgtattgaccatggatgatctttcaaaagcattgcgtgagcatggtgttaatctgaaacatccagagtattttgcggacagcccatcagcagggatgcccccctcaacaagagaggagtagaatcgatcgctccttcaacaagagagggctagaatccattgtttcttatatgcgtacccagtgaatgggcgtgtccttccaactttatgtaacaaagccttataagcatgtatgcaatggcagttgatgtattatgg

SEQ ID NO: 61567 - protein, 153 aa, Triticum aestivum
  peptide (1)..(153): Ceres Seq. ID no. 13662831
  misc_feature (47)..(96): Pfam Name: Transcription initiation factor TFIID 23-30kDa subunit Pfam Description: Transcription initiation factor TFIID 23-30kDa
  misc_feature (1)..(137): Homolog of NCBI NO: 17137648 NR Description: TBP-associated factor 10b CG3069-PA [Drosophila
  misc_feature (7)..(138): Homolog of NCBI NO: 20863106 NR Description: similar to Transcription initiation factor TFIID
  misc_feature (3)..(138): Homolog of NCBI NO: 5454106 NR Description: TBP-related factor 10
  misc_feature (3)..(138): Homolog of NCBI NO: 2136293 NR Description: transcription factor IID 30k chain - human
  misc_feature (3)..(138): Homolog of NCBI NO: 34859827 NR Description: similar to Ilk protein [Rattus norvegicus]
  misc_feature (3)..(138): Homolog of NCBI NO: 9910576 NR Description: TAF10 RNA polymerase II, TATA box binding protein
  misc_feature (1)..(138): Homolog of NCBI NO: 26338586 NR Description: unnamed protein product [Mus musculus]
  misc_feature (1)..(138): Homolog of NCBI NO: 21619259 NR Description: Ilk protein [Mus musculus]
  misc_feature (21)..(153): Homolog of NCBI NO: 26450720 NR Description: putative transcription factor II [Arabidopsis
  misc_feature (21)..(153): Homolog of NCBI NO: 15236059 NR Description: Transcription factor II homolog [Arabidopsis
MMGSNNPGGAGGGGGMAPGTGAGGSDGRHDDEAVLTEFLSSLMDYNPTIPDELVEHYLGRSGFHCPDIRLTRLVAVAAQKFISDIASDSLQHCKARVAAPIKDNKSKQPKDRRLVLTMDDLSKALREHGVNLKHPEYFADSPSAGMPPSTREE

SEQ ID NO: 61568 - protein, 152 aa, Triticum aestivum
  peptide (1)..(152): Ceres Seq. ID no. 13662832
  misc_feature (46)..(95): Pfam Name: Transcription initiation factor TFIID 23-30kDa subunit Pfam Description: Transcription initiation factor TFIID 23-30kDa
  misc_feature (1)..(136): Homolog of NCBI NO: 17137648 NR Description: TBP-associated factor 10b CG3069-PA [Drosophila
  misc_feature (6)..(137): Homolog of NCBI NO: 20863106 NR Description: similar to Transcription initiation factor TFIID
  misc_feature (2)..(137): Homolog of NCBI NO: 5454106 NR Description: TBP-related factor 10
  misc_feature (2)..(137): Homolog of NCBI NO: 2136293 NR Description: transcription factor IID 30k chain - human
  misc_feature (2)..(137): Homolog of NCBI NO: 34859827 NR Description: similar to Ilk protein [Rattus norvegicus]
  misc_feature (2)..(137): Homolog of NCBI NO: 9910576 NR Description: TAF10 RNA polymerase II, TATA box binding protein
  misc_feature (1)..(137): Homolog of NCBI NO: 26338586 NR Description: unnamed protein product [Mus musculus]
  misc_feature (1)..(137): Homolog of NCBI NO: 21619259 NR Description: Ilk protein [Mus musculus]
  misc_feature (20)..(152): Homolog of NCBI NO: 26450720 NR Description: putative transcription factor II [Arabidopsis
  misc_feature (20)..(152): Homolog of NCBI NO: 15236059 NR Description: Transcription factor II homolog [Arabidopsis
MGSNNPGGAGGGGGMAPGTGAGGSDGRHDDEAVLTEFLSSLMDYNPTIPDELVEHYLGRSGFHCPDIRLTRLVAVAAQKFISDIASDSLQHCKARVAAPIKDNKSKQPKDRRLVLTMDDLSKALREHGVNLKHPEYFADSPSAGMPPSTREE

SEQ ID NO: 61569 - protein, 138 aa, Triticum aestivum
  peptide (1)..(138): Ceres Seq. ID no. 13662833
  misc_feature (32)..(81): Pfam Name: Transcription initiation factor TFIID 23-30kDa subunit Pfam Description: Transcription initiation factor TFIID 23-30kDa
  misc_feature (1)..(122): Homolog of NCBI NO: 17137648 NR Description: TBP-associated factor 10b CG3069-PA [Drosophila
  misc_feature (1)..(123): Homolog of NCBI NO: 20863106 NR Description: similar to Transcription initiation factor TFIID
  misc_feature (1)..(123): Homolog of NCBI NO: 5454106 NR Description: TBP-related factor 10
  misc_feature (1)..(123): Homolog of NCBI NO: 2136293 NR Description: transcription factor IID 30k chain - human
  misc_feature (1)..(123): Homolog of NCBI NO: 34859827 NR Description: similar to Ilk protein [Rattus norvegicus]
  misc_feature (1)..(123): Homolog of NCBI NO: 9910576 NR Description: TAF10 RNA polymerase II, TATA box binding protein
  misc_feature (1)..(123): Homolog of NCBI NO: 26338586 NR Description: unnamed protein product [Mus musculus]
  misc_feature (1)..(123): Homolog of NCBI NO: 21619259 NR Description: Ilk protein [Mus musculus]
  misc_feature (6)..(138): Homolog of NCBI NO: 26450720 NR Description: putative transcription factor II [Arabidopsis
  misc_feature (6)..(138): Homolog of NCBI NO: 15236059 NR Description: Transcription factor II homolog [Arabidopsis
MAPGTGAGGSDGRHDDEAVLTEFLSSLMDYNPTIPDELVEHYLGRSGFHCPDIRLTRLVAVAAQKFISDIASDSLQHCKARVAAPIKDNKSKQPKDRRLVLTMDDLSKALREHGVNLKHPEYFADSPSAGMPPSTREE

SEQ ID NO: 61570 - DNA, 749 bp, Triticum aestivum
  misc_feature (1)..(749): Ceres Seq. ID no. 13598157
actcaattcacccacaacatagctagtggaacagtgtcttctaaaaaatggcttcaagctccatagcccttttcttggctctcaacctcctgttcttcacaacaatctccgcatgcggtagctgcactccttgcggaggaggctgcccctctcccaagccgaagccaactcctaaaccaaccccaagccctagctctggcaagggaaagtgccctaaagataccctcaagcttggtgtctgcgccaatgtgctcaatggcctcctcgacttgaccctcggcaagccacctgtcaagccatgctgcagcctcatccaaggactcgctgatgttgaagcagccgtttgtctctgcaccgctcttaaggctaacgttcttggaatcaacttgaacctcccaatctctctaagtcttctcctcaatgtttgcagcaaacaagttcctcctggcttccagtgctaagcaaccgtatcatatgtaatttcaatacacaaatgtgtatatttatcttcttgttttggacagacaaggtggttctatttactcttaatattgtgaccctctatattggtgttcttattatagttttcttgttatggggttcactggagccaaattgtgtctctatctggatgatccttaagattcttcaagttcacagttccattatttcccgttactcttatgttggagtaattattgtattgtgatcctatgaattgataaatcaattatcttttatgttatgcg

SEQ ID NO: 61571 - protein, 137 aa, Triticum aestivum
  peptide (1)..(137): Ceres Seq. ID no. 13598158
  misc_feature (55)..(137): Pfam Name: Protease inhibitor/seed storage/LTP family Pfam Description: Protease inhibitor/seed storage/LTP family
  misc_feature (2)..(137): Homolog of NCBI NO: 481236 NR Description: hypothetical protein - Madagascar periwinkle
  misc_feature (2)..(137): Homolog of NCBI NO: 4454097 NR Description: hybrid proline-rich protein [Catharanthus roseus]
  misc_feature (3)..(132): Homolog of NCBI NO: 21360370 NR Description: extensin-like protein [Citrus junos]
  misc_feature (3)..(137): Homolog of NCBI NO: 10798758 NR Description: P-rich protein Nt-SubC29 [Nicotiana tabacum]
  misc_feature (2)..(137): Homolog of NCBI NO: 7484770 NR Description: extensin like protein - black poplar
  misc_feature (4)..(137): Homolog of NCBI NO: 629597 NR Description: proline-rich protein - rape
  misc_feature (3)..(137): Homolog of NCBI NO: 15221484 NR Description: protease inhibitor/seed storage/lipid transfer
  misc_feature (1)..(136): Homolog of NCBI NO: 13561927 NR Description: extensin-like protein [Brassica napus]
  misc_feature (1)..(137): Homolog of NCBI NO: 15221201 NR Description: protease inhibitor/seed storage/lipid transfer
MASSSIALFLALNLLFFTTISACGSCTPCGGGCPSPKPKPTPKPTPSPSSGKGKCPKDTLKLGVCANVLNGLLDLTLGKPPVKPCCSLIQGLADVEAAVCLCTALKANVLGINLNLPISLSLLLNVCSKQVPPGFQC

SEQ ID NO: 61572 - protein, 71 aa, Triticum aestivum
  peptide (1)..(71): Ceres Seq. ID no. 13598159
MCIFIFLFWTDKVVLFTLNIVTLYIGVLIIVFLLWGSLEPNCVSIWMILKILQVHSSIISRYSYVGVIIVL

SEQ ID NO: 61573 - DNA, 661 bp, Triticum aestivum
  misc_feature (1)..(661): Ceres Seq. ID no. 12624252
aatccattccagccattgcaagtccccgcctccacctcctcactccccacttcaacacatctccagctcctaccagctcaaccacactagtagtggactagtggtatcaacttaccaaggcaggcaagtctccatggacgctcttgagtcctcgccgccgtcgctgcgccacaagctgcggaccaccgtatgcagctgcttcggctcgccgagcagcggcggggagaggccgcacaccggggtcggcaagagcaggtggaggcgacgcgtggcggccgcgggggagttccggtacgacccgctcagctacgcgctcaacttcgacgacggccccagcgacgacagcgacgccgatgcggacgacgccgccttccggcaccgcaacttcagctcgcgcctgccgccgtccccgacgccggcgccatagcctcaactcctgaatcgtgcatggtagcaaacgtccttagcttctgtagattccgtctctctgatttttcttctctctcttctctggccgagaatgaatcgctacttctgtaaaagcagtctatatatatatacggccgaggaaacgtacgtacgtacgtaccgagggaaagcaattaatggcatcatgtacttgtacacatataagaatcagtcagtctatttgaaatgttcc

SEQ ID NO: 61574 - protein, 141 aa, Triticum aestivum
  peptide (1)..(141): Ceres Seq. ID no. 12624253
  misc_feature (72)..(141): Homolog of NCBI NO: 28564623 NR Description: OSJNBb0075O18.23 [Oryza sativa (japonica
  misc_feature (50)..(140): Homolog of NCBI NO: 37532890 NR Description: hypothetical protein [Oryza sativa (japonica
IHSSHCKSPPPPPHSPLQHISSSYQLNHTSSGLVVSTYQGRQVSMDALESSPPSLRHKLRTTVCSCFGSPSSGGERPHTGVGKSRWRRRVAAAGEFRYDPLSYALNFDDGPSDDSDADADDAAFRHRNFSSRLPPSPTPAP

SEQ ID NO: 61575 - protein, 116 aa, Triticum aestivum
  peptide (1)..(116): Ceres Seq. ID no. 12624254
MQLLRLAEQRRGEAAHRGRQEQVEATRGGRGGVPVRPAQLRAQLRRRPQRRQRRRCGRRRLPAPQLQLAPAAVPDAGAIASTPESCMVANVLSFCRFRLSDFSSLSSLAENESLLL

SEQ ID NO: 61576 - protein, 97 aa, Triticum aestivum
  peptide (1)..(97): Ceres Seq. ID no. 12624255
  misc_feature (28)..(97): Homolog of NCBI NO: 28564623 NR Description: OSJNBb0075O18.23 [Oryza sativa (japonica
  misc_feature (6)..(96): Homolog of NCBI NO: 37532890 NR Description: hypothetical protein [Oryza sativa (japonica
MDALESSPPSLRHKLRTTVCSCFGSPSSGGERPHTGVGKSRWRRRVAAAGEFRYDPLSYALNFDDGPSDDSDADADDAAFRHRNFSSRLPPSPTPAP

SEQ ID NO: 61577 - DNA, 514 bp, Triticum aestivum
  misc_feature (1)..(514): Ceres Seq. ID no. 13598191
taggaaggaagttggcaggcaaccttcgatcgagtctcgatcaacacaagaaccagcaaattagcttcggtttcatagtcgtatactgtcatgtctagccttacgaccattagtggcggcgccatggaggagtcgcaggaagtagaggagctcgtcgacacaaggctgtccctcgtgatcggcgccgcgagccgtccgcccccgacggtcctggcgctgctgccggcggcatcaccggagaacgaagcggcggcacgcgggaagaggaagggagtcaagggaccagagaacggtgcgggcggtgccgctgctgcttcaagggagcatagcaagaggtccaagacggtgcacgacagcagcgacgtcgacgatgacgacagaggggacgcggccggcggcgacgggacgaggaagaagctcatgctcacggtggagcaggccgcgctcttggaggaaagcttccgtgcccacaacgtcctctctcacggcgagaagcacgatcttgcgaggcagc

SEQ ID NO: 61578 - protein, 141 aa, Triticum aestivum
  peptide (1)..(141): Ceres Seq. ID no. 13598192
  misc_feature (36)..(140): Homolog of NCBI NO: 27311238 NR Description: Hypothetical protein [Oryza sativa (japonica
  misc_feature (72)..(140): Homolog of NCBI NO: 28848940 NR Description: homeodomain leucine zipper protein
  misc_feature (72)..(140): Homolog of NCBI NO: 5006849 NR Description: homeodomain leucine zipper protein [Oryza sativa]
  misc_feature (38)..(140): Homolog of NCBI NO: 33943624 NR Description: homeodomain leucine-zipper protein Hox7
  misc_feature (38)..(140): Homolog of NCBI NO: 5006859 NR Description: homeodomain leucine zipper protein [Oryza sativa]
MSSLTTISGGAMEESQEVEELVDTRLSLVIGAASRPPPTVLALLPAASPENEAAARGKRKGVKGPENGAGGAAAASREHSKRSKTVHDSSDVDDDDRGDAAGGDGTRKKLMLTVEQAALLEESFRAHNVLSHGEKHDLARQ

SEQ ID NO: 61579 - protein, 130 aa, Triticum aestivum
  peptide (1)..(130): Ceres Seq. ID no. 13598193
  misc_feature (25)..(129): Homolog of NCBI NO: 27311238 NR Description: Hypothetical protein [Oryza sativa (japonica
  misc_feature (61)..(129): Homolog of NCBI NO: 28848940 NR Description: homeodomain leucine zipper protein
  misc_feature (61)..(129): Homolog of NCBI NO: 5006849 NR Description: homeodomain leucine zipper protein [Oryza sativa]
  misc_feature (27)..(129): Homolog of NCBI NO: 33943624 NR Description: homeodomain leucine-zipper protein Hox7
  misc_feature (27)..(129): Homolog of NCBI NO: 5006859 NR Description: homeodomain leucine zipper protein [Oryza sativa]
MEESQEVEELVDTRLSLVIGAASRPPPTVLALLPAASPENEAAARGKRKGVKGPENGAGGAAAASREHSKRSKTVHDSSDVDDDDRGDAAGGDGTRKKLMLTVEQAALLEESFRAHNVLSHGEKHDLARQ

SEQ ID NO: 61580 - DNA, 736 bp, Triticum aestivum
  misc_feature (1)..(736): Ceres Seq. ID no. 13662050
atcagagctcattctctctctctctctctatctctatctctatctctctctagctccaatgggctttcccgtaggctacacagaggtgtttctccctaagctcttcgtacaaacgctttcgatactcagtttcttcagaaccgtcgtcttctatctcttccgcttcttgggtctctccggcttcctcgaaacggatcaaacctggcccgactacacatcgtacccgacccgaatacccgaactccgctcacctttctccgccctactaatccgcgagatcttaccggttatcaaattcgaagacgtgacgagctccggcgaagaactaccaggaaactgcgccgtttgtctctacgagttcgaaggagaggaagagatccgacggctgagaaactgcagacatatattccaccggagctgtctcgaccgttggatggatcatgatcagaagacgtgtcctctttgtagaacaccgtttgttccagatgagatgcaagaagagtttaatcaacggttatgggctgcttctggtgttcatgacttccacatcgagtagagtcccttgtcgttactttagagaaagctacttttgtctccctccctccttgtgtcttttcttttctttttttactttttaccactgtacttttaattgtgctttttcacccttgctaacattagatttgccacttttatgtgtatatgaatgatatgagcaataaacacaaccaaattt

SEQ ID NO: 61581 - protein, 184 aa, Triticum aestivum
  peptide (1)..(184): Ceres Seq. ID no. 13662051
  misc_feature (113)..(155): Pfam Name: Zinc finger, C3HC4 type (RING finger) Pfam Description: Zinc finger, C3HC4 type (RING finger)
  misc_feature (92)..(162): Homolog of NCBI NO: 18411282 NR Description: zinc finger (C3HC4-type RING finger) protein
  misc_feature (20)..(175): Homolog of NCBI NO: 15233352 NR Description: RING-H2 finger protein, putative [Arabidopsis
  misc_feature (20)..(175): Homolog of NCBI NO: 11358776 NR Description: RING-H2 finger protein RHA1a [imported] -
  misc_feature (20)..(176): Homolog of NCBI NO: 15233350 NR Description: RING-H2 finger protein RHA1b [Arabidopsis
  misc_feature (20)..(176): Homolog of NCBI NO: 11358777 NR Description: RING-H2 finger protein RHA1b [imported] -
  misc_feature (77)..(184): Homolog of NCBI NO: 32488512 NR Description: OSJNBa0011J08.19 [Oryza sativa (japonica
  misc_feature (20)..(176): Homolog of NCBI NO: 15238072 NR Description: RING-H2 zinc finger protein, putative
  misc_feature (20)..(176): Homolog of NCBI NO: 21554155 NR Description: RING zinc finger protein-like [Arabidopsis
  misc_feature (20)..(176): Homolog of NCBI NO: 15222553 NR Description: RING-H2 finger protein, putative [Arabidopsis
  misc_feature (20)..(182): Homolog of NCBI NO: 15233117 NR Description: BRH1 RING finger protein [Arabidopsis thaliana]
SELILSLSLYLYLYLSLAPMGFPVGYTEVFLPKLFVQTLSILSFFRTVVFYLFRFLGLSGFLETDQTWPDYTSYPTRIPELRSPFSALLIREILPVIKFEDVTSSGEELPGNCAVCLYEFEGEEEIRRLRNCRHIFHRSCLDRWMDHDQKTCPLCRTPFVPDEMQEEFNQRLWAASGVHDFHIE

SEQ ID NO: 61582 - protein, 165 aa, Triticum aestivum
  peptide (1)..(165): Ceres Seq. ID no. 13662052
  misc_feature (94)..(136): Pfam Name: Zinc finger, C3HC4 type (RING finger) Pfam Description: Zinc finger, C3HC4 type (RING finger)
  misc_feature (73)..(143): Homolog of NCBI NO: 18411282 NR Description: zinc finger (C3HC4-type RING finger) protein
  misc_feature (1)..(156): Homolog of NCBI NO: 15233352 NR Description: RING-H2 finger protein, putative [Arabidopsis
  misc_feature (1)..(156): Homolog of NCBI NO: 11358776 NR Description: RING-H2 finger protein RHA1a [imported] -
  misc_feature (1)..(157): Homolog of NCBI NO: 15233350 NR Description: RING-H2 finger protein RHA1b [Arabidopsis
  misc_feature (1)..(157): Homolog of NCBI NO: 11358777 NR Description: RING-H2 finger protein RHA1b [imported] -
  misc_feature (58)..(165): Homolog of NCBI NO: 32488512 NR Description: OSJNBa0011J08.19 [Oryza sativa (japonica
  misc_feature (1)..(157): Homolog of NCBI NO: 15238072 NR Description: RING-H2 zinc finger protein, putative
  misc_feature (1)..(157): Homolog of NCBI NO: 21554155 NR Description: RING zinc finger protein-like [Arabidopsis
  misc_feature (1)..(157): Homolog of NCBI NO: 15222553 NR Description: RING-H2 finger protein, putative [Arabidopsis
  misc_feature (1)..(163): Homolog of NCBI NO: 15233117 NR Description: BRH1 RING finger protein [Arabidopsis thaliana]
MGFPVGYTEVFLPKLFVQTLSILSFFRTVVFYLFRFLGLSGFLETDQTWPDYTSYPTRIPELRSPFSALLIREILPVIKFEDVTSSGEELPGNCAVCLYEFEGEEEIRRLRNCRHIFHRSCLDRWMDHDQKTCPLCRTPFVPDEMQEEFNQRLWAASGVHDFHIE

SEQ ID NO: 61583 - DNA, 821 bp, Triticum aestivum
  misc_feature (1)..(821): Ceres Seq. ID no. 13661243
acaacccacgagctgtctgtcatccaaagcccaaagctacagacaacacttcaactcgcagtctggttcaggaaagagcagtagtaagatggagttccaagggcagcacgacaaccccgccaaccgcgtcgacgagtacggcaacccgttcccgctcggcggcgtcggaggagcgcacgccgctcccggcaccggcgggcagttccaggcccgcagggaggagcacaagaccggtgggatactgcatcggtccggcagctccagctccagctcgtcttcggaggacgacggcatgggcgggaggaagaagaagggaatgaaggagaagatcaaggagaagctccccggcggccacaaggacaaccagcagcacatggcgacggggacagggactggaggagcctacgggccgggaactggaactggtgcagcctacgggcagcaaggccacacaggaatggccggcgccggcactggcaccggcgagaagaagggaatcatggacaagatcaaggagaagctgtcgggacagcactgagccgccggctccggctggctgcttcctctgcatagctacgtgtcaaagccttccagttccacgtgatctttgttcaataataagatgaagctgaacgaaaagttgtctcttatcgcatccgtgtcagggacacttctctgcataaagcatgcgttgtgtttgttatgtttatgttgaaaaaaaattagtgtacgactatccctaaaaaaaatccctcaaaaaaaaaatagtgtacgactaaacttgtttctctctaaaggaaatcaggctctcctttctgttc

SEQ ID NO: 61584 - protein, 178 aa, Triticum aestivum
  peptide (1)..(178): Ceres Seq. ID no. 13661244
  misc_feature (40)..(178): Pfam Name: Dehydrin Pfam Description: Dehydrin
  misc_feature (53)..(178): Homolog of NCBI NO: 118484 NR Description: DEHYDRIN DHN1 (M3) (RAB-17 PROTEIN)
  misc_feature (35)..(178): Homolog of NCBI NO: 82684 NR Description: dehydrin 3 - maize
  misc_feature (35)..(178): Homolog of NCBI NO: 6017932 NR Description: dehydrin; DHN3 [Hordeum vulgare]
  misc_feature (35)..(178): Homolog of NCBI NO: 4105107 NR Description: dehydrin 3 [Hordeum vulgare]
  misc_feature (35)..(178): Homolog of NCBI NO: 118487 NR Description: DEHYDRIN DHN3 (B17)
  misc_feature (30)..(178): Homolog of NCBI NO: 2970213 NR Description: dehydrin-/LEA group 2-like protein [Lophopyrum
  misc_feature (30)..(178): Homolog of NCBI NO: 1169279 NR Description: WATER-STRESS INDUCIBLE PROTEIN RAB21
  misc_feature (30)..(178): Homolog of NCBI NO: 231983 NR Description: DEHYDRIN RAB 15
  misc_feature (30)..(178): Homolog of NCBI NO: 4105117 NR Description: dehydrin 9 [Hordeum vulgare]
  misc_feature (30)..(178): Homolog of NCBI NO: 1181296 NR Description: dehydrin [Triticum turgidum subsp. durum]
QPTSCLSSKAQSYRQHFNSQSGSGKSSSKMEFQGQHDNPANRVDEYGNPFPLGGVGGAHAAPGTGGQFQARREEHKTGGILHRSGSSSSSSSSEDDGMGGRKKKGMKEKIKEKLPGGHKDNQQHMATGTGTGGAYGPGTGTGAAYGQQGHTGMAGAGTGTGEKKGIMDKIKEKLSGQH

SEQ ID NO: 61585 - protein, 149 aa, Triticum aestivum
  peptide (1)..(149): Ceres Seq. ID no. 13661245
  misc_feature (11)..(149): Pfam Name: Dehydrin Pfam Description: Dehydrin
  misc_feature (24)..(149): Homolog of NCBI NO: 118484 NR Description: DEHYDRIN DHN1 (M3) (RAB-17 PROTEIN)
  misc_feature (6)..(149): Homolog of NCBI NO: 82684 NR Description: dehydrin 3 - maize
  misc_feature (6)..(149): Homolog of NCBI NO: 6017932 NR Description: dehydrin; DHN3 [Hordeum vulgare]
  misc_feature (6)..(149): Homolog of NCBI NO: 4105107 NR Description: dehydrin 3 [Hordeum vulgare]
  misc_feature (6)..(149): Homolog of NCBI NO: 118487 NR Description: DEHYDRIN DHN3 (B17)
  misc_feature (1)..(149): Homolog of NCBI NO: 2970213 NR Description: dehydrin-/LEA group 2-like protein [Lophopyrum
  misc_feature (1)..(149): Homolog of NCBI NO: 1169279 NR Description: WATER-STRESS INDUCIBLE PROTEIN RAB21
  misc_feature (1)..(149): Homolog of NCBI NO: 231983 NR Description: DEHYDRIN RAB 15
  misc_feature (1)..(149): Homolog of NCBI NO: 4105117 NR Description: dehydrin 9 [Hordeum vulgare]
  misc_feature (1)..(149): Homolog of NCBI NO: 1181296 NR Description: dehydrin [Triticum turgidum subsp. durum]
MEFQGQHDNPANRVDEYGNPFPLGGVGGAHAAPGTGGQFQARREEHKTGGILHRSGSSSSSSSSEDDGMGGRKKKGMKEKIKEKLPGGHKDNQQHMATGTGTGGAYGPGTGTGAAYGQQGHTGMAGAGTGTGEKKGIMDKIKEKLSGQH

SEQ ID NO: 61586 - protein, 105 aa, Triticum aestivum
  peptide (1)..(105): Ceres Seq. ID no. 13661246
NPRAVCHPKPKATDNTSTRSLVQERAVVRWSSKGSTTTPPTASTSTATRSRSAASEERTPLPAPAGSSRPAGRSTRPVGYCIGPAAPAPARLRRTTAWAGGRRRE

SEQ ID NO: 61587 - DNA, 936 bp, Triticum aestivum
  misc_feature (1)..(936): Ceres Seq. ID no. 12624280
atcagaatgagaagataaacggatccgatctaggtcgtctcttcttcttcttcttcttcttcttcgatatctatctccatcgtggatcgaagagctaaggtggaacatggacaaaggcaaagcagtgatgggtgctggccggagatgggccgtcgatttctccgatcaatctaccgttccatcttcccgcgacatcctcgatccgcctggcttctctcgtgctcctcccgaacaggatgattcagcaacgagccgccaaaagaaagacgctgaagctaattggaaacttcagaaagcatgggaagtagcgcagtcaccgtttaagaatctgatgatgatggggttcatgatgtggatggctgggaacactgttcacctctttagcattgggatcactttctctgctctttggcagcctctcagcgccctccagagtgttggcaagatttttgagccattcaaggataacaaggtggagctacttatgcccaaactagtgtttcttgcactaaaccttggagggctagctctgggtatctggaagctcaacactttggggcttcttccaacacatgcatcagattgggtttcatccttaccccctcctcaggaggttgaacactctggaggaggatatgttttccactgacaagcaagtctctctctctctctctctgtcttgtactttaaataatcagccaaaactggaagatgatgaagacattttttgtgagataacagccagagaaacttaaaccgccatgagggggaaagattcatatgaaccttctcatcttgtgatcttcatgtagcatttccaaaactcagaaaccatatagctttttcactttttcaagtatcatgttcattgttcatcattactacgaactgcattattatcaccaaagggacctattctcccagctttttgtttct

SEQ ID NO: 61588 - protein, 180 aa, Triticum aestivum
  peptide (1)..(180): Ceres Seq. ID no. 12624281
  misc_feature (1)..(162): Homolog of NCBI NO: 19075667 NR Description: hypothetical protein [Schizosaccharomyces pombe]
  misc_feature (14)..(173): Homolog of NCBI NO: 17544614 NR Description: Putative protein of eukaryotic origin
  misc_feature (12)..(175): Homolog of NCBI NO: 28829924 NR Description: similar to ZK616.6.p
  misc_feature (13)..(173): Homolog of NCBI NO: 39588364 NR Description: Hypothetical protein CBG19952 [Caenorhabditis
  misc_feature (7)..(176): Homolog of NCBI NO: 37590930 NR Description: Unknown (protein for MGC:75691) [Silurana
  misc_feature (3)..(176): Homolog of NCBI NO: 13386014 NR Description: RIKEN cDNA 2610318K02 [Mus musculus]
  misc_feature (3)..(176): Homolog of NCBI NO: 12834476 NR Description: unnamed protein product [Mus musculus]
  misc_feature (3)..(176): Homolog of NCBI NO: 7705997 NR Description: hypothetical protein LOC51234 [Homo sapiens]
  misc_feature (1)..(168): Homolog of NCBI NO: 11358300 NR Description: hypothetical protein T30N20_50 - Arabidopsis
  misc_feature (1)..(180): Homolog of NCBI NO: 18416375 NR Description: putative protein
MDKGKAVMGAGRRWAVDFSDQSTVPSSRDILDPPGFSRAPPEQDDSATSRQKKDAEANWKLQKAWEVAQSPFKNLMMMGFMMWMAGNTVHLFSIGITFSALWQPLSALQSVGKIFEPFKDNKVELLMPKLVFLALNLGGLALGIWKLNTLGLLPTHASDWVSSLPPPQEVEHSGGGYVFH

SEQ ID NO: 61589 - protein, 173 aa, Triticum aestivum
  peptide (1)..(173): Ceres Seq. ID no. 12624282
  misc_feature (1)..(155): Homolog of NCBI NO: 19075667 NR Description: hypothetical protein [Schizosaccharomyces pombe]
  misc_feature (7)..(166): Homolog of NCBI NO: 17544614 NR Description: Putative protein of eukaryotic origin
  misc_feature (5)..(168): Homolog of NCBI NO: 28829924 NR Description: similar to ZK616.6.p
  misc_feature (6)..(166): Homolog of NCBI NO: 39588364 NR Description: Hypothetical protein CBG19952 [Caenorhabditis
  misc_feature (1)..(169): Homolog of NCBI NO: 37590930 NR Description: Unknown (protein for MGC:75691) [Silurana
  misc_feature (1)..(169): Homolog of NCBI NO: 13386014 NR Description: RIKEN cDNA 2610318K02 [Mus musculus]
  misc_feature (1)..(169): Homolog of NCBI NO: 12834476 NR Description: unnamed protein product [Mus musculus]
  misc_feature (1)..(169): Homolog of NCBI NO: 7705997 NR Description: hypothetical protein LOC51234 [Homo sapiens]
  misc_feature (1)..(161): Homolog of NCBI NO: 11358300 NR Description: hypothetical protein T30N20_50 - Arabidopsis
  misc_feature (1)..(173): Homolog of NCBI NO: 18416375 NR Description: putative protein
MGAGRRWAVDFSDQSTVPSSRDILDPPGFSRAPPEQDDSATSRQKKDAEANWKLQKAWEVAQSPFKNLMMMGFMMWMAGNTVHLFSIGITFSALWQPLSALQSVGKIFEPFKDNKVELLMPKLVFLALNLGGLALGIWKLNTLGLLPTHASDWVSSLPPPQEVEHSGGGYVFH

SEQ ID NO: 61590 - protein, 105 aa, Triticum aestivum
  peptide (1)..(105): Ceres Seq. ID no. 12624283
  misc_feature (1)..(87): Homolog of NCBI NO: 19075667 NR Description: hypothetical protein [Schizosaccharomyces pombe]
  misc_feature (1)..(98): Homolog of NCBI NO: 17544614 NR Description: Putative protein of eukaryotic origin
  misc_feature (1)..(100): Homolog of NCBI NO: 28829924 NR Description: similar to ZK616.6.p
  misc_feature (1)..(98): Homolog of NCBI NO: 39588364 NR Description: Hypothetical protein CBG19952 [Caenorhabditis
  misc_feature (1)..(101): Homolog of NCBI NO: 37590930 NR Description: Unknown (protein for MGC:75691) [Silurana
  misc_feature (1)..(101): Homolog of NCBI NO: 12834476 NR Description: unnamed protein product [Mus musculus]
  misc_feature (1)..(101): Homolog of NCBI NO: 13386014 NR Description: RIKEN cDNA 2610318K02 [Mus musculus]
  misc_feature (1)..(101): Homolog of NCBI NO: 7705997 NR Description: hypothetical protein LOC51234 [Homo sapiens]
  misc_feature (1)..(93): Homolog of NCBI NO: 11358300 NR Description: hypothetical protein T30N20_50 - Arabidopsis
  misc_feature (1)..(105): Homolog of NCBI NO: 18416375 NR Description: putative protein
MMMGFMMWMAGNTVHLFSIGITFSALWQPLSALQSVGKIFEPFKDNKVELLMPKLVFLALNLGGLALGIWKLNTLGLLPTHASDWVSSLPPPQEVEHSGGGYVFH

SEQ ID NO: 61591 - DNA, 838 bp, Triticum aestivum
  misc_feature (1)..(838): Ceres Seq. ID no. 13598227
gcataccccgaaggatcattgttcgctgacgccgcctcctttggtccttcctctcctcccgtcccctcccctccgccgcgatcgatcccaagagcacgaaaccctagccctagcccaacccatcttctccatggccaacagcaacctcccccgccgcatcatcaaggagacgcagcggctgctcagcgaaccagctcctgggatcagtgcttcaccatcagaggagaacatgcgctacttcaatgtcatgatccttggcccaactcagtcgccatatgaaggaggagtattcaaacttgagttgtttttacctgaagaatatccaatggctccgccaaaggttcgctttctcacaaaaatttaccatccaaacattgacaagcttgggaggatatgccttgatatcttaaaggacaagtggagtcctgcccttcagatccgaacagttcttttgagcattcaagcactcctcagcgctccaaatcctgacgatccgcttgctgacaatgtggcaaagcactggaaggccaacgaaacagaagctgtggaaacagccaaagagtggacccgtgtctacgctaatgatgcatgagctctgcatgctatgactgattgctcagtagtcttggcaaggtgaggcgaaatcgactatcaagtggtttaaaatggaggtccaactgatgaactagtgaaatgtgaagtttcctccttgcatcgcgtgtactgagtgtgatgtatattattaccctagttgggatgcgacggacccatgtgcatgtatattttgtttgagtgttgtaccgtaataaacatcctgaagtcatgtgtgccttttctg

SEQ ID NO: 61592 - protein, 196 aa, Triticum aestivum
  peptide (1)..(196): Ceres Seq. ID no. 13598228
  misc_feature (47)..(195): Homolog of NCBI NO: 27882519 NR Description: Similar to ubiquitin-conjugating enzyme E2N
  misc_feature (47)..(193): Homolog of NCBI NO: 30583959 NR Description: Homo sapiens ubiquitin-conjugating enzyme E2N
  misc_feature (47)..(193): Homolog of NCBI NO: 28174992 NR Description: similar to ubiquitin-conjugating enzyme E2N [Mus
  misc_feature (47)..(193): Homolog of NCBI NO: 4507793 NR Description: ubiquitin-conjugating enzyme E2N (UBC13 homolog,
  misc_feature (47)..(193): Homolog of NCBI NO: 16758810 NR Description: ubiquitin-conjugating enzyme E2N (homologous to
  misc_feature (44)..(184): Homolog of NCBI NO: 25293666 NR Description: hypothetical protein F9K20.8 [imported] -
  misc_feature (44)..(196): Homolog of NCBI NO: 5381319 NR Description: ubiquitin-conjugating enzyme E2 [Catharanthus
  misc_feature (44)..(196): Homolog of NCBI NO: 18412149 NR Description: ubiquitin-conjugating enzyme, putative
  misc_feature (44)..(196): Homolog of NCBI NO: 18394416 NR Description: ubiquitin-conjugating enzyme, putative
  misc_feature (44)..(196): Homolog of NCBI NO: 34911052 NR Description: ubiquitin-conjugating enzyme E2
HTPKDHCSLTPPPLVLPLLPSPPLRRDRSQEHETLALAQPIFSMANSNLPRRIIKETQRLLSEPAPGISASPSEENMRYFNVMILGPTQSPYEGGVFKLELFLPEEYPMAPPKVRFLTKIYHPNIDKLGRICLDILKDKWSPALQIRTVLLSIQALLSAPNPDDPLADNVAKHWKANETEAVETAKEWTRVYANDA

SEQ ID NO: 61593 - protein, 153 aa, Triticum aestivum
  peptide (1)..(153): Ceres Seq. ID no. 13598229
  misc_feature (4)..(152): Homolog of NCBI NO: 27882519 NR Description: Similar to ubiquitin-conjugating enzyme E2N
  misc_feature (4)..(150): Homolog of NCBI NO: 30583959 NR Description: Homo sapiens ubiquitin-conjugating enzyme E2N
  misc_feature (4)..(150): Homolog of NCBI NO: 28174992 NR Description: similar to ubiquitin-conjugating enzyme E2N [Mus
  misc_feature (4)..(150): Homolog of NCBI NO: 4507793 NR Description: ubiquitin-conjugating enzyme E2N (UBC13 homolog,
  misc_feature (4)..(150): Homolog of NCBI NO: 16758810 NR Description: ubiquitin-conjugating enzyme E2N (homologous to
  misc_feature (1)..(141): Homolog of NCBI NO: 25293666 NR Description: hypothetical protein F9K20.8 [imported] -
  misc_feature (1)..(153): Homolog of NCBI NO: 5381319 NR Description: ubiquitin-conjugating enzyme E2 [Catharanthus
  misc_feature (1)..(153): Homolog of NCBI NO: 18412149 NR Description: ubiquitin-conjugating enzyme, putative
  misc_feature (1)..(153): Homolog of NCBI NO: 18394416 NR Description: ubiquitin-conjugating enzyme, putative
  misc_feature (1)..(153): Homolog of NCBI NO: 34911052 NR Description: ubiquitin-conjugating enzyme E2
MANSNLPRRIIKETQRLLSEPAPGISASPSEENMRYFNVMILGPTQSPYEGGVFKLELFLPEEYPMAPPKVRFLTKIYHPNIDKLGRICLDILKDKWSPALQIRTVLLSIQALLSAPNPDDPLADNVAKHWKANETEAVETAKEWTRVYANDA

SEQ ID NO: 61594 - protein, 120 aa, Triticum aestivum
  peptide (1)..(120): Ceres Seq. ID no. 13598230
  misc_feature (1)..(119): Homolog of NCBI NO: 27882519 NR Description: Similar to ubiquitin-conjugating enzyme E2N
  misc_feature (1)..(117): Homolog of NCBI NO: 30583959 NR Description: Homo sapiens ubiquitin-conjugating enzyme E2N
  misc_feature (1)..(117): Homolog of NCBI NO: 28174992 NR Description: similar to ubiquitin-conjugating enzyme E2N [Mus
  misc_feature (1)..(117): Homolog of NCBI NO: 4507793 NR Description: ubiquitin-conjugating enzyme E2N (UBC13 homolog,
  misc_feature (1)..(117): Homolog of NCBI NO: 16758810 NR Description: ubiquitin-conjugating enzyme E2N (homologous to
  misc_feature (1)..(108): Homolog of NCBI NO: 25293666 NR Description: hypothetical protein F9K20.8 [imported] -
  misc_feature (1)..(120): Homolog of NCBI NO: 5381319 NR Description: ubiquitin-conjugating enzyme E2 [Catharanthus
  misc_feature (1)..(120): Homolog of NCBI NO: 18412149 NR Description: ubiquitin-conjugating enzyme, putative
  misc_feature (1)..(120): Homolog of NCBI NO: 18394416 NR Description: ubiquitin-conjugating enzyme, putative
  misc_feature (1)..(120): Homolog of NCBI NO: 34911052 NR Description: ubiquitin-conjugating enzyme E2
MRYFNVMILGPTQSPYEGGVFKLELFLPEEYPMAPPKVRFLTKIYHPNIDKLGRICLDILKDKWSPALQIRTVLLSIQALLSAPNPDDPLADNVAKHWKANETEAVETAKEWTRVYANDA

SEQ ID NO: 61595 - DNA, 669 bp, Triticum aestivum
  misc_feature (1)..(669): Ceres Seq. ID no. 12624284
actacctactcctaacaaacaacaatgagcttcttcatcgaagattctggtctcatcgtcacacaacttctctaccaaatggcggtcttaatcaccctcttgagatggatctttacttggatcttacgctaccgatccagatctacctcctcctcttcttcatctactcctccgatctcgtcacaaaccatcaaagagagcctcgccgtgacgacgttccgtgacgccgcggatcggtctccggaactgatcagcgacacttgcgcggtgtgtcttggagatctggaagacggagacgaggtgagagagctcagaaactgtagccacgtgttccaccgagagtgtatcgacaggtggctggactacgagtgctgcggcggagatgataacgacggcgaggaagataaccaccgcacgtgtcctctttgtagaactccgcttcttgctgctaatacgtcgtcgtgtgcggattggccggttaagaacgaacctagctgggccgttgagcggcttctctacctcttcggagatgatcttcttgtctgactttttattttatttttctttcgatatttatttgattttagtggagattgaaattagttggtcaagttttgtaaattgggaatttaaagggtagaatagcatatataataatatatcaatttt

SEQ ID NO: 61596 - protein, 173 aa, Triticum aestivum
  peptide (1)..(173): Ceres Seq. ID no. 12624285
  misc_feature (80)..(135): Pfam Name: Zinc finger, C3HC4 type (RING finger) Pfam Description: Zinc finger, C3HC4 type (RING finger)
  misc_feature (10)..(149): Homolog of NCBI NO: 22324426 NR Description: hypothetical protein~predicted by FGENESH etc.
  misc_feature (41)..(150): Homolog of NCBI NO: 15233350 NR Description: RING-H2 finger protein RHA1b
  misc_feature (48)..(140): Homolog of NCBI NO: 15222553 NR Description: putative RING zinc finger protein
  misc_feature (50)..(141): Homolog of NCBI NO: 21554155 NR Description: RING zinc finger protein-like [Arabidopsis
  misc_feature (50)..(141): Homolog of NCBI NO: 15238072 NR Description: RING zinc finger protein-like
  misc_feature (39)..(140): Homolog of NCBI NO: 18411282 NR Description: similar to RING finger protein; protein id:
  misc_feature (10)..(144): Homolog of NCBI NO: 23451086 NR Description: RING-H2 protein [Medicago sativa]
  misc_feature (31)..(140): Homolog of NCBI NO: 15233117 NR Description: RING finger protein
  misc_feature (1)..(172): Homolog of NCBI NO: 15229284 NR Description: putative protein
  misc_feature (1)..(173): Homolog of NCBI NO: 18420336 NR Description: putative protein
MSFFIEDSGLIVTQLLYQMAVLITLLRWIFTWILRYRSRSTSSSSSSTPPISSQTIKESLAVTTFRDAADRSPELISDTCAVCLGDLEDGDEVRELRNCSHVFHRECIDRWLDYECCGGDDNDGEEDNHRTCPLCRTPLLAANTSSCADWPVKNEPSWAVERLLYLFGDDLLV

SEQ ID NO: 61597 - protein, 155 aa, Triticum aestivum
  peptide (1)..(155): Ceres Seq. ID no. 12624286
  misc_feature (62)..(117): Pfam Name: Zinc finger, C3HC4 type (RING finger) Pfam Description: Zinc finger, C3HC4 type (RING finger)
  misc_feature (1)..(131): Homolog of NCBI NO: 22324426 NR Description: hypothetical protein~predicted by FGENESH etc.
  misc_feature (23)..(132): Homolog of NCBI NO: 15233350 NR Description: RING-H2 finger protein RHA1b
  misc_feature (30)..(122): Homolog of NCBI NO: 15222553 NR Description: putative RING zinc finger protein
  misc_feature (32)..(123): Homolog of NCBI NO: 21554155 NR Description: RING zinc finger protein-like [Arabidopsis
  misc_feature (32)..(123): Homolog of NCBI NO: 15238072 NR Description: RING zinc finger protein-like
  misc_feature (21)..(122): Homolog of NCBI NO: 18411282 NR Description: similar to RING finger protein; protein id:
  misc_feature (1)..(126): Homolog of NCBI NO: 23451086 NR Description: RING-H2 protein [Medicago sativa]
  misc_feature (13)..(122): Homolog of NCBI NO: 15233117 NR Description: RING finger protein
  misc_feature (1)..(154): Homolog of NCBI NO: 15229284 NR Description: putative protein
  misc_feature (1)..(155): Homolog of NCBI NO: 18420336 NR Description: putative protein
MAVLITLLRWIFTWILRYRSRSTSSSSSSTPPISSQTIKESLAVTTFRDAADRSPELISDTCAVCLGDLEDGDEVRELRNCSHVFHRECIDRWLDYECCGGDDNDGEEDNHRTCPLCRTPLLAANTSSCADWPVKNEPSWAVERLLYLFGDDLLV

SEQ ID NO: 61598 - DNA, 902 bp, Triticum aestivum
  misc_feature (1)..(902): Ceres Seq. ID no. 13661642
aacaaaaaacactttaaaatccaaaaagaaagaaagagaaattaaacatcttatccaaaatcaagactctgttttcgtttcattcgatggatccattttacacttctttttcagattccttcctctcgatccccgaccacaggtctcctgtttctgacagtagtgagtgttctccaaagctagcttcgagctgtccgaagaaactagcagggagaaagaagtttcgtgagacacgtcatccgatttacagaggagttcgtcagagaaactcagggaaatgggtttgtgaagttagggagcctaataagaagtcgaggatttggttagggacttttccgacagtcgaaatggccgctcgtgctcacgacgtcgccgctttagcccttcgtggccgctccgcttgtcttaatttcgccgactcggcttggcgtctacggattcctgagtctacttgtcctaaagaaattcagagagctgcggctgaagctgcaatggcgtttcagaacaagacggctacgactgagacgactatggttgaggcagtgaaaccggcagaggagacggttgggcaaacgggtggggagaccatggaagagaacggtgtgttttatatggccgaagaagcggttttggggatgccaaggtttcttgagaatatgggggaggagatgctcttgccgccgccggaacttggatggaatcataacgacttggccggagatgctgacgtgtcactctggagtttttagaatttgaatcttctcttattattcagattttgtaagattttttgaatttctaggattggtcaaaagttcaactacctactttttattggtagactggtagtacgatacggaaagagaatggagatatacaaatctaataaattctatattact

SEQ ID NO: 61599 - protein, 220 aa, Triticum aestivum
  peptide (1)..(220): Ceres Seq. ID no. 13661643
  misc_feature (51)..(115): Pfam Name: AP2 domain Pfam Description: AP2 domain
  misc_feature (5)..(220): Homolog of NCBI NO: 38426954 NR Description: DREB2-19 [Brassica napus]
  misc_feature (5)..(220): Homolog of NCBI NO: 39983638 NR Description: CBF25 [Capsella bursa-pastoris]
  misc_feature (6)..(220): Homolog of NCBI NO: 20303013 NR Description: CBF-like protein CBF7 [Brassica napus]
  misc_feature (1)..(220): Homolog of NCBI NO: 38683266 NR Description: Cbcbf [Capsella bursa-pastoris]
  misc_feature (6)..(220): Homolog of NCBI NO: 5616086 NR Description: dehydration responsive element binding protein
  misc_feature (5)..(220): Homolog of NCBI NO: 18416562 NR Description: C-repeat/DRE binding factor 1 (CBF1) (DREB1B)
  misc_feature (5)..(220): Homolog of NCBI NO: 1899058 NR Description: transcriptional activator CBF1 [Arabidopsis
  misc_feature (6)..(220): Homolog of NCBI NO: 4091984 NR Description: CRT/DRE binding factor 2 [Arabidopsis thaliana]
  misc_feature (5)..(220): Homolog of NCBI NO: 18416557 NR Description: DRE binding protein (DREB1C) [Arabidopsis
  misc_feature (1)..(220): Homolog of NCBI NO: 15242244 NR Description: C-repeat/DRE binding protein, putative
MDPFYTSFSDSFLSIPDHRSPVSDSSECSPKLASSCPKKLAGRKKFRETRHPIYRGVRQRNSGKWVCEVREPNKKSRIWLGTFPTVEMAARAHDVAALALRGRSACLNFADSAWRLRIPESTCPKEIQRAAAEAAMAFQNKTATTETTMVEAVKPAEETVGQTGGETMEENGVFYMAEEAVLGMPRFLENMGEEMLLPPPELGWNHNDLAGDADVSLWSF

SEQ ID NO: 61600 - protein, 133 aa, Triticum aestivum
  peptide (1)..(133): Ceres Seq. ID no. 13661644
  misc_feature (1)..(133): Homolog of NCBI NO: 38426954 NR Description: DREB2-19 [Brassica napus]
  misc_feature (1)..(133): Homolog of NCBI NO: 39983638 NR Description: CBF25 [Capsella bursa-pastoris]
  misc_feature (1)..(133): Homolog of NCBI NO: 20303013 NR Description: CBF-like protein CBF7 [Brassica napus]
  misc_feature (1)..(133): Homolog of NCBI NO: 38683266 NR Description: Cbcbf [Capsella bursa-pastoris]
  misc_feature (1)..(133): Homolog of NCBI NO: 5616086 NR Description: dehydration responsive element binding protein
  misc_feature (1)..(133): Homolog of NCBI NO: 18416562 NR Description: C-repeat/DRE binding factor 1 (CBF1) (DREB1B)
  misc_feature (1)..(133): Homolog of NCBI NO: 1899058 NR Description: transcriptional activator CBF1 [Arabidopsis
  misc_feature (1)..(133): Homolog of NCBI NO: 4091984 NR Description: CRT/DRE binding factor 2 [Arabidopsis thaliana]
  misc_feature (1)..(133): Homolog of NCBI NO: 18416557 NR Description: DRE binding protein (DREB1C) [Arabidopsis
  misc_feature (1)..(133): Homolog of NCBI NO: 15242244 NR Description: C-repeat/DRE binding protein, putative
MAARAHDVAALALRGRSACLNFADSAWRLRIPESTCPKEIQRAAAEAAMAFQNKTATTETTMVEAVKPAEETVGQTGGETMEENGVFYMAEEAVLGMPRFLENMGEEMLLPPPELGWNHNDLAGDADVSLWSF

SEQ ID NO: 61601 - DNA, 690 bp, Triticum aestivum
  misc_feature (1)..(690): Ceres Seq. ID no. 12627433
cttcaactccatcggtaattacctaatctaagcgtattgcatcagtttttttcacatgttatgattgtattgttcttgttgaaacagagagacagggttgaaggaagtgtttgggatcttcagcaaacagacagatctgattggtcaacaggaagctcggatccaaactcatggcaaccttttagtgatgaaccaaaacctgtgttggaaactccatcaaagtctgtgagaaccaaaagcaaaccagcttcgtcagctcctgctccagcaagccaaggttttgagccatgggggttcgagacagagtccttcagagctgctgcaacgtcttcagcgtctgcaacaccaaaatctgtaagttctggcaacagttcacagagatttgggaacacaaagatgagagataaccagaaagctgctcaacctgctggatgggctggcttctaaaaagctttcactctatctcaatgcttattgctattcctcgtattacagaatcttgaatctttttgtagatgaatgaccatcctctgtttttgtgttgctctctatatatatccactgtttctgtagattgtttaaaatttacagatttgtttttttttttttttggcggaatgtataacgtatttctgaaaatgatcaaacgattgatcatattaccttactggaaaaaaaaatatatttaag

SEQ ID NO: 61602 - protein, 128 aa, Triticum aestivum
  peptide (1)..(128): Ceres Seq. ID no. 12627434
  misc_feature (10)..(128): Homolog of NCBI NO: 18403106 NR Description: putative serine threonine protein kinase
  misc_feature (10)..(128): Homolog of NCBI NO: 18176324 NR Description: putative serine/threonine protein kinase
  misc_feature (10)..(128): Homolog of NCBI NO: 30685467 NR Description: protein kinase family [Arabidopsis thaliana]
  misc_feature (1)..(128): Homolog of NCBI NO: 7487297 NR Description: probable serine/threonine protein kinase
MIVLFLLKQRDRVEGSVWDLQQTDRSDWSTGSSDPNSWQPFSDEPKPVLETPSKSVRTKSKPASSAPAPASQGFEPWGFETESFRAAATSSASATPKSVSSGNSSQRFGNTKMRDNQKAAQPAGWAGF

SEQ ID NO: 61603 - DNA, 992 bp, Triticum aestivum
  misc_feature (1)..(992): Ceres Seq. ID no. 13664279
attattctctttgcattttgtgttcgttgacccgataacaaaaaaggcatcgaagatgaacgttagggttttgtttctggctctccttctccttgcatcgccgctgcttcaagttgctagatgtcaagtagatgccgaggatcattccagtatcgttgacgatgttgtgggagaacacagcgattctggtgctgaggaggatgatcaggatttggataatatcaacttgacctctgctccaggggttgagactgtctctgttttccccaaaaacagtgccaaagtggttccagctggagaagagactgagctccttgttgctctcaagaacgatggcaaatctagcgtaggtgtgatggggattagggccagcgtccatcttccttatgatcacaagctgttggttcagaatctcaccatgatgaggtacaacaatgcgtccatcccaacttctgttcaagcaacattcccttacatctttgcagtcagccagtacctgcagcctggagcgtttgatctggtgggttatattatctacgacgtggaggggaagccataccagagcgtcttctacaatggaaccatcgaggtagttgaatctggaggtcttctcagcggtgagtctgtcttccttataacacttggagttgctctcctcctcctcctcggtctatgggcatacagccaagtccagcgtctcactaagaaaaccaaaaaggtgtcaaaggtggaagtaggaaccaggtctaccgacgcatcgctggacgagtggctcgagggaactcatttggccaagacattgtctgggaaatcaaaaagcaagaagaactaagaaagaacgcagtgtttagagactcgacttttagcgttttgagagagtttacaagttttaaagttgagtcttgaggaactttagggtttataaacgttactttccttttttttgttcatgcatttgtactttttagacaatcttatcactctttcttgtc

SEQ ID NO: 61604 - protein, 276 aa, Triticum aestivum
  peptide (1)..(276): Ceres Seq. ID no. 13664280
  misc_feature (41)..(258): Homolog of NCBI NO: 17510497 NR Description: Translocon-associated protein (TRAP), alpha
  misc_feature (23)..(274): Homolog of NCBI NO: 18921153 NR Description: CG32701-PA [Drosophila melanogaster]
  misc_feature (43)..(275): Homolog of NCBI NO: 1174450 NR Description: TRANSLOCON-ASSOCIATED PROTEIN, ALPHA SUBUNIT
  misc_feature (23)..(258): Homolog of NCBI NO: 4507237 NR Description: signal sequence receptor, alpha; TRAP alpha [Homo
  misc_feature (143)..(275): Homolog of NCBI NO: 15227250 NR Description: TRAP protein -related [Arabidopsis thaliana]
  misc_feature (23)..(276): Homolog of NCBI NO: 547391 NR Description: alpha-subunit; putative
  misc_feature (19)..(276): Homolog of NCBI NO: 25335776 NR Description: hypothetical protein At2g21160 [imported] -
  misc_feature (19)..(276): Homolog of NCBI NO: 18399609 NR Description: signal sequence receptor, alpha subunit
  misc_feature (19)..(276): Homolog of NCBI NO: 21555380 NR Description: putative signal sequence receptor, alpha subunit
LFSLHFVFVDPITKKASKMNVRVLFLALLLLASPLLQVARCQVDAEDHSSIVDDVVGEHSDSGAEEDDQDLDNINLTSAPGVETVSVFPKNSAKVVPAGEETELLVALKNDGKSSVGVMGIRASVHLPYDHKLLVQNLTMMRYNNASIPTSVQATFPYIFAVSQYLQPGAFDLVGYIIYDVEGKPYQSVFYNGTIEVVESGGLLSGESVFLITLGVALLLLLGLWAYSQVQRLTKKTKKVSKVEVGTRSTDASLDEWLEGTHLAKTLSGKSKSKKN

SEQ ID NO: 61605 - protein, 258 aa, Triticum aestivum
  peptide (1)..(258): Ceres Seq. ID no. 13664281
  misc_feature (23)..(240): Homolog of NCBI NO: 17510497 NR Description: Translocon-associated protein (TRAP), alpha
  misc_feature (5)..(256): Homolog of NCBI NO: 18921153 NR Description: CG32701-PA [Drosophila melanogaster]
  misc_feature (25)..(257): Homolog of NCBI NO: 1174450 NR Description: TRANSLOCON-ASSOCIATED PROTEIN, ALPHA SUBUNIT
  misc_feature (5)..(240): Homolog of NCBI NO: 4507237 NR Description: signal sequence receptor, alpha; TRAP alpha [Homo
  misc_feature (125)..(257): Homolog of NCBI NO: 15227250 NR Description: TRAP protein -related [Arabidopsis thaliana]
  misc_feature (5)..(258): Homolog of NCBI NO: 547391 NR Description: alpha-subunit; putative
  misc_feature (1)..(258): Homolog of NCBI NO: 25335776 NR Description: hypothetical protein At2g21160 [imported] -
  misc_feature (1)..(258): Homolog of NCBI NO: 18399609 NR Description: signal sequence receptor, alpha subunit
  misc_feature (1)..(258): Homolog of NCBI NO: 21555380 NR Description: putative signal sequence receptor, alpha subunit
MNVRVLFLALLLLASPLLQVARCQVDAEDHSSIVDDVVGEHSDSGAEEDDQDLDNINLTSAPGVETVSVFPKNSAKVVPAGEETELLVALKNDGKSSVGVMGIRASVHLPYDHKLLVQNLTMMRYNNASIPTSVQATFPYIFAVSQYLQPGAFDLVGYIIYDVEGKPYQSVFYNGTIEVVESGGLLSGESVFLITLGVALLLLLGLWAYSQVQRLTKKTKKVSKVEVGTRSTDASLDEWLEGTHLAKTLSGKSKSKKN

SEQ ID NO: 61606 - protein, 158 aa, Triticum aestivum
  peptide (1)..(158): Ceres Seq. ID no. 13664282
  misc_feature (1)..(140): Homolog of NCBI NO: 17510497 NR Description: Translocon-associated protein (TRAP), alpha
  misc_feature (1)..(156): Homolog of NCBI NO: 18921153 NR Description: CG32701-PA [Drosophila melanogaster]
  misc_feature (1)..(157): Homolog of NCBI NO: 1174450 NR Description: TRANSLOCON-ASSOCIATED PROTEIN, ALPHA SUBUNIT
  misc_feature (1)..(140): Homolog of NCBI NO: 4507237 NR Description: signal sequence receptor, alpha; TRAP alpha [Homo
  misc_feature (25)..(157): Homolog of NCBI NO: 15227250 NR Description: TRAP protein -related [Arabidopsis thaliana]
  misc_feature (1)..(158): Homolog of NCBI NO: 547391 NR Description: alpha-subunit; putative
  misc_feature (1)..(158): Homolog of NCBI NO: 25335776 NR Description: hypothetical protein At2g21160 [imported] -
  misc_feature (1)..(158): Homolog of NCBI NO: 18399609 NR Description: signal sequence receptor, alpha subunit
  misc_feature (1)..(158): Homolog of NCBI NO: 21555380 NR Description: putative signal sequence receptor, alpha subunit
MGIRASVHLPYDHKLLVQNLTMMRYNNASIPTSVQATFPYIFAVSQYLQPGAFDLVGYIIYDVEGKPYQSVFYNGTIEVVESGGLLSGESVFLITLGVALLLLLGLWAYSQVQRLTKKTKKVSKVEVGTRSTDASLDEWLEGTHLAKTLSGKSKSKKN

SEQ ID NO: 61607 - DNA, 893 bp, Triticum aestivum
  misc_feature (1)..(893): Ceres Seq. ID no. 13661656
caagaatcgaaactcctctctctctctgtcttttacacctcaccaagaacacacaaagagcaagagagagaagaaacccacaatggccacttccttctccgccgcgacgccttttgttttcatcctcctcctctccatctcctccgtcaccgttcacggcgcatctcaccaccacacggcggctccggctccggctgtagactgttcgactctcataatcaacatggcggattgtttggacttcgtcatggccggaggcacgtcggcgaaaccgaagagttcgtgttgcgcggggcttaagacagtgcttaaggctgacgcagagtgtctttgtgaggcgtttaaaaacagtgctgcttttggaatcaccttgaacatgaccaaggctgctacacttcccaccgcatgcaagcttcatgctccttctatttctaactgtggattgtctatgactcctactatggctccaggtcttgctccaggaggtgcggttgctgctggacccggcgcagctggaacaaccctagctccaaccccgtctcaggggaacgacggatcttccttgattccgatctcgttcaccaccctattcagcgctttattcttcgtattgttcttgtctcgtgtgtaaaagagcctgcgcctttctcactatctatagatttggatttatgatatgctttagggctttttaagactgagctttgtgtcttggagtgtcttctgttttagacaatttcgggtttctgcagtagttttactctcttaatttatgttattattttgtcgcacattgatcttttatattaatggtatctctcattccccwaagtgggaatctggaggggggctcattccccmaaaaaaaaaaaaaaaaagcttatcgataccgt

SEQ ID NO: 61608 - protein, 209 aa, Triticum aestivum
  peptide (1)..(209): Ceres Seq. ID no. 15220123
  misc_feature (68)..(146): Pfam Name: Protease inhibitor/seed storage/LTP family Pfam Description: Protease inhibitor/seed storage/LTP family
  misc_feature (41)..(205): Homolog of NCBI NO: 25553595 NR Description: OJ1656_E11.26 [Oryza sativa (japonica
  misc_feature (38)..(190): Homolog of NCBI NO: 30680828 NR Description: protease inhibitor/seed storage/lipid transfer
  misc_feature (38)..(207): Homolog of NCBI NO: 7487610 NR Description: hypothetical protein T3F12.2 - Arabidopsis
  misc_feature (32)..(156): Homolog of NCBI NO: 18415958 NR Description: lipid transfer protein family [Arabidopsis
  misc_feature (32)..(192): Homolog of NCBI NO: 30682659 NR Description: lipid transfer protein family [Arabidopsis
  misc_feature (65)..(200): Homolog of NCBI NO: 27765012 NR Description: At2g13820 [Arabidopsis thaliana]
  misc_feature (65)..(200): Homolog of NCBI NO: 15225509 NR Description: protease inhibitor/seed storage/lipid transfer
  misc_feature (28)..(207): Homolog of NCBI NO: 10176956 NR Description: contains similarity to nonspecific lipid-transfer
  misc_feature (28)..(207): Homolog of NCBI NO: 21618136 NR Description: nonspecific lipid-transfer protein-like protein
  misc_feature (28)..(207): Homolog of NCBI NO: 18424785 NR Description: protease inhibitor/seed storage/lipid transfer
KNRNSSLSLSFTPHQEHTKSKREKKPTMATSFSAATPFVFILLLSISSVTVHGASHHHTAAPAPAVDCSTLIINMADCLDFVMAGGTSAKPKSSCCAGLKTVLKADAECLCEAFKNSAAFGITLNMTKAATLPTACKLHAPSISNCGLSMTPTMAPGLAPGGAVAAGPGAAGTTLAPTPSQGNDGSSLIPISFTTLFSALFFVLFLSRV

SEQ ID NO: 61609 - protein, 182 aa, Triticum aestivum
  peptide (1)..(182): Ceres Seq. ID no. 15220124
  misc_feature (41)..(119): Pfam Name: Protease inhibitor/seed storage/LTP family Pfam Description: Protease inhibitor/seed storage/LTP family
  misc_feature (14)..(178): Homolog of NCBI NO: 25553595 NR Description: OJ1656_E11.26 [Oryza sativa (japonica
  misc_feature (11)..(163): Homolog of NCBI NO: 30680828 NR Description: protease inhibitor/seed storage/lipid transfer
  misc_feature (11)..(180): Homolog of NCBI NO: 7487610 NR Description: hypothetical protein T3F12.2 - Arabidopsis
  misc_feature (5)..(129): Homolog of NCBI NO: 18415958 NR Description: lipid transfer protein family [Arabidopsis
  misc_feature (5)..(165): Homolog of NCBI NO: 30682659 NR Description: lipid transfer protein family [Arabidopsis
  misc_feature (38)..(173): Homolog of NCBI NO: 27765012 NR Description: At2g13820 [Arabidopsis thaliana]
  misc_feature (38)..(173): Homolog of NCBI NO: 15225509 NR Description: protease inhibitor/seed storage/lipid transfer
  misc_feature (1)..(180): Homolog of NCBI NO: 10176956 NR Description: contains similarity to nonspecific lipid-transfer
  misc_feature (1)..(180): Homolog of NCBI NO: 21618136 NR Description: nonspecific lipid-transfer protein-like protein
  misc_feature (1)..(180): Homolog of NCBI NO: 18424785 NR Description: protease inhibitor/seed storage/lipid transfer
MATSFSAATPFVFILLLSISSVTVHGASHHHTAAPAPAVDCSTLIINMADCLDFVMAGGTSAKPKSSCCAGLKTVLKADAECLCEAFKNSAAFGITLNMTKAATLPTACKLHAPSISNCGLSMTPTMAPGLAPGGAVAAGPGAAGTTLAPTPSQGNDGSSLIPISFTTLFSALFFVLFLSRV

SEQ ID NO: 61610 - protein, 135 aa, Triticum aestivum
  peptide (1)..(135): Ceres Seq. ID no. 15220125
  misc_feature (1)..(72): Pfam Name: Protease inhibitor/seed storage/LTP family Pfam Description: Protease inhibitor/seed storage/LTP family
  misc_feature (1)..(131): Homolog of NCBI NO: 25553595 NR Description: OJ1656_E11.26 [Oryza sativa (japonica
  misc_feature (1)..(116): Homolog of NCBI NO: 30680828 NR Description: protease inhibitor/seed storage/lipid transfer
  misc_feature (1)..(133): Homolog of NCBI NO: 7487610 NR Description: hypothetical protein T3F12.2 - Arabidopsis
  misc_feature (1)..(82): Homolog of NCBI NO: 18415958 NR Description: lipid transfer protein family [Arabidopsis
  misc_feature (1)..(118): Homolog of NCBI NO: 30682659 NR Description: lipid transfer protein family [Arabidopsis
  misc_feature (1)..(126): Homolog of NCBI NO: 27765012 NR Description: At2g13820 [Arabidopsis thaliana]
  misc_feature (1)..(126): Homolog of NCBI NO: 15225509 NR Description: protease inhibitor/seed storage/lipid transfer
  misc_feature (1)..(133): Homolog of NCBI NO: 10176956 NR Description: contains similarity to nonspecific lipid-transfer
  misc_feature (1)..(133): Homolog of NCBI NO: 21618136 NR Description: nonspecific lipid-transfer protein-like protein
  misc_feature (1)..(133): Homolog of NCBI NO: 18424785 NR Description: protease inhibitor/seed storage/lipid transfer
MADCLDFVMAGGTSAKPKSSCCAGLKTVLKADAECLCEAFKNSAAFGITLNMTKAATLPTACKLHAPSISNCGLSMTPTMAPGLAPGGAVAAGPGAAGTTLAPTPSQGNDGSSLIPISFTTLFSALFFVLFLSRV

SEQ ID NO: 61611 - DNA, 683 bp, Triticum aestivum
  misc_feature (1)..(683): Ceres Seq. ID no. 13661859
aatcgtattagtcccactttggttggcttaggattgttcttgcatcatcttaaaaatggcttcgctttctttactcagcggcggtgctctccaggctcgttgcgcaagacatgcgcatgttagcccacgcgcggcgcatcctaccaaaccagctcctccgtcctcctctctaactggcgcctctcgcaggaacctgctgttttccctgacggcagcgacggtggtgacgggactgcagcctgcatcaatggcggagactattccgttgttcgggatcagaaagaagctgaagaaggcagaagaagaagcggtggagatcgtgaaggaaggcttcgagacggcggagaaaggactagagacggctgagaagggattagaggcggcggagaagggagtagagacggcggagaaagaaatcgagacggcggttagttataacggattgacgcaggcgggagcagttgtggcggctgagttcatcggagttcttgtcgcaacttcagtcgtcaacgggattttaggacctgaagcccagaagtcgtagacttttatcatttcaagactgaaagacatttgatctttaagtgtaatattgtgtctaaaagttgtgttaattaagcgttgaacgtatgtaatcttgattgagttttgataatatatagttttaatttattttcatttgg

SEQ ID NO: 61612 - protein, 162 aa, Triticum aestivum
  peptide (1)..(162): Ceres Seq. ID no. 15220705
  misc_feature (3)..(162): Homolog of NCBI NO: 21554083 NR Description: unknown [Arabidopsis thaliana]
  misc_feature (3)..(162): Homolog of NCBI NO: 18400342 NR Description: expressed protein [Arabidopsis thaliana]
MASLSLLSGGALQARCARHAHVSPRAAHPTKPAPPSSSLTGASRRNLLFSLTAATVVTGLQPASMAETIPLFGIRKKLKKAEEEAVEIVKEGFETAEKGLETAEKGLEAAEKGVETAEKEIETAVSYNGLTQAGAVVAAEFIGVLVATSVVNGILGPEAQKS

SEQ ID NO: 61613 - protein, 98 aa, Triticum aestivum
  peptide (1)..(98): Ceres Seq. ID no. 15220706
  misc_feature (1)..(98): Homolog of NCBI NO: 21554083 NR Description: unknown [Arabidopsis thaliana]
  misc_feature (1)..(98): Homolog of NCBI NO: 18400342 NR Description: expressed protein [Arabidopsis thaliana]
MAETIPLFGIRKKLKKAEEEAVEIVKEGFETAEKGLETAEKGLEAAEKGVETAEKEIETAVSYNGLTQAGAVVAAEFIGVLVATSVVNGILGPEAQKS

SEQ ID NO: 61614 - DNA, 1066 bp, Triticum aestivum
  misc_feature (1)..(1066): Ceres Seq. ID no. 13661330
gccgaatcacttcactaatcttgcgtccctcttccagctgcagctctgtccaagcgatcgatcgtccgctgtctgtccaacgagctctttctagctcgatcgaggcacgccattgccatggaagccgcacggatcgcgtcctttctgctcctcctcggggtcgtttggtcacgcgcacagcccggcgccgaggcggccggcacgacggtcttcacactgcgcaacaactgcaccttcacgatctggccggccacattgtccggcaacagcgccgtcgccgtcgggggcggcggcttcgagctcgcgccgggcgccaacgtgtcgttccccggcccgacgggctggtccggccggctctgggcgcgcaccggctgcgtcgccgccgcctccggcgcgtccctcgcctgcgccacgggcgactgcggcggcgccgtgcgctgcaccctgggcggggcgccccccgtcacgctcgccgagttcaccctcgggggcgcggacggcaaggacttctacgacgtgagcctggtggacgggtacaacgtcggcatcggcgtggcggccacgggcgccagggtgaactcctcgacatgcggctacgccgggtgcgtgggcgacgtgaacgcgctgtgccccgcggagctgcaggtggccggcaaggaaggggaccaggaggggaagacggtggcgtgccggagcgcgtgcgaggcgttcgggacggccgagtactgctgcacgggcgcgcacggcgggccgaacagctgcgggccgaccaagtactcgaggctgttcaaggcggcatgccccgccgcgtacagctacgcctacgacgatcccaccagcaccttcacctgcggcgccggagcgcagtacctcatcaccttttgcccggcgcagcagtagtccggcccttcgattttggctagtagtgtcgttcattcatcgttatggtgtctcgattttggttagtactatcgttcatccgaattaccagatgtttattggtttggtcgtgtcaatatgtatgcttttgattcattcatttcaaaaaaaaaagaaatatgctttt

SEQ ID NO: 61615 - protein, 306 aa, Triticum aestivum
  peptide (1)..(306): Ceres Seq. ID no. 13661331
  misc_feature (80)..(250): Pfam Name: HlyD family secretion protein Pfam Description: HlyD family secretion protein
  misc_feature (52)..(271): Homolog of NCBI NO: 11362193 NR Description: hypothetical protein
RITSLILRPSSSCSSVQAIDRPLSVQRALSSSIEARHCHGSRTDRVLSAPPRGRLVTRTARRRGGRHDGLHTAQQLHLHDLAGHIVRQQRRRRRGRRLRARAGRQRVVPRPDGLVRPALGAHRLRRRRLRRVPRLRHGRLRRRRALHPGRGAPRHARRVHPRGRGRQGLLRREPGGRVQRRHRRGGHGRQGELLDMRLRRVRGRRERAVPRGAAGGRQGRGPGGEDGGVPERVRGVRDGRVLLHGRARRAEQLRADQVLEAVQGGMPRRVQLRLRRSHQHLHLRRRSAVPHHLLPGAAVVRPFDFG

SEQ ID NO: 61616 - protein, 260 aa, Triticum aestivum
  peptide (1)..(260): Ceres Seq. ID no. 13661332
  misc_feature (36)..(257): Pfam Name: Thaumatin family Pfam Description: Thaumatin family
  misc_feature (29)..(259): Homolog of NCBI NO: 15238593 NR Description: thaumatin-like protein, putative [Arabidopsis
  misc_feature (27)..(256): Homolog of NCBI NO: 30686314 NR Description: thaumatin family [Arabidopsis thaliana]
  misc_feature (10)..(260): Homolog of NCBI NO: 37531036 NR Description: putative thaumatin-like protein
  misc_feature (26)..(257): Homolog of NCBI NO: 15222089 NR Description: pathogenesis-related protein 5 (PR-5)
  misc_feature (1)..(258): Homolog of NCBI NO: 37531042 NR Description: putative thaumatin-like protein
  misc_feature (30)..(257): Homolog of NCBI NO: 6273385 NR Description: SCUTL2 [Vitis vinifera]
  misc_feature (11)..(259): Homolog of NCBI NO: 15222090 NR Description: thaumatin-like protein (pathogenesis-related
  misc_feature (26)..(259): Homolog of NCBI NO: 2435406 NR Description: thaumatin-like protein [Arabidopsis thaliana]
  misc_feature (26)..(259): Homolog of NCBI NO: 15222088 NR Description: thaumatin-like protein [Arabidopsis thaliana]
  misc_feature (1)..(260): Homolog of NCBI NO: 20330768 NR Description: Putative thaumatin-like protein
MEAARIASFLLLLGVVWSRAQPGAEAAGTTVFTLRNNCTFTIWPATLSGNSAVAVGGGGFELAPGANVSFPGPTGWSGRLWARTGCVAAASGASLACATGDCGGAVRCTLGGAPPVTLAEFTLGGADGKDFYDVSLVDGYNVGIGVAATGARVNSSTCGYAGCVGDVNALCPAELQVAGKEGDQEGKTVACRSACEAFGTAEYCCTGAHGGPNSCGPTKYSRLFKAACPAAYSYAYDDPTSTFTCGAGAQYLITFCPAQQ

SEQ ID NO: 61617 - DNA, 1002 bp, Triticum aestivum
  misc_feature (1)..(1002): Ceres Seq. ID no. 15224408
tctagcatcgctactgaaactgaatttatcttctgaatctttgacttcaattcccatacaacaatggtcatctctactgcgcctggatgtttggaactgtagcaaattaacaacagttgacttcactcctcgttccttaccagcagtaaaagtaatcacaattcgaaattgtgaagctttattgtctctacctggcgaaacgtttgtggagttctgttgtctagaggaattgatgatacgtgaatgtccaaatattgagtggagaggcttgacatttcctatatcgcttcgggagctgtacctcaatgactgtggagacatctcaccatgggttccgaactcactggagcacctcaaccacttaacccatctggcgttgatgaacctcaagtacatcaaatctatctctgcacaaatatgggcacagagtttgtcaaagctggaattcttgcagatctgtgagtgtcctcatctgcaagcgattggtggtcccaaaggaattgcaggcattactaatgcatttgttgaatcgtgtgacaagctaaagggtataaagcaacctttccggagaggtagaatggcccacttcggccacttttgacacatgttagctcctgcaggtggagtcgaaccagagagaaggcgtgaagtgccaaagtgaccctgaacctcctgaagcctgaagagggttaaacccctgtgacttgttactctgctttcttgctttggtggtccgagaggtgagagcaaatggcttaacaaacatgaagcctgacgttttttttccttggttttcttttggcgaagcaaagagcaccgtagcaggcaggcaatttccccgtaactgatactcttgcgttcctgcgctgtgatgtctggtggtgagtttaggacctttcccctgtgttgagcatatgcgctttggcccgcccaaaggtgatgacgcttttgctgttatggcaattggcaagtggtagcaaattgatgaactatttgtccttt

SEQ ID NO: 61618 - protein, 199 aa, Triticum aestivum
  peptide (1)..(199): Ceres Seq. ID no. 15224409
  misc_feature (2)..(164): Homolog of NCBI NO: 38346109 NR Description: OSJNBb0006N15.4 [Oryza sativa (japonica
  misc_feature (2)..(172): Homolog of NCBI NO: 34909106 NR Description: putative NBS-LRR type resistance protein
  misc_feature (11)..(164): Homolog of NCBI NO: 38346678 NR Description: OSJNBa0069D17.9 [Oryza sativa (japonica
LASLLKLNLSSESLTSIPIQQWSSLLRLDVWNCSKLTTVDFTPRSLPAVKVITIRNCEALLSLPGETFVEFCCLEELMIRECPNIEWRGLTFPISLRELYLNDCGDISPWVPNSLEHLNHLTHLALMNLKYIKSISAQIWAQSLSKLEFLQICECPHLQAIGGPKGIAGITNAFVESCDKLKGIKQPFRRGRMAHFGHF

SEQ ID NO: 61619 - protein, 122 aa, Triticum aestivum
  peptide (1)..(122): Ceres Seq. ID no. 15224410
  misc_feature (1)..(87): Homolog of NCBI NO: 38346109 NR Description: OSJNBb0006N15.4 [Oryza sativa (japonica
  misc_feature (1)..(95): Homolog of NCBI NO: 34909106 NR Description: putative NBS-LRR type resistance protein
  misc_feature (1)..(87): Homolog of NCBI NO: 38346678 NR Description: OSJNBa0069D17.9 [Oryza sativa (japonica
MIRECPNIEWRGLTFPISLRELYLNDCGDISPWVPNSLEHLNHLTHLALMNLKYIKSISAQIWAQSLSKLEFLQICECPHLQAIGGPKGIAGITNAFVESCDKLKGIKQPFRRGRMAHFGHF

SEQ ID NO: 61620 - DNA, 768 bp, Triticum aestivum
  misc_feature (1)..(768): Ceres Seq. ID no. 13661333
acctagaacatcctaatcgaaaaatattcgaaaaaagatcttcgttttctctgcgtctcctttcagcagtctttgacagcgtcttgattcagccatggctaacgcggcgtcgggaatggcagtccatgatgactgcaagctaaggttcctggaactgaaggcgaagaggacgcaccgtttcattgtttacaagatcgaggagaagcagaagcaagtgattgttgagaaagttggtgagcctattcaaacctacgaggactttgctgcgagcctccctgctgaagagtgccgatacgccatttatgacttcgactttgtcactgcggagaattgccagaagagcaagattttcttcattgcgtggtgtcctgacgtagcaaaggtgagaagcaagatgatctatgcgagctccaaggacaggttcaagcgtgagcttgatggaattcaagtggagcttcaagcgactgatccaactgagatggatcttgatgttttcaaaagccgtgtcaattaaaaaacaaatattctctctctctctctctctctctctttgaataagcttctttggctcttacagtttcctgcgactgtataaaaacataacgccctttattctatccttatctggtctcgtcttctgcgtcgttgttaccgaacagtgttttcatcttatattgaaagttatcccaacgtttgtgctgaaaaaaaaaaaaaaaaaagcttatcgataccgtcgactgtttaaacwcrataaagggggggcccggt

SEQ ID NO: 61621 - protein, 139 aa, Triticum aestivum
  peptide (1)..(139): Ceres Seq. ID no. 15218799
  misc_feature (12)..(139): Pfam Name: Cofilin/tropomyosin-type actin-binding protein Pfam Description: Cofilin/tropomyosin-type actin-binding protein
  misc_feature (8)..(139): Homolog of NCBI NO: 11276987 NR Description: actin depolymerizing factor 2 - Arabidopsis
  misc_feature (1)..(139): Homolog of NCBI NO: 38564721 NR Description: putative actin-depolymerizing factor 2
  misc_feature (1)..(139): Homolog of NCBI NO: 18408116 NR Description: actin depolymerizing factor 2 (ADF2) [Arabidopsis
  misc_feature (1)..(137): Homolog of NCBI NO: 17366765 NR Description: Actin-depolymerizing factor 2 (ADF 2)
  misc_feature (1)..(139): Homolog of NCBI NO: 30697295 NR Description: actin depolymerizing factor 3 - like protein
  misc_feature (1)..(139): Homolog of NCBI NO: 17366768 NR Description: Actin-depolymerizing factor 1 (ADF 1)
  misc_feature (8)..(139): Homolog of NCBI NO: 30697303 NR Description: actin depolymerizing factor 4 - like protein
  misc_feature (1)..(139): Homolog of NCBI NO: 15231309 NR Description: actin depolymerizing factor 1 (ADF1) [Arabidopsis
  misc_feature (1)..(139): Homolog of NCBI NO: 4185511 NR Description: actin depolymerizing factor 4 [Arabidopsis
  misc_feature (1)..(139): Homolog of NCBI NO: 30697300 NR Description: actin depolymerizing factor 4 - like protein
MANAASGMAVHDDCKLRFLELKAKRTHRFIVYKIEEKQKQVIVEKVGEPIQTYEDFAASLPAEECRYAIYDFDFVTAENCQKSKIFFIAWCPDVAKVRSKMIYASSKDRFKRELDGIQVELQATDPTEMDLDVFKSRVN

SEQ ID NO: 61622 - protein, 132 aa, Triticum aestivum
  peptide (1)..(132): Ceres Seq. ID no. 15218800
  misc_feature (5)..(132): Pfam Name: Cofilin/tropomyosin-type actin-binding protein Pfam Description: Cofilin/tropomyosin-type actin-binding protein
  misc_feature (1)..(132): Homolog of NCBI NO: 11276987 NR Description: actin depolymerizing factor 2 - Arabidopsis
  misc_feature (1)..(132): Homolog of NCBI NO: 38564721 NR Description: putative actin-depolymerizing factor 2
  misc_feature (1)..(132): Homolog of NCBI NO: 18408116 NR Description: actin depolymerizing factor 2 (ADF2) [Arabidopsis
  misc_feature (1)..(130): Homolog of NCBI NO: 17366765 NR Description: Actin-depolymerizing factor 2 (ADF 2)
  misc_feature (1)..(132): Homolog of NCBI NO: 30697295 NR Description: actin depolymerizing factor 3 - like protein
  misc_feature (1)..(132): Homolog of NCBI NO: 17366768 NR Description: Actin-depolymerizing factor 1 (ADF 1)
  misc_feature (1)..(132): Homolog of NCBI NO: 30697303 NR Description: actin depolymerizing factor 4 - like protein
  misc_feature (1)..(132): Homolog of NCBI NO: 15231309 NR Description: actin depolymerizing factor 1 (ADF1) [Arabidopsis
  misc_feature (1)..(132): Homolog of NCBI NO: 4185511 NR Description: actin depolymerizing factor 4 [Arabidopsis
  misc_feature (1)..(132): Homolog of NCBI NO: 30697300 NR Description: actin depolymerizing factor 4 - like protein
MAVHDDCKLRFLELKAKRTHRFIVYKIEEKQKQVIVEKVGEPIQTYEDFAASLPAEECRYAIYDFDFVTAENCQKSKIFFIAWCPDVAKVRSKMIYASSKDRFKRELDGIQVELQATDPTEMDLDVFKSRVN

SEQ ID NO: 61623 - DNA, 791 bp, Triticum aestivum
  misc_feature (1)..(791): Ceres Seq. ID no. 15224870
actctccaaaaccaccaaaatctccatcccctccgtgcaccggattccatccaactgctccaccactctaatctctctctcatggcgacggccaccgcgagtcggcccagcggcccggtcctgtcgatccccagctaccgctccgcctcgccaacccgcgtcaaggtcgccacccgcttgccgggcaagtccgtcagcgtctcctccccgtcctccaccaggagccatcggtcctcctgcatgtgctccccgacgaaccacccgggctcgttccgctgcagcctccacaaggagcgcaagcagccggcccacgctggcagcagcagcaggcccgcctccccgccttccccgccgtccacctcgaagagcacgggcggcgcgctggcgaggctcgtccccatggggagcgggcactgggcacgcagggcgctagcgccgtcccccgcggcgcagcagtcgctacagcaccggaggcgcgcgggcgggttccgcccccggccgagcaggctctccgccgtgtccacggccggcgacagccagtagacgaacagcgtctgacatgaagaattgcctgaagaaattgaagtttttagaaccaattcgatacctgcgtcgacatgccatggcaagatagtagagtagtgctagtagatagcaaagaaattgcctgaagaattggagtttttagaaccaattcgatacctgcctggagagttgatgagcccgtccgtaactgtacagaatgcatttttctagcaagcatgaatggcgttaattgagattcaagaagc

SEQ ID NO: 61624 - protein, 180 aa, Triticum aestivum
  peptide (1)..(180): Ceres Seq. ID no. 15224871
  misc_feature (47)..(169): Homolog of NCBI NO: 15241329 NR Description: hypothetical protein [Arabidopsis thaliana]
  misc_feature (45)..(178): Homolog of NCBI NO: 24461857 NR Description: CTV.15 [Poncirus trifoliata]
  misc_feature (21)..(178): Homolog of NCBI NO: 21618161 NR Description: serine-rich protein [Arabidopsis thaliana]
  misc_feature (21)..(178): Homolog of NCBI NO: 15238753 NR Description: serine-rich protein [Arabidopsis thaliana]
  misc_feature (47)..(179): Homolog of NCBI NO: 15238947 NR Description: expressed protein [Arabidopsis thaliana]
TLQNHQNLHPLRAPDSIQLLHHSNLSLMATATASRPSGPVLSIPSYRSASPTRVKVATRLPGKSVSVSSPSSTRSHRSSCMCSPTNHPGSFRCSLHKERKQPAHAGSSSRPASPPSPPSTSKSTGGALARLVPMGSGHWARRALAPSPAAQQSLQHRRRAGGFRPRPSRLSAVSTAGDSQ

SEQ ID NO: 61625 - protein, 153 aa, Triticum aestivum
  peptide (1)..(153): Ceres Seq. ID no. 15224872
  misc_feature (20)..(142): Homolog of NCBI NO: 15241329 NR Description: hypothetical protein [Arabidopsis thaliana]
  misc_feature (18)..(151): Homolog of NCBI NO: 24461857 NR Description: CTV.15 [Poncirus trifoliata]
  misc_feature (1)..(151): Homolog of NCBI NO: 21618161 NR Description: serine-rich protein [Arabidopsis thaliana]
  misc_feature (1)..(151): Homolog of NCBI NO: 15238753 NR Description: serine-rich protein [Arabidopsis thaliana]
  misc_feature (20)..(152): Homolog of NCBI NO: 15238947 NR Description: expressed protein [Arabidopsis thaliana]
MATATASRPSGPVLSIPSYRSASPTRVKVATRLPGKSVSVSSPSSTRSHRSSCMCSPTNHPGSFRCSLHKERKQPAHAGSSSRPASPPSPPSTSKSTGGALARLVPMGSGHWARRALAPSPAAQQSLQHRRRAGGFRPRPSRLSAVSTAGDSQ

SEQ ID NO: 61626 - protein, 143 aa, Triticum aestivum
  peptide (1)..(143): Ceres Seq. ID no. 15224873
  misc_feature (31)..(127): Pfam Name: 7 transmembrane receptor (rhodopsin family) Pfam Description: 7 transmembrane receptor (rhodopsin family)
  misc_feature (8)..(115): Homolog of NCBI NO: 34901668 NR Description: P0640E12.29 [Oryza sativa (japonica
  misc_feature (31)..(143): Homolog of NCBI NO: 22962211 NR Description: COG2885: Outer membrane protein and related
  misc_feature (29)..(143): Homolog of NCBI NO: 11360318 NR Description: probable mucin DKFZp434C196.1 - human (fragment)
  misc_feature (6)..(143): Homolog of NCBI NO: 81286 NR Description: extensin - Volvox carteri (fragment)
  misc_feature (10)..(142): Homolog of NCBI NO: 7441829 NR Description: proline-rich cell wall protein - upland cotton
  misc_feature (14)..(143): Homolog of NCBI NO: 31239605 NR Description: ENSANGP00000009012 [Anopheles gambiae]
  misc_feature (20)..(143): Homolog of NCBI NO: 32422095 NR Description: predicted protein [Neurospora crassa]
  misc_feature (29)..(143): Homolog of NCBI NO: 29247944 NR Description: GLP_26_54603_52153 [Giardia lamblia ATCC 50803]
  misc_feature (31)..(143): Homolog of NCBI NO: 27375632 NR Description: blr0521 [Bradyrhizobium japonicum]
  misc_feature (11)..(143): Homolog of NCBI NO: 34536406 NR Description: unnamed protein product [Homo sapiens]
LSKTTKISIPSVHRIPSNCSTTLISLSWRRPPRVGPAARSCRSPATAPPRQPASRSPPACRASPSASPPRPPPGAIGPPACAPRRTTRARSAAASTRSASSRPTLAAAAGPPPRLPRRPPRRARAARWRGSSPWGAGTGHAGR

SEQ ID NO: 61627 - DNA, 884 bp, Triticum aestivum
  misc_feature (1)..(884): Ceres Seq. ID no. 15226343
taataacatcaaaagctccatcaccaaaacccttccatattttcaagtaaagttttcaatgacttcatcaatggcgtcctcctccctttctcctgctactcagcttggttcgagcagaagctctttgttggcgatgtcgcgtgtgatgtttgtgaagccaacgaatcatcagatggtgaaaaaggagaagattggtctgagaattgcttgtcaagcgacgagtataccagcagacaatgttccagatatggaaaagaggaagcttttgaatcttcttcttgtcggggctctttctctccctactggcttcatgcttgtcccttacgctaccttctttgctcctcctggatccggaggtgggggtggtggtactccagccaaggatgcacttggaaacgatgtcgttgcagcagaatggcttaagactcatggtcccggtgatcgaaccttgacccaaggattaaagggagatccaacttacctagttgtggagaacgacaaaactctagcgacctacggtataaacgcagtgtgcactcatcttggatgtgttgtgccatggaacaaagctgagaacaagttcctatgcccttgccatggttcccaatacaacgcccaaggaagagtcgttagaggtccagcgccattgtcgcttgccttggctcacgccgatattgatgacagtggaaaggttctatttgttccatgggttgaaactgacttcaggactggtgatgctccatggtggtcttaaaactgtgcaacaactcttttgcctaatacttgtatgaatgttcttataatgtaaaagctatgtgtaaccatacatttcatggcattactctgtgaattcttccctcttatatgaattttatgttcattcg

SEQ ID NO: 61628 - protein, 250 aa, Triticum aestivum
  peptide (1)..(250): Ceres Seq. ID no. 15226344
  misc_feature (134)..(226): Pfam Name: Rieske [2Fe-2S] domain Pfam Description: Rieske [2Fe-2S] domain
  misc_feature (24)..(250): Homolog of NCBI NO: 3885886 NR Description: Rieske Fe-S precursor protein [Oryza sativa]
  misc_feature (24)..(250): Homolog of NCBI NO: 2921504 NR Description: cytochrome B6-F complex iron-sulfur subunit
  misc_feature (24)..(250): Homolog of NCBI NO: 136707 NR Description: Cytochrome B6-F complex iron-sulfur subunit,
  misc_feature (21)..(250): Homolog of NCBI NO: 136712 NR Description: Cytochrome B6-F complex iron-sulfur subunit,
  misc_feature (24)..(250): Homolog of NCBI NO: 19999 NR Description: Rieske Fe/S protein of cytochrome b6/f complex
  misc_feature (24)..(250): Homolog of NCBI NO: 401247 NR Description: Cytochrome B6-F complex iron-sulfur subunit 1,
  misc_feature (24)..(250): Homolog of NCBI NO: 401249 NR Description: Cytochrome B6-F complex iron-sulfur subunit 2,
  misc_feature (43)..(250): Homolog of NCBI NO: 30679426 NR Description: Rieske FeS protein (component of cytochrome B6-F
  misc_feature (24)..(250): Homolog of NCBI NO: 15236275 NR Description: Rieske FeS protein (component of cytochrome B6-F
  misc_feature (24)..(250): Homolog of NCBI NO: 9843639 NR Description: Rieske FeS protein [Arabidopsis thaliana]
NNIKSSITKTLPYFQVKFSMTSSMASSSLSPATQLGSSRSSLLAMSRVMFVKPTNHQMVKKEKIGLRIACQATSIPADNVPDMEKRKLLNLLLVGALSLPTGFMLVPYATFFAPPGSGGGGGGTPAKDALGNDVVAAEWLKTHGPGDRTLTQGLKGDPTYLVVENDKTLATYGINAVCTHLGCVVPWNKAENKFLCPCHGSQYNAQGRVVRGPAPLSLALAHADIDDSGKVLFVPWVETDFRTGDAPWWS

SEQ ID NO: 61629 - protein, 231 aa, Triticum aestivum
  peptide (1)..(231): Ceres Seq. ID no. 15226345
  misc_feature (115)..(207): Pfam Name: Rieske [2Fe-2S] domain Pfam Description: Rieske [2Fe-2S] domain
  misc_feature (5)..(231): Homolog of NCBI NO: 3885886 NR Description: Rieske Fe-S precursor protein [Oryza sativa]
  misc_feature (5)..(231): Homolog of NCBI NO: 2921504 NR Description: cytochrome B6-F complex iron-sulfur subunit
  misc_feature (5)..(231): Homolog of NCBI NO: 136707 NR Description: Cytochrome B6-F complex iron-sulfur subunit,
  misc_feature (2)..(231): Homolog of NCBI NO: 136712 NR Description: Cytochrome B6-F complex iron-sulfur subunit,
  misc_feature (5)..(231): Homolog of NCBI NO: 19999 NR Description: Rieske Fe/S protein of cytochrome b6/f complex
  misc_feature (5)..(231): Homolog of NCBI NO: 401247 NR Description: Cytochrome B6-F complex iron-sulfur subunit 1,
  misc_feature (5)..(231): Homolog of NCBI NO: 401249 NR Description: Cytochrome B6-F complex iron-sulfur subunit 2,
  misc_feature (24)..(231): Homolog of NCBI NO: 30679426 NR Description: Rieske FeS protein (component of cytochrome B6-F
  misc_feature (5)..(231): Homolog of NCBI NO: 15236275 NR Description: Rieske FeS protein (component of cytochrome B6-F
  misc_feature (5)..(231): Homolog of NCBI NO: 9843639 NR Description: Rieske FeS protein [Arabidopsis thaliana]
MTSSMASSSLSPATQLGSSRSSLLAMSRVMFVKPTNHQMVKKEKIGLRIACQATSIPADNVPDMEKRKLLNLLLVGALSLPTGFMLVPYATFFAPPGSGGGGGGTPAKDALGNDVVAAEWLKTHGPGDRTLTQGLKGDPTYLVVENDKTLATYGINAVCTHLGCVVPWNKAENKFLCPCHGSQYNAQGRVVRGPAPLSLALAHADIDDSGKVLFVPWVETDFRTGDAPWWS

SEQ ID NO: 61630 - protein, 227 aa, Triticum aestivum
  peptide (1)..(227): Ceres Seq. ID no. 15226346
  misc_feature (111)..(203): Pfam Name: Rieske [2Fe-2S] domain Pfam Description: Rieske [2Fe-2S] domain
  misc_feature (1)..(227): Homolog of NCBI NO: 3885886 NR Description: Rieske Fe-S precursor protein [Oryza sativa]
  misc_feature (1)..(227): Homolog of NCBI NO: 2921504 NR Description: cytochrome B6-F complex iron-sulfur subunit
  misc_feature (1)..(227): Homolog of NCBI NO: 136707 NR Description: Cytochrome B6-F complex iron-sulfur subunit,
  misc_feature (1)..(227): Homolog of NCBI NO: 136712 NR Description: Cytochrome B6-F complex iron-sulfur subunit,
  misc_feature (1)..(227): Homolog of NCBI NO: 19999 NR Description: Rieske Fe/S protein of cytochrome b6/f complex
  misc_feature (1)..(227): Homolog of NCBI NO: 401247 NR Description: Cytochrome B6-F complex iron-sulfur subunit 1,
  misc_feature (1)..(227): Homolog of NCBI NO: 401249 NR Description: Cytochrome B6-F complex iron-sulfur subunit 2,
  misc_feature (20)..(227): Homolog of NCBI NO: 30679426 NR Description: Rieske FeS protein (component of cytochrome B6-F
  misc_feature (1)..(227): Homolog of NCBI NO: 15236275 NR Description: Rieske FeS protein (component of cytochrome B6-F
  misc_feature (1)..(227): Homolog of NCBI NO: 9843639 NR Description: Rieske FeS protein [Arabidopsis thaliana]
MASSSLSPATQLGSSRSSLLAMSRVMFVKPTNHQMVKKEKIGLRIACQATSIPADNVPDMEKRKLLNLLLVGALSLPTGFMLVPYATFFAPPGSGGGGGGTPAKDALGNDVVAAEWLKTHGPGDRTLTQGLKGDPTYLVVENDKTLATYGINAVCTHLGCVVPWNKAENKFLCPCHGSQYNAQGRVVRGPAPLSLALAHADIDDSGKVLFVPWVETDFRTGDAPWWS

SEQ ID NO: 61631 - DNA, 1217 bp, Triticum aestivum
  misc_feature (1)..(1217): Ceres Seq. ID no. 15225659
aagcggacaaggccctatccatccatccatccccatcagatcacctccccacacatctgtgcgccacccgaacgaaagctaagccaccagcagccatggcatctcgcgacgccgccaccttccagctctaccggcccatggcaatgccgacggcgacgctcatgccccagacgatggcaatgcccggcttctcgtcggccgaggccgcggacgacgccgtggtgagagtgccggcgccgagaacggcgggggcggcgaagggcgccaaggaccggcacagcaaggtgaacgggcgcgggcggcgcgtgcgcatgccgatcgtgtgcgcggcgcgcgtgttccagctcacccgcgagctggggctcaagtcggacgggcagaccgtggagtggctgctccggcaggccgagccgtccatcctggccgccaccggctccggcaccaccccggccgtcttctcctgctcctccgcgccctccatcgccgccgtctccctcctcgggaagcggccgcgcgaggaccacgagcacgaggcggcgccgtcgttctgggaggcgctgcaggcccggcccgtaccctggggcctctccccgtcgctggaggcgcaggcgtacgcgtcgtcggtggcgcaggggcaccaccaccacctgaacctgctctccgcgctctccggcgcctccaggcggccagaggaggagtcccggtgaccgaccgccgctgcagctagcgccgagccgcgcgcgctctctacgtgatcgcatgcgctgacctgccagtgccctgctgcctaattcttggagccaagctagccaggtgttcctgcttgcttgcctgctgctgtgtggtgtggcttgccctacgtactttatcattttcttttgcttcctttctcctttgcgtgcaccgtgtgttttcttttgcgtggtttttggtctgggaagaaagaatggagaatctgggcagcatcagagattccaaggtagcaactgtagatacaagcctgctagagatcttaccaccccatctcgtcggatttgtgattgtgcttgtcactagttattactacagtgtattacgccactgccacggctctgccattccctgctgtctgtgacaagtcgattgatctatctaacacagtgccactcttgtaccactcgattgttgttttgcgtcaatggaagtccctctatctgtaggaatcgttttgccgatgc

SEQ ID NO: 61632 - protein, 234 aa, Triticum aestivum
  peptide (1)..(234): Ceres Seq. ID no. 15225660
  misc_feature (79)..(178): Pfam Name: TCP family transcription factor Pfam Description: TCP family transcription factor
  misc_feature (89)..(157): Homolog of NCBI NO: 15232059 NR Description: TCP family transcription factor, putative
  misc_feature (44)..(151): Homolog of NCBI NO: 15225538 NR Description: TCP family transcription factor, putative
  misc_feature (86)..(157): Homolog of NCBI NO: 15218305 NR Description: TCP family transcription factor, putative
  misc_feature (45)..(233): Homolog of NCBI NO: 18409345 NR Description: TCP family transcription factor, putative
  misc_feature (65)..(170): Homolog of NCBI NO: 15217857 NR Description: TCP family transcription factor, putative
  misc_feature (82)..(171): Homolog of NCBI NO: 20975251 NR Description: transcription factor PCF3 [Oryza sativa (japonica
  misc_feature (88)..(156): Homolog of NCBI NO: 26452377 NR Description: unknown protein [Arabidopsis thaliana]
  misc_feature (88)..(156): Homolog of NCBI NO: 15237274 NR Description: TCP family transcription factor, putative
  misc_feature (79)..(178): Homolog of NCBI NO: 15241596 NR Description: TCP family transcription factor, putative
  misc_feature (32)..(234): Homolog of NCBI NO: 38344439 NR Description: OSJNBa0038O10.11 [Oryza sativa (japonica
ADKALSIHPSPSDHLPTHLCATRTKAKPPAAMASRDAATFQLYRPMAMPTATLMPQTMAMPGFSSAEAADDAVVRVPAPRTAGAAKGAKDRHSKVNGRGRRVRMPIVCAARVFQLTRELGLKSDGQTVEWLLRQAEPSILAATGSGTTPAVFSCSSAPSIAAVSLLGKRPREDHEHEAAPSFWEALQARPVPWGLSPSLEAQAYASSVAQGHHHHLNLLSALSGASRRPEEESR

SEQ ID NO: 61633 - protein, 203 aa, Triticum aestivum
  peptide (1)..(203): Ceres Seq. ID no. 15225661
  misc_feature (48)..(147): Pfam Name: TCP family transcription factor Pfam Description: TCP family transcription factor
  misc_feature (58)..(126): Homolog of NCBI NO: 15232059 NR Description: TCP family transcription factor, putative
  misc_feature (13)..(120): Homolog of NCBI NO: 15225538 NR Description: TCP family transcription factor, putative
  misc_feature (55)..(126): Homolog of NCBI NO: 15218305 NR Description: TCP family transcription factor, putative
  misc_feature (14)..(202): Homolog of NCBI NO: 18409345 NR Description: TCP family transcription factor, putative
  misc_feature (34)..(139): Homolog of NCBI NO: 15217857 NR Description: TCP family transcription factor, putative
  misc_feature (51)..(140): Homolog of NCBI NO: 20975251 NR Description: transcription factor PCF3 [Oryza sativa (japonica
  misc_feature (57)..(125): Homolog of NCBI NO: 26452377 NR Description: unknown protein [Arabidopsis thaliana]
  misc_feature (57)..(125): Homolog of NCBI NO: 15237274 NR Description: TCP family transcription factor, putative
  misc_feature (48)..(147): Homolog of NCBI NO: 15241596 NR Description: TCP family transcription factor, putative
  misc_feature (1)..(203): Homolog of NCBI NO: 38344439 NR Description: OSJNBa0038O10.11 [Oryza sativa (japonica
MASRDAATFQLYRPMAMPTATLMPQTMAMPGFSSAEAADDAVVRVPAPRTAGAAKGAKDRHSKVNGRGRRVRMPIVCAARVFQLTRELGLKSDGQTVEWLLRQAEPSILAATGSGTTPAVFSCSSAPSIAAVSLLGKRPREDHEHEAAPSFWEALQARPVPWGLSPSLEAQAYASSVAQGHHHHLNLLSALSGASRRPEEESR

SEQ ID NO: 61634 - protein, 189 aa, Triticum aestivum
  peptide (1)..(189): Ceres Seq. ID no. 15225662
  misc_feature (34)..(133): Pfam Name: TCP family transcription factor Pfam Description: TCP family transcription factor
  misc_feature (44)..(112): Homolog of NCBI NO: 15232059 NR Description: TCP family transcription factor, putative
  misc_feature (1)..(106): Homolog of NCBI NO: 15225538 NR Description: TCP family transcription factor, putative
  misc_feature (41)..(112): Homolog of NCBI NO: 15218305 NR Description: TCP family transcription factor, putative
  misc_feature (1)..(188): Homolog of NCBI NO: 18409345 NR Description: TCP family transcription factor, putative
  misc_feature (20)..(125): Homolog of NCBI NO: 15217857 NR Description: TCP family transcription factor, putative
  misc_feature (37)..(126): Homolog of NCBI NO: 20975251 NR Description: transcription factor PCF3 [Oryza sativa (japonica
  misc_feature (43)..(111): Homolog of NCBI NO: 26452377 NR Description: unknown protein [Arabidopsis thaliana]
  misc_feature (43)..(111): Homolog of NCBI NO: 15237274 NR Description: TCP family transcription factor, putative
  misc_feature (34)..(133): Homolog of NCBI NO: 15241596 NR Description: TCP family transcription factor, putative
  misc_feature (1)..(189): Homolog of NCBI NO: 38344439 NR Description: OSJNBa0038O10.11 [Oryza sativa (japonica
MAMPTATLMPQTMAMPGFSSAEAADDAVVRVPAPRTAGAAKGAKDRHSKVNGRGRRVRMPIVCAARVFQLTRELGLKSDGQTVEWLLRQAEPSILAATGSGTTPAVFSCSSAPSIAAVSLLGKRPREDHEHEAAPSFWEALQARPVPWGLSPSLEAQAYASSVAQGHHHHLNLLSALSGASRRPEEESR

SEQ ID NO: 61635 - DNA, 761 bp, Triticum aestivum
  misc_feature (1)..(761): Ceres Seq. ID no. 14301649
aaaacatagctcctctcctcctgtgcgcgctcaccgctgcacagtatccacccataagagcatataggcgcagtgcaacaggatcatcagtacgggttgcactagcttattaggctagcggctagcgagggagtaggcaggcactgcgcaggagctgatccatggcgagcacggtggagtcgccgacgagctcgtgcgtgtcgtcggacacggaggaggaggccgcggcggtgacgaagccgatggtggtggtggggtgcccgcagtgcctcatgtacgtgatgctgtcgggggcggcggaggagcagcccaggtgcccccggtgcaagagccccgtgctgctgcacttcctccacggcgctgccgccgccgccgccgccagcaccaacaggcagcagcccagcaagagctagccagccaacatgctgctgcttggtcgctgcatgctgcttgctgatcagccgctagcttctcctgccatcgatctccaccatgttctaactcgtgtattctgctgcactatgtagctcttcttttttcccttttcgtcgacgatagtaatttccatgcgagtaactctcaagaagacaagaacgcaaatcttttacagcctggtgcaattggctcggttttactctcgcttagcagtggctgtccttctccaacaacctttagatgtatgcacgtgttctgcaccgtgaaggtcgatgtctgttttaatcccctccttaatttcggtttgaataagatgagatttcacg

SEQ ID NO: 61636 - protein, 83 aa, Triticum aestivum
  peptide (1)..(83): Ceres Seq. ID no. 14301650
  misc_feature (1)..(66): Homolog of NCBI NO: 21593032 NR Description: unknown [Arabidopsis thaliana]
  misc_feature (5)..(53): Homolog of NCBI NO: 38637033 NR Description: unknown protein [Oryza sativa (japonica
  misc_feature (2)..(66): Homolog of NCBI NO: 15242196 NR Description: expressed protein [Arabidopsis thaliana]
  misc_feature (1)..(82): Homolog of NCBI NO: 32479729 NR Description: OJ991214_12.5 [Oryza sativa (japonica
  misc_feature (1)..(63): Homolog of NCBI NO: 34908532 NR Description: P0423B08.15 [Oryza sativa (japonica
  misc_feature (1)..(78): Homolog of NCBI NO: 15239988 NR Description: B-type cyclin -related [Arabidopsis thaliana]
  misc_feature (1)..(79): Homolog of NCBI NO: 18399295 NR Description: expressed protein [Arabidopsis thaliana]
  misc_feature (1)..(83): Homolog of NCBI NO: 32488708 NR Description: OSJNBa0088H09.9 [Oryza sativa (japonica
MASTVESPTSSCVSSDTEEEAAAVTKPMVVVGCPQCLMYVMLSGAAEEQPRCPRCKSPVLLHFLHGAAAAAAASTNRQQPSKS

SEQ ID NO: 61637 - protein, 56 aa, Triticum aestivum
  peptide (1)..(56): Ceres Seq. ID no. 14301651
  misc_feature (1)..(39): Homolog of NCBI NO: 21593032 NR Description: unknown [Arabidopsis thaliana]
  misc_feature (1)..(26): Homolog of NCBI NO: 38637033 NR Description: unknown protein [Oryza sativa (japonica
  misc_feature (1)..(39): Homolog of NCBI NO: 15242196 NR Description: expressed protein [Arabidopsis thaliana]
  misc_feature (1)..(55): Homolog of NCBI NO: 32479729 NR Description: OJ991214_12.5 [Oryza sativa (japonica
  misc_feature (1)..(36): Homolog of NCBI NO: 34908532 NR Description: P0423B08.15 [Oryza sativa (japonica
  misc_feature (1)..(51): Homolog of NCBI NO: 15239988 NR Description: B-type cyclin -related [Arabidopsis thaliana]
  misc_feature (1)..(52): Homolog of NCBI NO: 18399295 NR Description: expressed protein [Arabidopsis thaliana]
  misc_feature (1)..(56): Homolog of NCBI NO: 32488708 NR Description: OSJNBa0088H09.9 [Oryza sativa (japonica
MVVVGCPQCLMYVMLSGAAEEQPRCPRCKSPVLLHFLHGAAAAAAASTNRQQPSKS

SEQ ID NO: 61638 - protein, 46 aa, Triticum aestivum
  peptide (1)..(46): Ceres Seq. ID no. 14301652
  misc_feature (1)..(29): Homolog of NCBI NO: 21593032 NR Description: unknown [Arabidopsis thaliana]
  misc_feature (1)..(16): Homolog of NCBI NO: 38637033 NR Description: unknown protein [Oryza sativa (japonica
  misc_feature (1)..(29): Homolog of NCBI NO: 15242196 NR Description: expressed protein [Arabidopsis thaliana]
  misc_feature (1)..(45): Homolog of NCBI NO: 32479729 NR Description: OJ991214_12.5 [Oryza sativa (japonica
  misc_feature (1)..(26): Homolog of NCBI NO: 34908532 NR Description: P0423B08.15 [Oryza sativa (japonica
  misc_feature (1)..(41): Homolog of NCBI NO: 15239988 NR Description: B-type cyclin -related [Arabidopsis thaliana]
  misc_feature (1)..(42): Homolog of NCBI NO: 18399295 NR Description: expressed protein [Arabidopsis thaliana]
  misc_feature (1)..(46): Homolog of NCBI NO: 32488708 NR Description: OSJNBa0088H09.9 [Oryza sativa (japonica
MYVMLSGAAEEQPRCPRCKSPVLLHFLHGAAAAAAASTNRQQPSKS

SEQ ID NO: 61639 - DNA, 979 bp, Triticum aestivum
  misc_feature (1)..(979): Ceres Seq. ID no. 15226347
aataataataaaattcaacggaggccgccttcccttcaccggatcaccttccttcctttggatctatcttcccattccgacggttcttcgtttctcagagtatcaatctaccttggaacaatgactgaagtgtttaacggctacgagcgccaatactgcgacctctccgccaatctctccaagaaatgctcctctgctcttgcccttgacggagaacaaaagaagcagaagctctctgagataagatctggcctcgataatgctgaagcattgattaggaaaatggatgttgaggcgaggagccttccaccgagcattaggaccagcctccttgttaaactaagagagttcaagtctgatctcaacaacttcaaaagcgaagtcaagaggatcacatctgctaacttgaacgctgctgctcgcgacgagctgcttgaagctggtctggctgacacaaagacggcttcggctgatcaaagagcgagattgatgatgtcaaccgatcgattgggtcgaactactgacagaatcaaggacagtcgaagaatgatgattgagactgaagagcttggcgtttctgtcctccaagacttgcacagtcagagacagtctctccttcgcactggcgacacgcttagtggagtagacgaaaatgtcggaaagagcaagaagatcttgacaggcatgaccaggaggatgaacaggaacaagtggaccattggagccattatcaccgctttggtcgcggctattatcctcatcttgtacttcaaactcaccaagtaatccctctgtatctaaactctttgtcgctgaacaaatggtgtgcatcttttatttaatccttttctggctttctgtgtgataagttatgtctttgccaccttttctattatcacgttctcttgtttgcgtttgcgattacatttgtgtattttcatactaaatgatgcaaattgttttgttttattattattag

SEQ ID NO: 61640 - protein, 261 aa, Triticum aestivum
  peptide (1)..(261): Ceres Seq. ID no. 15226348
  misc_feature (81)..(236): Pfam Name: Vesicle transport v-SNARE protein Pfam Description: Vesicle transport v-SNARE protein
  misc_feature (41)..(261): Homolog of NCBI NO: 9758339 NR Description: v-SNARE AtVTI1a-like protein [Arabidopsis
  misc_feature (41)..(260): Homolog of NCBI NO: 27805772 NR Description: Vesicle transport v-SNARE 12 (AtVTI12) (Vesicle v-SNARE protein VTI1b) (Vesicle soluble NSF attachment protein
  misc_feature (41)..(260): Homolog of NCBI NO: 6690276 NR Description: v-SNARE AtVTI1b [Arabidopsis thaliana]
  misc_feature (41)..(260): Homolog of NCBI NO: 18396008 NR Description: v-SNARE protein AtVTI1b, putative [Arabidopsis
  misc_feature (41)..(258): Homolog of NCBI NO: 34914100 NR Description: similar to vesicle transport protein
  misc_feature (95)..(261): Homolog of NCBI NO: 26451552 NR Description: putative vesicle transport protein [Arabidopsis
  misc_feature (41)..(259): Homolog of NCBI NO: 34910406 NR Description: putative vesicle transport v-SNARE protein
  misc_feature (41)..(261): Homolog of NCBI NO: 15228600 NR Description: SNARE protein AtVTI13 [Arabidopsis thaliana]
  misc_feature (41)..(261): Homolog of NCBI NO: 6690274 NR Description: v-SNARE AtVTI1a [Arabidopsis thaliana]
  misc_feature (41)..(261): Homolog of NCBI NO: 15241780 NR Description: v-SNARE AtVTI1a (ZIG) [Arabidopsis thaliana]
NNNKIQRRPPSLHRITFLPLDLSSHSDGSSFLRVSIYLGTMTEVFNGYERQYCDLSANLSKKCSSALALDGEQKKQKLSEIRSGLDNAEALIRKMDVEARSLPPSIRTSLLVKLREFKSDLNNFKSEVKRITSANLNAAARDELLEAGLADTKTASADQRARLMMSTDRLGRTTDRIKDSRRMMIETEELGVSVLQDLHSQRQSLLRTGDTLSGVDENVGKSKKILTGMTRRMNRNKWTIGAIITALVAAIILILYFKLTK

SEQ ID NO: 61641 - protein, 221 aa, Triticum aestivum
  peptide (1)..(221): Ceres Seq. ID no. 15226349
  misc_feature (41)..(196): Pfam Name: Vesicle transport v-SNARE protein Pfam Description: Vesicle transport v-SNARE protein
  misc_feature (1)..(221): Homolog of NCBI NO: 9758339 NR Description: v-SNARE AtVTI1a-like protein [Arabidopsis
  misc_feature (1)..(220): Homolog of NCBI NO: 27805772 NR Description: Vesicle transport v-SNARE 12 (AtVTI12) (Vesicle v-SNARE protein VTI1b) (Vesicle soluble NSF attachment protein
  misc_feature (1)..(220): Homolog of NCBI NO: 6690276 NR Description: v-SNARE AtVTI1b [Arabidopsis thaliana]
  misc_feature (1)..(220): Homolog of NCBI NO: 18396008 NR Description: v-SNARE protein AtVTI1b, putative [Arabidopsis
  misc_feature (1)..(218): Homolog of NCBI NO: 34914100 NR Description: similar to vesicle transport protein
  misc_feature (55)..(221): Homolog of NCBI NO: 26451552 NR Description: putative vesicle transport protein [Arabidopsis
  misc_feature (1)..(219): Homolog of NCBI NO: 34910406 NR Description: putative vesicle transport v-SNARE protein
  misc_feature (1)..(221): Homolog of NCBI NO: 15228600 NR Description: SNARE protein AtVTI13 [Arabidopsis thaliana]
  misc_feature (1)..(221): Homolog of NCBI NO: 6690274 NR Description: v-SNARE AtVTI1a [Arabidopsis thaliana]
  misc_feature (1)..(221): Homolog of NCBI NO: 15241780 NR Description: v-SNARE AtVTI1a (ZIG) [Arabidopsis thaliana]
MTEVFNGYERQYCDLSANLSKKCSSALALDGEQKKQKLSEIRSGLDNAEALIRKMDVEARSLPPSIRTSLLVKLREFKSDLNNFKSEVKRITSANLNAAARDELLEAGLADTKTASADQRARLMMSTDRLGRTTDRIKDSRRMMIETEELGVSVLQDLHSQRQSLLRTGDTLSGVDENVGKSKKILTGMTRRMNRNKWTIGAIITALVAAIILILYFKLTK

SEQ ID NO: 61642 - protein, 167 aa, Triticum aestivum
  peptide (1)..(167): Ceres Seq. ID no. 15226350
  misc_feature (1)..(142): Pfam Name: Vesicle transport v-SNARE protein Pfam Description: Vesicle transport v-SNARE protein
  misc_feature (1)..(167): Homolog of NCBI NO: 9758339 NR Description: v-SNARE AtVTI1a-like protein [Arabidopsis
  misc_feature (1)..(166): Homolog of NCBI NO: 27805772 NR Description: Vesicle transport v-SNARE 12 (AtVTI12) (Vesicle v-SNARE protein VTI1b) (Vesicle soluble NSF attachment protein
  misc_feature (1)..(166): Homolog of NCBI NO: 6690276 NR Description: v-SNARE AtVTI1b [Arabidopsis thaliana]
  misc_feature (1)..(166): Homolog of NCBI NO: 18396008 NR Description: v-SNARE protein AtVTI1b, putative [Arabidopsis
  misc_feature (1)..(164): Homolog of NCBI NO: 34914100 NR Description: similar to vesicle transport protein
  misc_feature (1)..(167): Homolog of NCBI NO: 26451552 NR Description: putative vesicle transport protein [Arabidopsis
  misc_feature (1)..(165): Homolog of NCBI NO: 34910406 NR Description: putative vesicle transport v-SNARE protein
  misc_feature (1)..(167): Homolog of NCBI NO: 15228600 NR Description: SNARE protein AtVTI13 [Arabidopsis thaliana]
  misc_feature (1)..(167): Homolog of NCBI NO: 6690274 NR Description: v-SNARE AtVTI1a [Arabidopsis thaliana]
  misc_feature (1)..(167): Homolog of NCBI NO: 15241780 NR Description: v-SNARE AtVTI1a (ZIG) [Arabidopsis thaliana]
MDVEARSLPPSIRTSLLVKLREFKSDLNNFKSEVKRITSANLNAAARDELLEAGLADTKTASADQRARLMMSTDRLGRTTDRIKDSRRMMIETEELGVSVLQDLHSQRQSLLRTGDTLSGVDENVGKSKKILTGMTRRMNRNKWTIGAIITALVAAIILILYFKLTK

SEQ ID NO: 61643 - DNA, 887 bp, Triticum aestivum
  misc_feature (1)..(887): Ceres Seq. ID no. 13661963
aacgaatatatcctagctactcgatcttgtcccagccaataggtagctgcttctgtctgcctagtgaacttttctcgctagctaccagggaaaagaccacctcaccggtcaccaccatggctgggctagtgctagccaagtgccttcttctgttctccctctccgccgcgctcctctctctgctcggcaccggcgcctccgccattggcctgccccagcctcatgcgccagtgaacttcaccatcggcgtgcagggcatggtctggtgcaagacctgcaggtacatcggctacaatgccaacatggacgcctccccactcaaaggcgtggaggtgtacctgcagtgccggcacggcccggggcggctgaagaaggtgcaaggggcatcggggcagggcggctactttgtcatccagtcggcgcagatggcgtccttcaccaacgacgagtgcaaggtgtacgcggagagctcgtcgtcgaccgcgtgcagcctcgtcgacgaacccgctgccggcgaggggctgccgctcaagttcgactccttcgtcaagcacggcgatggcctgcaggcgctctactccgtcggcaacttcttcttccgccccagcaaccccaacaagtgctactgacgcatccatccgtcatgtacatacttgtgggacttgaataaatgggtcaggaactcaggatgaattagttgttggagtagctggggatatgcatccggtgctgtaatgttgatttaagtttcttctattgttgcagtagttttgtaagcttcttttaattagcaaccgcatgatcgaaataactcgaatatgattagggcagtgtatgtcctgtcatgtgatgactaaccgatgtgctacaaggctctatgtataact

SEQ ID NO: 61644 - protein, 208 aa, Triticum aestivum
  peptide (1)..(208): Ceres Seq. ID no. 13661964
  misc_feature (83)..(204): Pfam Name: Pollen proteins Ole e I family Pfam Description: Pollen proteins Ole e I family
  misc_feature (70)..(204): Homolog of NCBI NO: 15226166 NR Description: proline-rich protein -related [Arabidopsis
  misc_feature (71)..(207): Homolog of NCBI NO: 11322245 NR Description: arabinogalactan protein [Daucus carota]
  misc_feature (71)..(207): Homolog of NCBI NO: 419777 NR Description: proline-rich protein - Persian tobacco
  misc_feature (41)..(202): Homolog of NCBI NO: 15226806 NR Description: proline-rich glyco protein -related [Arabidopsis
  misc_feature (71)..(207): Homolog of NCBI NO: 34910764 NR Description: P0042A10.11 [Oryza sativa (japonica
  misc_feature (45)..(207): Homolog of NCBI NO: 34910756 NR Description: P0042A10.7 [Oryza sativa (japonica
RIYPSYSILSQPIGSCFCLPSELFSLATREKTTSPVTTMAGLVLAKCLLLFSLSAALLSLLGTGASAIGLPQPHAPVNFTIGVQGMVWCKTCRYIGYNANMDASPLKGVEVYLQCRHGPGRLKKVQGASGQGGYFVIQSAQMASFTNDECKVYAESSSSTACSLVDEPAAGEGLPLKFDSFVKHGDGLQALYSVGNFFFRPSNPNKCY

SEQ ID NO: 61645 - protein, 170 aa, Triticum aestivum
  peptide (1)..(170): Ceres Seq. ID no. 13661965
  misc_feature (45)..(166): Pfam Name: Pollen proteins Ole e I family Pfam Description: Pollen proteins Ole e I family
  misc_feature (32)..(166): Homolog of NCBI NO: 15226166 NR Description: proline-rich protein -related [Arabidopsis
  misc_feature (33)..(169): Homolog of NCBI NO: 11322245 NR Description: arabinogalactan protein [Daucus carota]
  misc_feature (33)..(169): Homolog of NCBI NO: 419777 NR Description: proline-rich protein - Persian tobacco
  misc_feature (3)..(164): Homolog of NCBI NO: 15226806 NR Description: proline-rich glyco protein -related [Arabidopsis
  misc_feature (33)..(169): Homolog of NCBI NO: 34910764 NR Description: P0042A10.11 [Oryza sativa (japonica
  misc_feature (7)..(169): Homolog of NCBI NO: 34910756 NR Description: P0042A10.7 [Oryza sativa (japonica
MAGLVLAKCLLLFSLSAALLSLLGTGASAIGLPQPHAPVNFTIGVQGMVWCKTCRYIGYNANMDASPLKGVEVYLQCRHGPGRLKKVQGASGQGGYFVIQSAQMASFTNDECKVYAESSSSTACSLVDEPAAGEGLPLKFDSFVKHGDGLQALYSVGNFFFRPSNPNKCY

SEQ ID NO: 61646 - protein, 123 aa, Triticum aestivum
  peptide (1)..(123): Ceres Seq. ID no. 13661966
  misc_feature (1)..(119): Pfam Name: Pollen proteins Ole e I family Pfam Description: Pollen proteins Ole e I family
  misc_feature (1)..(119): Homolog of NCBI NO: 15226166 NR Description: proline-rich protein -related [Arabidopsis
  misc_feature (1)..(122): Homolog of NCBI NO: 11322245 NR Description: arabinogalactan protein [Daucus carota]
  misc_feature (1)..(122): Homolog of NCBI NO: 419777 NR Description: proline-rich protein - Persian tobacco
  misc_feature (1)..(117): Homolog of NCBI NO: 15226806 NR Description: proline-rich glyco protein -related [Arabidopsis
  misc_feature (1)..(122): Homolog of NCBI NO: 34910764 NR Description: P0042A10.11 [Oryza sativa (japonica
  misc_feature (1)..(122): Homolog of NCBI NO: 34910756 NR Description: P0042A10.7 [Oryza sativa (japonica
MVWCKTCRYIGYNANMDASPLKGVEVYLQCRHGPGRLKKVQGASGQGGYFVIQSAQMASFTNDECKVYAESSSSTACSLVDEPAAGEGLPLKFDSFVKHGDGLQALYSVGNFFFRPSNPNKCY

SEQ ID NO: 61647 - DNA, 886 bp, Triticum aestivum
  misc_feature (1)..(886): Ceres Seq. ID no. 13661797
ctgcttggatggatcagccgagaccgcacacaccagccacaccactccaccgaagcgaaaggggacaaaggtttgcacgtcgccaagtcctgaaccattacctagcagagcagggatcccatcgacgaggcgaggacagaggtggatcaacaatggcgtcgcttctttcgccgaacaccgtcgctgcgaccacggcgaggccgtccggcaggaggagccgccttactcccagtgtcaccgccatggcaaccaagggcccgaagcccagctccggcggcacgaaaagatcgtcgggcactaccacggtgttcccggtggggaagcccgcgggcccgccgcggccggcgacgacgaaggggtcggcgcccgtgaagctgctgacgaacgtggagaagctacggctgctgaccaaggcggagaaggcgggcctgctgtccgcggcggagcgcgccgggctgtcgctgtcggcggtcgagcgcctcgggctgctgtccaaggcggaggagctcggggtgctgtcggccgccaccgaccctggcacccccggctcgctgcagggcctcgcgctcctgctgctggccgccggccccgccgtcgtcttcctcgtccccgagcagtacccctgggaggtggcgctccaggccgtcgccgccctcgtctgcgtcgccgggggctccgccgcgttcgccgcgtccagcttcgtgtccaggctccagggctcctccggctgatctcgacgaactctgcttgcttcagcatcgaccgagtgtcaattgccgcgtttgattctagcaccaatgatcttgcgtagagttaatctacttctgtaaagatgggctgatatttatacgatgcgccattcggttgcaatactgcaggtttttgt

SEQ ID NO: 61648 - protein, 269 aa, Triticum aestivum
  peptide (1)..(269): Ceres Seq. ID no. 13661798
  misc_feature (99)..(229): Pfam Name: Aminotransferase class-III Pfam Description: Aminotransferase class-III
CLDGSAETAHTSHTTPPKRKGTKVCTSPSPEPLPSRAGIPSTRRGQRWINNGVASFAEHRRCDHGEAVRQEEPPYSQCHRHGNQGPEAQLRRHEKIVGHYHGVPGGEARGPAAAGDDEGVGAREAADERGEATAADQGGEGGPAVRGGARRAVAVGGRAPRAAVQGGGARGAVGRHRPWHPRLAAGPRAPAAGRRPRRRLPRPRAVPLGGGAPGRRRPRLRRRGLRRVRRVQLRVQAPGLLRLISTNSACFSIDRVSIAAFDSSTNDLA

SEQ ID NO: 61649 - protein, 242 aa, Triticum aestivum
  peptide (1)..(242): Ceres Seq. ID no. 13661799
  misc_feature (123)..(238): Homolog of NCBI NO: 25406370 NR Description: hypothetical protein F25A4.30 [imported] -
  misc_feature (123)..(238): Homolog of NCBI NO: 18410681 NR Description: expressed protein [Arabidopsis thaliana]
  misc_feature (123)..(240): Homolog of NCBI NO: 34912136 NR Description: OSJNBb0024F06.20 [Oryza sativa (japonica
  misc_feature (108)..(240): Homolog of NCBI NO: 17978981 NR Description: AT5g08050/F13G24_250 [Arabidopsis thaliana]
  misc_feature (108)..(240): Homolog of NCBI NO: 15241507 NR Description: expressed protein [Arabidopsis thaliana]
AWMDQPRPHTPATPLHRSERGQRFARRQVLNHYLAEQGSHRRGEDRGGSTMASLLSPNTVAATTARPSGRRSRLTPSVTAMATKGPKPSSGGTKRSSGTTTVFPVGKPAGPPRPATTKGSAPVKLLTNVEKLRLLTKAEKAGLLSAAERAGLSLSAVERLGLLSKAEELGVLSAATDPGTPGSLQGLALLLLAAGPAVVFLVPEQYPWEVALQAVAALVCVAGGSAAFAASSFVSRLQGSSG

SEQ ID NO: 61650 - protein, 240 aa, Triticum aestivum
  peptide (1)..(240): Ceres Seq. ID no. 13661800
  misc_feature (121)..(236): Homolog of NCBI NO: 25406370 NR Description: hypothetical protein F25A4.30 [imported] -
  misc_feature (121)..(236): Homolog of NCBI NO: 18410681 NR Description: expressed protein [Arabidopsis thaliana]
  misc_feature (121)..(238): Homolog of NCBI NO: 34912136 NR Description: OSJNBb0024F06.20 [Oryza sativa (japonica
  misc_feature (106)..(238): Homolog of NCBI NO: 17978981 NR Description: AT5g08050/F13G24_250 [Arabidopsis thaliana]
  misc_feature (106)..(238): Homolog of NCBI NO: 15241507 NR Description: expressed protein [Arabidopsis thaliana]
MDQPRPHTPATPLHRSERGQRFARRQVLNHYLAEQGSHRRGEDRGGSTMASLLSPNTVAATTARPSGRRSRLTPSVTAMATKGPKPSSGGTKRSSGTTTVFPVGKPAGPPRPATTKGSAPVKLLTNVEKLRLLTKAEKAGLLSAAERAGLSLSAVERLGLLSKAEELGVLSAATDPGTPGSLQGLALLLLAAGPAVVFLVPEQYPWEVALQAVAALVCVAGGSAAFAASSFVSRLQGSSG

SEQ ID NO: 61651 - DNA, 894 bp, Triticum aestivum
  misc_feature (1)..(894): Ceres Seq. ID no. 15225572
acacacacaatggttggtatggctgtggttggtcaatggactctctgtgtcgcctcgccgtcgccgagagtaaagtcggcaacttgcaattcaaactcttgtccaaccaccgttaacttacgctctgagctgtctgcatttcgtcctcagttccggctcttctctcgtgtttctccgacacgccgccgccgtctttgcgcttccagctccgccgattcgggaatcttcctccctcaccttgtcgcttctatggagcaagttgaggagacttacattatggtcaaaccagacggcatccaacgaggccttgttggagaaatcatctctcgttttgagaagaaggggtttaaactgattggacttaagatgttccaatgcccaaaagaattggctcaggaacattataaggatcttagtgctaagtctttctttcctagcctgattgagtacatcacttctggcccagttgtgtgtatggcttgggaaggtgttggtgtggttgcttcagtcaggaagctgatagggaaaactgatcctcttcaagctgaacctggtaccattagaggagatcttgctgtacaaaccggaaggaacatcgtgcatggtagtgacagtcctgaaaacggaaagcgtgagattgctctgtggttcaaagaaggcgagctgtgcgggtgggattcagctctagctaaatggctaagggagtgatccttgagaagacaaattcaattctttttccttgttactgagtgcgaatgggctttggtcctttgttttgtttttgtttttgtttttgttttggcggcgtgtacgtggacttgttgatctttctggcatctttaatcacacttgtcatgtaatgaaatgagttgaatagattcaccttttctctgc

SEQ ID NO: 61652 - protein, 235 aa, Triticum aestivum
  peptide (1)..(235): Ceres Seq. ID no. 15225573
  misc_feature (88)..(225): Pfam Name: Nucleoside diphosphate kinase Pfam Description: Nucleoside diphosphate kinase
  misc_feature (87)..(235): Homolog of NCBI NO: 20138835 NR Description: Nucleoside diphosphate kinase (NDK) (NDP kinase)
  misc_feature (87)..(235): Homolog of NCBI NO: 22297811 NR Description: nucleoside diphosphate kinase
  misc_feature (88)..(235): Homolog of NCBI NO: 9652119 NR Description: nucleoside diphosphate kinase [Lolium perenne]
  misc_feature (28)..(235): Homolog of NCBI NO: 1346673 NR Description: Nucleoside diphosphate kinase II, chloroplast
  misc_feature (7)..(235): Homolog of NCBI NO: 27807824 NR Description: nucleoside diphosphate kinase [Nicotiana tabacum]
  misc_feature (84)..(235): Homolog of NCBI NO: 11260887 NR Description: nucleoside-diphosphate kinase (EC 2.7.4.6) Ia
  misc_feature (16)..(235): Homolog of NCBI NO: 266607 NR Description: Nucleoside diphosphate kinase II, chloroplast
  misc_feature (4)..(235): Homolog of NCBI NO: 3093480 NR Description: nucleoside diphosphate kinase type 2 [Arabidopsis
  misc_feature (4)..(235): Homolog of NCBI NO: 30697820 NR Description: nucleotide diphosphate kinase Ia (emb|CAB58230.1)
  misc_feature (4)..(235): Homolog of NCBI NO: 21832064 NR Description: nucloside diphosphate kinase 2 [Brassica rapa]
THTMVGMAVVGQWTLCVASPSPRVKSATCNSNSCPTTVNLRSELSAFRPQFRLFSRVSPTRRRRLCASSSADSGIFLPHLVASMEQVEETYIMVKPDGIQRGLVGEIISRFEKKGFKLIGLKMFQCPKELAQEHYKDLSAKSFFPSLIEYITSGPVVCMAWEGVGVVASVRKLIGKTDPLQAEPGTIRGDLAVQTGRNIVHGSDSPENGKREIALWFKEGELCGWDSALAKWLRE

SEQ ID NO: 61653 - protein, 232 aa, Triticum aestivum
  peptide (1)..(232): Ceres Seq. ID no. 15225574
  misc_feature (85)..(222): Pfam Name: Nucleoside diphosphate kinase Pfam Description: Nucleoside diphosphate kinase
  misc_feature (84)..(232): Homolog of NCBI NO: 20138835 NR Description: Nucleoside diphosphate kinase (NDK) (NDP kinase)
  misc_feature (84)..(232): Homolog of NCBI NO: 22297811 NR Description: nucleoside diphosphate kinase
  misc_feature (85)..(232): Homolog of NCBI NO: 9652119 NR Description: nucleoside diphosphate kinase [Lolium perenne]
  misc_feature (25)..(232): Homolog of NCBI NO: 1346673 NR Description: Nucleoside diphosphate kinase II, chloroplast
  misc_feature (4)..(232): Homolog of NCBI NO: 27807824 NR Description: nucleoside diphosphate kinase [Nicotiana tabacum]
  misc_feature (81)..(232): Homolog of NCBI NO: 11260887 NR Description: nucleoside-diphosphate kinase (EC 2.7.4.6) Ia
  misc_feature (13)..(232): Homolog of NCBI NO: 266607 NR Description: Nucleoside diphosphate kinase II, chloroplast
  misc_feature (1)..(232): Homolog of NCBI NO: 3093480 NR Description: nucleoside diphosphate kinase type 2 [Arabidopsis
  misc_feature (1)..(232): Homolog of NCBI NO: 30697820 NR Description: nucleotide diphosphate kinase Ia (emb|CAB58230.1)
  misc_feature (1)..(232): Homolog of NCBI NO: 21832064 NR Description: nucloside diphosphate kinase 2 [Brassica rapa]
MVGMAVVGQWTLCVASPSPRVKSATCNSNSCPTTVNLRSELSAFRPQFRLFSRVSPTRRRRLCASSSADSGIFLPHLVASMEQVEETYIMVKPDGIQRGLVGEIISRFEKKGFKLIGLKMFQCPKELAQEHYKDLSAKSFFPSLIEYITSGPVVCMAWEGVGVVASVRKLIGKTDPLQAEPGTIRGDLAVQTGRNIVHGSDSPENGKREIALWFKEGELCGWDSALAKWLRE

SEQ ID NO: 61654 - protein, 229 aa, Triticum aestivum
  peptide (1)..(229): Ceres Seq. ID no. 15225575
  misc_feature (82)..(219): Pfam Name: Nucleoside diphosphate kinase Pfam Description: Nucleoside diphosphate kinase
  misc_feature (81)..(229): Homolog of NCBI NO: 20138835 NR Description: Nucleoside diphosphate kinase (NDK) (NDP kinase)
  misc_feature (81)..(229): Homolog of NCBI NO: 22297811 NR Description: nucleoside diphosphate kinase
  misc_feature (82)..(229): Homolog of NCBI NO: 9652119 NR Description: nucleoside diphosphate kinase [Lolium perenne]
  misc_feature (22)..(229): Homolog of NCBI NO: 1346673 NR Description: Nucleoside diphosphate kinase II, chloroplast
  misc_feature (1)..(229): Homolog of NCBI NO: 27807824 NR Description: nucleoside diphosphate kinase [Nicotiana tabacum]
  misc_feature (78)..(229): Homolog of NCBI NO: 11260887 NR Description: nucleoside-diphosphate kinase (EC 2.7.4.6) Ia
  misc_feature (10)..(229): Homolog of NCBI NO: 266607 NR Description: Nucleoside diphosphate kinase II, chloroplast
  misc_feature (1)..(229): Homolog of NCBI NO: 3093480 NR Description: nucleoside diphosphate kinase type 2 [Arabidopsis
  misc_feature (1)..(229): Homolog of NCBI NO: 30697820 NR Description: nucleotide diphosphate kinase Ia (emb|CAB58230.1)
  misc_feature (1)..(229): Homolog of NCBI NO: 21832064 NR Description: nucloside diphosphate kinase 2 [Brassica rapa]
MAVVGQWTLCVASPSPRVKSATCNSNSCPTTVNLRSELSAFRPQFRLFSRVSPTRRRRLCASSSADSGIFLPHLVASMEQVEETYIMVKPDGIQRGLVGEIISRFEKKGFKLIGLKMFQCPKELAQEHYKDLSAKSFFPSLIEYITSGPVVCMAWEGVGVVASVRKLIGKTDPLQAEPGTIRGDLAVQTGRNIVHGSDSPENGKREIALWFKEGELCGWDSALAKWLRE

SEQ ID NO: 61655 - DNA, 1147 bp, Triticum aestivum
  misc_feature (1)..(1147): Ceres Seq. ID no. 13661801
tcgcaccaacgccacagacagaccaacaccgcagcacgcaccacgcgccccccccccccaccctgtgatccctcgccgtggtctcgccgccgcgccgacccctccaccggcattcgattcggagcgcagctcgtccgccggcgcggagccatgggcacggttgtggatgctcccgcagttgtgactgagaaggaggtggttgctgagaacatgttgggtgacaagaaagtcacagtagtatttgttcttggcggtcctggaagtggaaagggcacacagtgttccaacattgttgaacactttggattcacccatcttagtgctggagatcttttgcgcgcggagattaaatctggctctgagaatggaactatgattgagaacatgataaaggagggaaagattgttccgtcggaggtgactataaagctcttgcagcaagccatgataaagaatgagaatgataagttcctcatcgacgggtttccaaggaatgaagagaatcgtgctgcgttcgagaatgttacaaaaatttcgcctgcatttgtgctattcttcaattgttccgaggaagagatggaaaggcgtcttttgggacgcaatgagggtagagttgatgacaacatcgagactatcaggaagagattcaaagtttttgttgaatccagtttgcctgtgattgagtactatgacgcgaaggacaaggttaagaagatcgatgctgcaaaaccaattcctgaggtgtttgaagatgtcaaagccatttttgccccatatgccaaggctacatagaacagtataaaggaccacaaaggtgataaatggaatgatttcatacaaggttttgctcaagtgtgactacatatctgtgattacaaacccttaatatagatcagacttatcagtagacaatttgatttgttgccagcaataagttagatctggtttgtggtgttcctgctagaagtttttatttaccacccattgttggtgtatcccatgtagtatacctgtaccattgtgtaatttacggtaaggacggatcagaccttgtgcccatgagctatccggttgtattacagaaaattgaacttatcacatgttcactcatatttacattctttatacactgttggttcttctgttg

SEQ ID NO: 61656 - protein, 263 aa, Triticum aestivum
  peptide (1)..(263): Ceres Seq. ID no. 13661802
  misc_feature (82)..(235): Pfam Name: Adenylate kinase Pfam Description: Adenylate kinase
  misc_feature (76)..(256): Homolog of NCBI NO: 31230627 NR Description: ENSANGP00000014384 [Anopheles gambiae]
  misc_feature (79)..(261): Homolog of NCBI NO: 3913952 NR Description: ADENYLATE KINASE (ATP-AMP TRANSPHOSPHORYLASE)
  misc_feature (63)..(219): Homolog of NCBI NO: 5305496 NR Description: adenylate kinase [Ceratopteris richardii]
  misc_feature (75)..(257): Homolog of NCBI NO: 34897826 NR Description: putative UMP/CMP kinase [Oryza sativa (japonica
  misc_feature (75)..(257): Homolog of NCBI NO: 18411518 NR Description: URIDYLATE KINASE-related protein [Arabidopsis
  misc_feature (75)..(257): Homolog of NCBI NO: 11260827 NR Description: URIDYLATE KINASE-like protein - Arabidopsis
  misc_feature (66)..(261): Homolog of NCBI NO: 30690246 NR Description: predicted protein [Arabidopsis thaliana]
  misc_feature (66)..(261): Homolog of NCBI NO: 30690243 NR Description: predicted protein [Arabidopsis thaliana]
  misc_feature (51)..(261): Homolog of NCBI NO: 6683813 NR Description: UMP/CMP kinase b [Oryza sativa]
  misc_feature (51)..(261): Homolog of NCBI NO: 6683811 NR Description: UMP/CMP kinase a [Oryza sativa]
SHQRHRQTNTAARTTRPPPPPCDPSPWSRRRADPSTGIRFGAQLVRRRGAMGTVVDAPAVVTEKEVVAENMLGDKKVTVVFVLGGPGSGKGTQCSNIVEHFGFTHLSAGDLLRAEIKSGSENGTMIENMIKEGKIVPSEVTIKLLQQAMIKNENDKFLIDGFPRNEENRAAFENVTKISPAFVLFFNCSEEEMERRLLGRNEGRVDDNIETIRKRFKVFVESSLPVIEYYDAKDKVKKIDAAKPIPEVFEDVKAIFAPYAKAT

SEQ ID NO: 61657 - protein, 213 aa, Triticum aestivum
  peptide (1)..(213): Ceres Seq. ID no. 13661803
  misc_feature (32)..(185): Pfam Name: Adenylate kinase Pfam Description: Adenylate kinase
  misc_feature (26)..(206): Homolog of NCBI NO: 31230627 NR Description: ENSANGP00000014384 [Anopheles gambiae]
  misc_feature (29)..(211): Homolog of NCBI NO: 3913952 NR Description: ADENYLATE KINASE (ATP-AMP TRANSPHOSPHORYLASE)
  misc_feature (13)..(169): Homolog of NCBI NO: 5305496 NR Description: adenylate kinase [Ceratopteris richardii]
  misc_feature (25)..(207): Homolog of NCBI NO: 34897826 NR Description: putative UMP/CMP kinase [Oryza sativa (japonica
  misc_feature (25)..(207): Homolog of NCBI NO: 18411518 NR Description: URIDYLATE KINASE-related protein [Arabidopsis
  misc_feature (25)..(207): Homolog of NCBI NO: 11260827 NR Description: URIDYLATE KINASE-like protein - Arabidopsis
  misc_feature (16)..(211): Homolog of NCBI NO: 30690246 NR Description: predicted protein [Arabidopsis thaliana]
  misc_feature (16)..(211): Homolog of NCBI NO: 30690243 NR Description: predicted protein [Arabidopsis thaliana]
  misc_feature (1)..(211): Homolog of NCBI NO: 6683813 NR Description: UMP/CMP kinase b [Oryza sativa]
  misc_feature (1)..(211): Homolog of NCBI NO: 6683811 NR Description: UMP/CMP kinase a [Oryza sativa]
MGTVVDAPAVVTEKEVVAENMLGDKKVTVVFVLGGPGSGKGTQCSNIVEHFGFTHLSAGDLLRAEIKSGSENGTMIENMIKEGKIVPSEVTIKLLQQAMIKNENDKFLIDGFPRNEENRAAFENVTKISPAFVLFFNCSEEEMERRLLGRNEGRVDDNIETIRKRFKVFVESSLPVIEYYDAKDKVKKIDAAKPIPEVFEDVKAIFAPYAKAT

SEQ ID NO: 61658 - protein, 193 aa, Triticum aestivum
  peptide (1)..(193): Ceres Seq. ID no. 13661804
  misc_feature (12)..(165): Pfam Name: Adenylate kinase Pfam Description: Adenylate kinase
  misc_feature (6)..(186): Homolog of NCBI NO: 31230627 NR Description: ENSANGP00000014384 [Anopheles gambiae]
  misc_feature (9)..(191): Homolog of NCBI NO: 3913952 NR Description: ADENYLATE KINASE (ATP-AMP TRANSPHOSPHORYLASE)
  misc_feature (1)..(149): Homolog of NCBI NO: 5305496 NR Description: adenylate kinase [Ceratopteris richardii]
  misc_feature (5)..(187): Homolog of NCBI NO: 34897826 NR Description: putative UMP/CMP kinase [Oryza sativa (japonica
  misc_feature (5)..(187): Homolog of NCBI NO: 18411518 NR Description: URIDYLATE KINASE-related protein [Arabidopsis
  misc_feature (5)..(187): Homolog of NCBI NO: 11260827 NR Description: URIDYLATE KINASE-like protein - Arabidopsis
  misc_feature (1)..(191): Homolog of NCBI NO: 30690246 NR Description: predicted protein [Arabidopsis thaliana]
  misc_feature (1)..(191): Homolog of NCBI NO: 30690243 NR Description: predicted protein [Arabidopsis thaliana]
  misc_feature (1)..(191): Homolog of NCBI NO: 6683813 NR Description: UMP/CMP kinase b [Oryza sativa]
  misc_feature (1)..(191): Homolog of NCBI NO: 6683811 NR Description: UMP/CMP kinase a [Oryza sativa]
MLGDKKVTVVFVLGGPGSGKGTQCSNIVEHFGFTHLSAGDLLRAEIKSGSENGTMIENMIKEGKIVPSEVTIKLLQQAMIKNENDKFLIDGFPRNEENRAAFENVTKISPAFVLFFNCSEEEMERRLLGRNEGRVDDNIETIRKRFKVFVESSLPVIEYYDAKDKVKKIDAAKPIPEVFEDVKAIFAPYAKAT

SEQ ID NO: 61659 - DNA, 748 bp, Triticum aestivum
  misc_feature (1)..(748): Ceres Seq. ID no. 14301683
acatcgattccttcctgccactccttcctcgcatgccccctgacttcctgcaccgagactgctaagctagctctgtaatctcgtcggcctctttctctgccccctcggccggcttgccacccgataggtcctgatgtcgggcaccgtctgctccatgtgcggcgacgtcggtttccaggacaagctcttcggctgtgcccgctgccgctgccgcttccagcactcctattgcacgaactactacggcgacgcggccccggccgacgcgggcgccggcgtctgcgactggtgcctcagcgacgaccccctcgtgaagaacaagcgcccttcggcgccgccggccatgcagcaccgcggtcacgcgactgggatgggctgcggcaaagtcaaggtgaccggcggcggcgagcaggagggcggccggagagtggccaaggcggccgtccgcaggtacaagctcctcaaagacgtcctgtgctagctagctggtgcatgcatggtcctgggtcaccgtactcgtttccttagatcgggacctcgtcatcatgtgtactaaaaaacgatgctgtttaattaggtagtcgatagtcgttgtacctagctagctggtggggttctgcttccatatcgatccttgcgtgcaaatgtctgcatgtcacaatgagatctacttccgcatgtaaatatgtactgctactctttatctctgtcatcaactgcgtgctgtcgtgtgtggtcaggacttttg

SEQ ID NO: 61660 - protein, 115 aa, Triticum aestivum
  peptide (1)..(115): Ceres Seq. ID no. 14301684
  misc_feature (2)..(58): Homolog of NCBI NO: 21740708 NR Description: OSJNBa0086B14.1 [Oryza sativa (japonica
  misc_feature (8)..(115): Homolog of NCBI NO: 21554245 NR Description: unknown [Arabidopsis thaliana]
  misc_feature (5)..(115): Homolog of NCBI NO: 15232353 NR Description: expressed protein [Arabidopsis thaliana]
  misc_feature (8)..(62): Homolog of NCBI NO: 21553800 NR Description: unknown [Arabidopsis thaliana]
  misc_feature (5)..(62): Homolog of NCBI NO: 18378917 NR Description: expressed protein [Arabidopsis thaliana]
  misc_feature (2)..(107): Homolog of NCBI NO: 21742342 NR Description: OSJNBb0034G17.21 [Oryza sativa (japonica
  misc_feature (2)..(115): Homolog of NCBI NO: 38345466 NR Description: OSJNBa0010H02.4 [Oryza sativa (japonica
MSGTVCSMCGDVGFQDKLFGCARCRCRFQHSYCTNYYGDAAPADAGAGVCDWCLSDDPLVKNKRPSAPPAMQHRGHATGMGCGKVKVTGGGEQEGGRRVAKAAVRRYKLLKDVLC

SEQ ID NO: 61661 - protein, 108 aa, Triticum aestivum
  peptide (1)..(108): Ceres Seq. ID no. 14301685
  misc_feature (1)..(51): Homolog of NCBI NO: 21740708 NR Description: OSJNBa0086B14.1 [Oryza sativa (japonica
  misc_feature (1)..(108): Homolog of NCBI NO: 21554245 NR Description: unknown [Arabidopsis thaliana]
  misc_feature (1)..(108): Homolog of NCBI NO: 15232353 NR Description: expressed protein [Arabidopsis thaliana]
  misc_feature (1)..(55): Homolog of NCBI NO: 21553800 NR Description: unknown [Arabidopsis thaliana]
  misc_feature (1)..(55): Homolog of NCBI NO: 18378917 NR Description: expressed protein [Arabidopsis thaliana]
  misc_feature (1)..(100): Homolog of NCBI NO: 21742342 NR Description: OSJNBb0034G17.21 [Oryza sativa (japonica
  misc_feature (1)..(108): Homolog of NCBI NO: 38345466 NR Description: OSJNBa0010H02.4 [Oryza sativa (japonica
MCGDVGFQDKLFGCARCRCRFQHSYCTNYYGDAAPADAGAGVCDWCLSDDPLVKNKRPSAPPAMQHRGHATGMGCGKVKVTGGGEQEGGRRVAKAAVRRYKLLKDVLC

SEQ ID NO: 61662 - DNA, 681 bp, Triticum aestivum
  misc_feature (1)..(681): Ceres Seq. ID no. 15227036
atcgaaaaagattaggtcgagtgtgctctcacagacacggataacgcaaaacctctctgtcttcccaaatccaccacctcacaacgacgactacgatggctctttctactggaatcttctccaccttcctctgcgtcaaaacggtgacgttacgcagctcaccgttcctccgtgtttcccctcctcatccggctaacctgcggatggtgcgagccgtgacctccgcgacggcggcgtcctccgagccgtcagccaccaagactcgggagccacgtggcatcatgaagcctcgcccagtgtcccccgagatgcaggacgtggtgggtgagccggtgattcctcgcacgcaggctcttaagcgcatttgggcctacatcaaggaacacgaccttcaggatccacaagacaagaaggttataatctgcgacgagaagctgaagaagatattcgcaggcaaagaccgtgtcgggttcttggagattgcaaagctcatcggtcctcacttcctctgaatgagaagacaatcgatcactagcgtatgtttacatattagtaacgttaggtttaagaagttttatgcaacaaagtagtagtcaagccctttgggacgatatcttttgcgtttgttggttatgtgtctctttgcttcagattgcagtttaaaatttgctatgttttgtc

SEQ ID NO: 61663 - protein, 138 aa, Triticum aestivum
  peptide (1)..(138): Ceres Seq. ID no. 15227037
  misc_feature (62)..(138): Pfam Name: SWIB/MDM2 domain Pfam Description: SWIB/MDM2 domain
  misc_feature (36)..(137): Homolog of NCBI NO: 33667910 NR Description: SWIb domain-containing protein [Solanum chacoense]
  misc_feature (28)..(138): Homolog of NCBI NO: 21593643 NR Description: unknown [Arabidopsis thaliana]
  misc_feature (28)..(138): Homolog of NCBI NO: 18396594 NR Description: expressed protein [Arabidopsis thaliana]
  misc_feature (9)..(138): Homolog of NCBI NO: 14488372 NR Description: hypothetical protein [Oryza sativa (japonica
  misc_feature (1)..(138): Homolog of NCBI NO: 21593713 NR Description: unknown [Arabidopsis thaliana]
  misc_feature (1)..(138): Homolog of NCBI NO: 19698859 NR Description: unknown protein [Arabidopsis thaliana]
  misc_feature (1)..(138): Homolog of NCBI NO: 18397658 NR Description: expressed protein [Arabidopsis thaliana]
  misc_feature (1)..(138): Homolog of NCBI NO: 21553903 NR Description: unknown [Arabidopsis thaliana]
  misc_feature (1)..(138): Homolog of NCBI NO: 15235320 NR Description: expressed protein [Arabidopsis thaliana]
  misc_feature (1)..(138): Homolog of NCBI NO: 14423526 NR Description: putative protein [Arabidopsis thaliana]
MALSTGIFSTFLCVKTVTLRSSPFLRVSPPHPANLRMVRAVTSATAASSEPSATKTREPRGIMKPRPVSPEMQDVVGEPVIPRTQALKRIWAYIKEHDLQDPQDKKVIICDEKLKKIFAGKDRVGFLEIAKLIGPHFL

SEQ ID NO: 61664 - protein, 102 aa, Triticum aestivum
  peptide (1)..(102): Ceres Seq. ID no. 15227038
  misc_feature (26)..(102): Pfam Name: SWIB/MDM2 domain Pfam Description: SWIB/MDM2 domain
  misc_feature (1)..(101): Homolog of NCBI NO: 33667910 NR Description: SWIb domain-containing protein [Solanum chacoense]
  misc_feature (1)..(102): Homolog of NCBI NO: 21593643 NR Description: unknown [Arabidopsis thaliana]
  misc_feature (1)..(102): Homolog of NCBI NO: 18396594 NR Description: expressed protein [Arabidopsis thaliana]
  misc_feature (1)..(102): Homolog of NCBI NO: 14488372 NR Description: hypothetical protein [Oryza sativa (japonica
  misc_feature (1)..(102): Homolog of NCBI NO: 21593713 NR Description: unknown [Arabidopsis thaliana]
  misc_feature (1)..(102): Homolog of NCBI NO: 19698859 NR Description: unknown protein [Arabidopsis thaliana]
  misc_feature (1)..(102): Homolog of NCBI NO: 18397658 NR Description: expressed protein [Arabidopsis thaliana]
  misc_feature (1)..(102): Homolog of NCBI NO: 21553903 NR Description: unknown [Arabidopsis thaliana]
  misc_feature (1)..(102): Homolog of NCBI NO: 15235320 NR Description: expressed protein [Arabidopsis thaliana]
  misc_feature (1)..(102): Homolog of NCBI NO: 14423526 NR Description: putative protein [Arabidopsis thaliana]
MVRAVTSATAASSEPSATKTREPRGIMKPRPVSPEMQDVVGEPVIPRTQALKRIWAYIKEHDLQDPQDKKVIICDEKLKKIFAGKDRVGFLEIAKLIGPHFL

SEQ ID NO: 61665 - protein, 76 aa, Triticum aestivum
  peptide (1)..(76): Ceres Seq. ID no. 15227039
  misc_feature (1)..(76): Pfam Name: SWIB/MDM2 domain Pfam Description: SWIB/MDM2 domain
  misc_feature (1)..(75): Homolog of NCBI NO: 33667910 NR Description: SWIb domain-containing protein [Solanum chacoense]
  misc_feature (1)..(76): Homolog of NCBI NO: 21593643 NR Description: unknown [Arabidopsis thaliana]
  misc_feature (1)..(76): Homolog of NCBI NO: 18396594 NR Description: expressed protein [Arabidopsis thaliana]
  misc_feature (1)..(76): Homolog of NCBI NO: 14488372 NR Description: hypothetical protein [Oryza sativa (japonica
  misc_feature (1)..(76): Homolog of NCBI NO: 21593713 NR Description: unknown [Arabidopsis thaliana]
  misc_feature (1)..(76): Homolog of NCBI NO: 19698859 NR Description: unknown protein [Arabidopsis thaliana]
  misc_feature (1)..(76): Homolog of NCBI NO: 18397658 NR Description: expressed protein [Arabidopsis thaliana]
  misc_feature (1)..(76): Homolog of NCBI NO: 21553903 NR Description: unknown [Arabidopsis thaliana]
  misc_feature (1)..(76): Homolog of NCBI NO: 15235320 NR Description: expressed protein [Arabidopsis thaliana]
  misc_feature (1)..(76): Homolog of NCBI NO: 14423526 NR Description: putative protein [Arabidopsis thaliana]
MKPRPVSPEMQDVVGEPVIPRTQALKRIWAYIKEHDLQDPQDKKVIICDEKLKKIFAGKDRVGFLEIAKLIGPHFL

SEQ ID NO: 61666 - DNA, 850 bp, Triticum aestivum
  misc_feature (1)..(850): Ceres Seq. ID no. 13661411
aaaaacccctctccccaccatccagtctctctccaaatctcgggacagaaaggccgccgtaccgaattagagattgacagcggcggggcgggagccagcgagctcggcgcgaacccggccccggcgagatgctcggcaagcggcagaggagcatgctgatgcgccggacgaccagcctggcgtccatgccgtcggtgcccaagcaggtgcgccagggcagcggcggcggcggcggcgacaaggacaaaacggcgcgcgcgcggccgtcctcctccgtgtcggccggcgcggtggggacgggcggcggcggctacccctctcccgggagggacgccttcgccgggctgatgatcacggcggcgttcctgtcggcctgcggcttctgcgccaagcccctcggccccggcgaggacacctacatctacaggggcgaggtggcattctgcagccaggagtgcagggagcatcggatcaagaaagacgagctcatggaacagaactgcaccatcacatccatccgggaggccccgtcggaccagtccggcagcggcggcggctcgggcggcgccggggacgccgtcgccgccgcatagccgggcggccattagcttactctattatactagctgctagtgatgtgccacatatatttggcacatgtccgccatgtttaaaccgcccgtccgtgtatacagatcgaactgggtagccggaagttgttgttgtgggtggtgatgccccagtagtggccggtgactgaggatgccatgtgacacatggaacatggtggtttcctctcctgccccagtggagaaccgaacctggactgcaatgcaacatcaaattgcgt

SEQ ID NO: 61667 - protein, 154 aa, Triticum aestivum
  peptide (1)..(154): Ceres Seq. ID no. 13661412
  misc_feature (79)..(122): Pfam Name: Protein of unknown function (DUF581) Pfam Description: Protein of unknown function (DUF581)
  misc_feature (79)..(131): Homolog of NCBI NO: 21594214 NR Description: unknown [Arabidopsis thaliana]
  misc_feature (79)..(144): Homolog of NCBI NO: 18406598 NR Description: senescence-associated protein -related
  misc_feature (79)..(144): Homolog of NCBI NO: 18414940 NR Description: senescence-associated protein -related
  misc_feature (79)..(144): Homolog of NCBI NO: 7485163 NR Description: hypothetical protein - Arabidopsis thaliana
  misc_feature (1)..(151): Homolog of NCBI NO: 21593931 NR Description: unknown [Arabidopsis thaliana]
  misc_feature (1)..(151): Homolog of NCBI NO: 18411783 NR Description: senescence-associated protein -related
  misc_feature (79)..(133): Homolog of NCBI NO: 15238001 NR Description: senescence-associated protein -related
  misc_feature (1)..(129): Homolog of NCBI NO: 30692533 NR Description: senescence-associated protein -related
  misc_feature (31)..(154): Homolog of NCBI NO: 37572957 NR Description: unknown protein [Oryza sativa (japonica
  misc_feature (32)..(123): Homolog of NCBI NO: 38344280 NR Description: OSJNBa0013K16.12 [Oryza sativa (japonica
MLGKRQRSMLMRRTTSLASMPSVPKQVRQGSGGGGGDKDKTARARPSSSVSAGAVGTGGGGYPSPGRDAFAGLMITAAFLSACGFCAKPLGPGEDTYIYRGEVAFCSQECREHRIKKDELMEQNCTITSIREAPSDQSGSGGGSGGAGDAVAAA

SEQ ID NO: 61668 - protein, 146 aa, Triticum aestivum
  peptide (1)..(146): Ceres Seq. ID no. 13661413
  misc_feature (71)..(114): Pfam Name: Protein of unknown function (DUF581) Pfam Description: Protein of unknown function (DUF581)
  misc_feature (71)..(123): Homolog of NCBI NO: 21594214 NR Description: unknown [Arabidopsis thaliana]
  misc_feature (71)..(136): Homolog of NCBI NO: 18406598 NR Description: senescence-associated protein -related
  misc_feature (71)..(136): Homolog of NCBI NO: 18414940 NR Description: senescence-associated protein -related
  misc_feature (71)..(136): Homolog of NCBI NO: 7485163 NR Description: hypothetical protein - Arabidopsis thaliana
  misc_feature (1)..(143): Homolog of NCBI NO: 21593931 NR Description: unknown [Arabidopsis thaliana]
  misc_feature (1)..(143): Homolog of NCBI NO: 18411783 NR Description: senescence-associated protein -related
  misc_feature (71)..(125): Homolog of NCBI NO: 15238001 NR Description: senescence-associated protein -related
  misc_feature (1)..(121): Homolog of NCBI NO: 30692533 NR Description: senescence-associated protein -related
  misc_feature (23)..(146): Homolog of NCBI NO: 37572957 NR Description: unknown protein [Oryza sativa (japonica
  misc_feature (24)..(115): Homolog of NCBI NO: 38344280 NR Description: OSJNBa0013K16.12 [Oryza sativa (japonica
MLMRRTTSLASMPSVPKQVRQGSGGGGGDKDKTARARPSSSVSAGAVGTGGGGYPSPGRDAFAGLMITAAFLSACGFCAKPLGPGEDTYIYRGEVAFCSQECREHRIKKDELMEQNCTITSIREAPSDQSGSGGGSGGAGDAVAAA

SEQ ID NO: 61669 - protein, 144 aa, Triticum aestivum
  peptide (1)..(144): Ceres Seq. ID no. 13661414
  misc_feature (69)..(112): Pfam Name: Protein of unknown function (DUF581) Pfam Description: Protein of unknown function (DUF581)
  misc_feature (69)..(121): Homolog of NCBI NO: 21594214 NR Description: unknown [Arabidopsis thaliana]
  misc_feature (69)..(134): Homolog of NCBI NO: 18406598 NR Description: senescence-associated protein -related
  misc_feature (69)..(134): Homolog of NCBI NO: 18414940 NR Description: senescence-associated protein -related
  misc_feature (69)..(134): Homolog of NCBI NO: 7485163 NR Description: hypothetical protein - Arabidopsis thaliana
  misc_feature (1)..(141): Homolog of NCBI NO: 21593931 NR Description: unknown [Arabidopsis thaliana]
  misc_feature (1)..(141): Homolog of NCBI NO: 18411783 NR Description: senescence-associated protein -related
  misc_feature (69)..(123): Homolog of NCBI NO: 15238001 NR Description: senescence-associated protein -related
  misc_feature (1)..(119): Homolog of NCBI NO: 30692533 NR Description: senescence-associated protein -related
  misc_feature (21)..(144): Homolog of NCBI NO: 37572957 NR Description: unknown protein [Oryza sativa (japonica
  misc_feature (22)..(113): Homolog of NCBI NO: 38344280 NR Description: OSJNBa0013K16.12 [Oryza sativa (japonica
MRRTTSLASMPSVPKQVRQGSGGGGGDKDKTARARPSSSVSAGAVGTGGGGYPSPGRDAFAGLMITAAFLSACGFCAKPLGPGEDTYIYRGEVAFCSQECREHRIKKDELMEQNCTITSIREAPSDQSGSGGGSGGAGDAVAAA

SEQ ID NO: 61670 - DNA, 420 bp, Triticum aestivum
  misc_feature (1)..(420): Ceres Seq. ID no. 13664306
atttttctccaagagaaacgtaaatttgcagttcctttgtcactagttttcgatgctgtagaattgaagagtgagagagagagagatagatcgttgaagacgcagcggtgatcgaaacagaggagagatctggaaatggaaggtggaggatccaacgttagatctagctactacaacgtcctcggtattcgcaaagacgcctctgtttccgatgtccgggctgcttaccgtaagctcgccatgaaatggcatccggatagatacgcgaggactcctgacgtcgccggagaagccaaacgtcgatttcagcaaatccaagaagcctattctgttctgaatgacgagaataagcgctcgatgtatgacgctggactatacgatccccatgaagatgacgacgacgacttctgcgacttcatg

SEQ ID NO: 61671 - protein, 95 aa, Triticum aestivum
  peptide (1)..(95): Ceres Seq. ID no. 13664307
  misc_feature (11)..(80): Pfam Name: DnaJ domain Pfam Description: DnaJ domain
  misc_feature (2)..(89): Homolog of NCBI NO: 25404111 NR Description: probable DnaJ protein [imported] - Arabidopsis
  misc_feature (2)..(94): Homolog of NCBI NO: 18405757 NR Description: DnaJ protein family [Arabidopsis thaliana]
  misc_feature (2)..(94): Homolog of NCBI NO: 21554587 NR Description: DnaJ protein, putative [Arabidopsis thaliana]
MEGGGSNVRSSYYNVLGIRKDASVSDVRAAYRKLAMKWHPDRYARTPDVAGEAKRRFQQIQEAYSVLNDENKRSMYDAGLYDPHEDDDDDFCDFM

SEQ ID NO: 61672 - protein, 60 aa, Triticum aestivum
  peptide (1)..(60): Ceres Seq. ID no. 13664308
  misc_feature (1)..(54): Homolog of NCBI NO: 25404111 NR Description: probable DnaJ protein [imported] - Arabidopsis
  misc_feature (1)..(59): Homolog of NCBI NO: 18405757 NR Description: DnaJ protein family [Arabidopsis thaliana]
  misc_feature (1)..(59): Homolog of NCBI NO: 21554587 NR Description: DnaJ protein, putative [Arabidopsis thaliana]
MKWHPDRYARTPDVAGEAKRRFQQIQEAYSVLNDENKRSMYDAGLYDPHEDDDDDFCDFM

SEQ ID NO: 61673 - DNA, 1010 bp, Triticum aestivum
  misc_feature (1)..(1010): Ceres Seq. ID no. 13661419
agaacatcctaatcaaaaagttatgctgtaatctatggtgcatcacaatcaatcctactcgttgttttattgataacttgcagcaaaaatgctgggattggaggaagcccctccggcgcatgcccgcacagcagagaaaacctgcgacccgtccggcatgacctttgctaccggtggtgcatgcgtgttggacagtacatcgcacgaggtccctgccctcgccaagcagatttacactttcaagaagatggtcaaggacgggaccatcacggagaatcaactgagtcgctctgtagcgctcgtggcctactccggcaacgactatgcaggcaccggcgtcattgggctaggtagccccaacgatattaatgcttatattggaaaggtgacaaaagagattgcagctaatgtggatcaattgttgaagcttggggtgacaaaggttcttgtcaataacttgcaccctatcggttgcacgccatcacacacccgaaccaacaactacaccacgtgtgatatttttagaaacttgggtgcatctatccacaacgataatctgaaacaagttatgacatcaaagaagaatgtctacatcattgacgtgtacaccgcattcgctaatattgtggatcatgcggcaggtaaaggctcagagttgtccaaacaattcaagcgcaaactatcgccgtgttgcgagagtttgaattcgaagggttactgcggacagcaaaacgagtcatccggggagcttctgtacactgtgtgtgacaagtcaagtaaatttttctattgggacgatatgcacccgacccatgcaggatgggaggttgtgataaaacaattggaaaagcccttgagagagtttgtaaatcaagcctaggtagctggttttatatatctgtgtagagctttgcatccatgatgacaaccttctgatttatttcatagtttcaagtatttggaagacgggattttcccgattccatgatgaatattatattgtatttgct

SEQ ID NO: 61674 - protein, 263 aa, Triticum aestivum
  peptide (1)..(263): Ceres Seq. ID no. 13661420
  misc_feature (1)..(252): Pfam Name: GDSL-like Lipase/Acylhydrolase Pfam Description: GDSL-like Lipase/Acylhydrolase
  misc_feature (22)..(252): Homolog of NCBI NO: 15223959 NR Description: GDSL-motif lipase/hydrolase protein [Arabidopsis
  misc_feature (2)..(260): Homolog of NCBI NO: 18266041 NR Description: anther-specific proline-rich protein [Brassica
  misc_feature (23)..(252): Homolog of NCBI NO: 20260298 NR Description: unknown protein [Arabidopsis thaliana]
  misc_feature (1)..(262): Homolog of NCBI NO: 15242810 NR Description: GDSL-motif lipase/hydrolase protein [Arabidopsis
  misc_feature (23)..(257): Homolog of NCBI NO: 15232799 NR Description: GDSL-motif lipase/hydrolase protein [Arabidopsis
  misc_feature (23)..(257): Homolog of NCBI NO: 28393114 NR Description: putative lipase acylhydrolase [Arabidopsis
  misc_feature (1)..(257): Homolog of NCBI NO: 6143883 NR Description: unknown protein [Arabidopsis thaliana]
  misc_feature (1)..(256): Homolog of NCBI NO: 15242811 NR Description: GDSL-motif lipase/hydrolase protein [Arabidopsis
  misc_feature (1)..(260): Homolog of NCBI NO: 32488918 NR Description: OSJNBb0059K02.9 [Oryza sativa (japonica
  misc_feature (1)..(260): Homolog of NCBI NO: 10241432 NR Description: putative lipase/acylhydrolase
MLGLEEAPPAHARTAEKTCDPSGMTFATGGACVLDSTSHEVPALAKQIYTFKKMVKDGTITENQLSRSVALVAYSGNDYAGTGVIGLGSPNDINAYIGKVTKEIAANVDQLLKLGVTKVLVNNLHPIGCTPSHTRTNNYTTCDIFRNLGASIHNDNLKQVMTSKKNVYIIDVYTAFANIVDHAAGKGSELSKQFKRKLSPCCESLNSKGYCGQQNESSGELLYTVCDKSSKFFYWDDMHPTHAGWEVVIKQLEKPLREFVNQA

SEQ ID NO: 61675 - protein, 240 aa, Triticum aestivum
  peptide (1)..(240): Ceres Seq. ID no. 13661421
  misc_feature (1)..(229): Pfam Name: GDSL-like Lipase/Acylhydrolase Pfam Description: GDSL-like Lipase/Acylhydrolase
  misc_feature (1)..(229): Homolog of NCBI NO: 15223959 NR Description: GDSL-motif lipase/hydrolase protein [Arabidopsis
  misc_feature (1)..(237): Homolog of NCBI NO: 18266041 NR Description: anther-specific proline-rich protein [Brassica
  misc_feature (1)..(229): Homolog of NCBI NO: 20260298 NR Description: unknown protein [Arabidopsis thaliana]
  misc_feature (1)..(239): Homolog of NCBI NO: 15242810 NR Description: GDSL-motif lipase/hydrolase protein [Arabidopsis
  misc_feature (1)..(234): Homolog of NCBI NO: 15232799 NR Description: GDSL-motif lipase/hydrolase protein [Arabidopsis
  misc_feature (1)..(234): Homolog of NCBI NO: 28393114 NR Description: putative lipase acylhydrolase [Arabidopsis
  misc_feature (1)..(234): Homolog of NCBI NO: 6143883 NR Description: unknown protein [Arabidopsis thaliana]
  misc_feature (1)..(233): Homolog of NCBI NO: 15242811 NR Description: GDSL-motif lipase/hydrolase protein [Arabidopsis
  misc_feature (1)..(237): Homolog of NCBI NO: 32488918 NR Description: OSJNBb0059K02.9 [Oryza sativa (japonica
  misc_feature (1)..(237): Homolog of NCBI NO: 10241432 NR Description: putative lipase/acylhydrolase
MTFATGGACVLDSTSHEVPALAKQIYTFKKMVKDGTITENQLSRSVALVAYSGNDYAGTGVIGLGSPNDINAYIGKVTKEIAANVDQLLKLGVTKVLVNNLHPIGCTPSHTRTNNYTTCDIFRNLGASIHNDNLKQVMTSKKNVYIIDVYTAFANIVDHAAGKGSELSKQFKRKLSPCCESLNSKGYCGQQNESSGELLYTVCDKSSKFFYWDDMHPTHAGWEVVIKQLEKPLREFVNQA

SEQ ID NO: 61676 - protein, 210 aa, Triticum aestivum
  peptide (1)..(210): Ceres Seq. ID no. 13661422
  misc_feature (1)..(199): Pfam Name: GDSL-like Lipase/Acylhydrolase Pfam Description: GDSL-like Lipase/Acylhydrolase
  misc_feature (1)..(199): Homolog of NCBI NO: 15223959 NR Description: GDSL-motif lipase/hydrolase protein [Arabidopsis
  misc_feature (1)..(207): Homolog of NCBI NO: 18266041 NR Description: anther-specific proline-rich protein [Brassica
  misc_feature (1)..(199): Homolog of NCBI NO: 20260298 NR Description: unknown protein [Arabidopsis thaliana]
  misc_feature (1)..(209): Homolog of NCBI NO: 15242810 NR Description: GDSL-motif lipase/hydrolase protein [Arabidopsis
  misc_feature (1)..(204): Homolog of NCBI NO: 15232799 NR Description: GDSL-motif lipase/hydrolase protein [Arabidopsis
  misc_feature (1)..(204): Homolog of NCBI NO: 28393114 NR Description: putative lipase acylhydrolase [Arabidopsis
  misc_feature (1)..(204): Homolog of NCBI NO: 6143883 NR Description: unknown protein [Arabidopsis thaliana]
  misc_feature (1)..(203): Homolog of NCBI NO: 15242811 NR Description: GDSL-motif lipase/hydrolase protein [Arabidopsis
  misc_feature (1)..(207): Homolog of NCBI NO: 32488918 NR Description: OSJNBb0059K02.9 [Oryza sativa (japonica
  misc_feature (1)..(207): Homolog of NCBI NO: 10241432 NR Description: putative lipase/acylhydrolase
MVKDGTITENQLSRSVALVAYSGNDYAGTGVIGLGSPNDINAYIGKVTKEIAANVDQLLKLGVTKVLVNNLHPIGCTPSHTRTNNYTTCDIFRNLGASIHNDNLKQVMTSKKNVYIIDVYTAFANIVDHAAGKGSELSKQFKRKLSPCCESLNSKGYCGQQNESSGELLYTVCDKSSKFFYWDDMHPTHAGWEVVIKQLEKPLREFVNQA

SEQ ID NO: 61677 - DNA, 1262 bp, Triticum aestivum
  misc_feature (1)..(1262): Ceres Seq. ID no. 14301894
atcaacaaaccaacccaaccagcaatagccaccccaatccatccagctcctccaagctcagtgtccgagctcagctcagctacccacacttcactcagtagcagctaccggtagcgagaaagaaagatcgatagtgcgacgtgcgcgatgacgacggtggcgataggcattctggccatggcgtgcctcgtggcggtggcgcggggcggcaacttcttccaggactccgagatgacctggggggacggccgcggcaaggtcgtcgacggcggccgcgggctcgacctcacgctcgacaagacctccggctccggcttccagtccaagaccgagtacctcttcggcaagatcgacatgcagatcaagctcgtccccggcaactccgccggcaccgtcaccaccttctacctgtcgtcgcaggggacggcgcacgacgagatcgacttcgagttcctgggcaacgtcaccggcgagccctacacgctgcacaccaacgtgttcgcgaaagggcaggggcagcgggagcagcagttccgcctctggttcgaccccaccaaggccttccacacctactccatcatctggaacccgcagcacgtcatattcgcggtggacggcacggcgatcagggacttcaagaaccacgaggcgcgcggcgtgtcgttccccaagagccagccgatgcggctgtacgcgagcctgtggaacgccgacgactgggccacgcagggcggccgggtcaagaccgactggagcaaggcgccgttcgtcgcctccttccgcaacttcaacgccgacgcctgcgtcatgtcgggcggcgcgcagcgctgccccgccggcacaatggaggcctctgcggccggcggcagcggcagctggtggaaccaggagctcagcggcatgggctaccgccgcatgcggtgggtgcagaggaagttcatgatctacaactactgcaccgaccccaagcgggtggcgcagggcgtgcctgccgagtgcaagctccgctgatgagatcctcccgcagcttacaagaacaacaacgcatgaacccgtcatctgagatgtgttttgtttcggctttcgatccgtgagaacgaaggaaggaaggaagtgcgcgcatcagagctctgtcggatggtgtaaatgtagtaccgtagtatgcatatcgcattctttcatttgtttcgttgtcacacgggtcgttccatgtacttatgcaagttctataattagctagttccttttagccttgaaaatcc

SEQ ID NO: 61678 - protein, 287 aa, Triticum aestivum
  peptide (1)..(287): Ceres Seq. ID no. 14301895
  misc_feature (23)..(204): Pfam Name: Glycosyl hydrolases family 16 Pfam Description: Glycosyl hydrolases family 16
  misc_feature (6)..(285): Homolog of NCBI NO: 1076604 NR Description: xyloglucan endo-1,4-beta-D-glucanase (EC 3.2.1.-)
  misc_feature (1)..(284): Homolog of NCBI NO: 17064792 NR Description: xyloglucan endo-1, 4-beta-D-glucanase (XTR-6)
  misc_feature (1)..(284): Homolog of NCBI NO: 15235997 NR Description: xyloglucan endotransglycosylase (XTR-6)
  misc_feature (1)..(284): Homolog of NCBI NO: 22947852 NR Description: xyloglucan endotransglycosylase [Malus x
  misc_feature (1)..(285): Homolog of NCBI NO: 8886865 NR Description: xyloglucan endotransglycosylase XET1 [Asparagus
  misc_feature (1)..(286): Homolog of NCBI NO: 29500891 NR Description: putative xyloglucan endotransglycosylase [Cucumis
  misc_feature (1)..(286): Homolog of NCBI NO: 8886867 NR Description: xyloglucan endotransglycosylase XET2 [Asparagus
  misc_feature (1)..(286): Homolog of NCBI NO: 7447412 NR Description: xyloglucan endo-1,4-beta-D-glucanase (EC 3.2.1.-)
  misc_feature (1)..(287): Homolog of NCBI NO: 14330332 NR Description: Xet1 protein [Schedonorus pratensis]
  misc_feature (1)..(287): Homolog of NCBI NO: 7447413 NR Description: xyloglucan endo-1,4-beta-D-glucanase (EC 3.2.1.-)
MTTVAIGILAMACLVAVARGGNFFQDSEMTWGDGRGKVVDGGRGLDLTLDKTSGSGFQSKTEYLFGKIDMQIKLVPGNSAGTVTTFYLSSQGTAHDEIDFEFLGNVTGEPYTLHTNVFAKGQGQREQQFRLWFDPTKAFHTYSIIWNPQHVIFAVDGTAIRDFKNHEARGVSFPKSQPMRLYASLWNADDWATQGGRVKTDWSKAPFVASFRNFNADACVMSGGAQRCPAGTMEASAAGGSGSWWNQELSGMGYRRMRWVQRKFMIYNYCTDPKRVAQGVPAECKLR

SEQ ID NO: 61679 - protein, 277 aa, Triticum aestivum
  peptide (1)..(277): Ceres Seq. ID no. 14301896
  misc_feature (13)..(194): Pfam Name: Glycosyl hydrolases family 16 Pfam Description: Glycosyl hydrolases family 16
  misc_feature (1)..(275): Homolog of NCBI NO: 1076604 NR Description: xyloglucan endo-1,4-beta-D-glucanase (EC 3.2.1.-)
  misc_feature (1)..(274): Homolog of NCBI NO: 17064792 NR Description: xyloglucan endo-1, 4-beta-D-glucanase (XTR-6)
  misc_feature (1)..(274): Homolog of NCBI NO: 15235997 NR Description: xyloglucan endotransglycosylase (XTR-6)
  misc_feature (1)..(274): Homolog of NCBI NO: 22947852 NR Description: xyloglucan endotransglycosylase [Malus x
  misc_feature (1)..(275): Homolog of NCBI NO: 8886865 NR Description: xyloglucan endotransglycosylase XET1 [Asparagus
  misc_feature (1)..(276): Homolog of NCBI NO: 29500891 NR Description: putative xyloglucan endotransglycosylase [Cucumis
  misc_feature (1)..(276): Homolog of NCBI NO: 8886867 NR Description: xyloglucan endotransglycosylase XET2 [Asparagus
  misc_feature (1)..(276): Homolog of NCBI NO: 7447412 NR Description: xyloglucan endo-1,4-beta-D-glucanase (EC 3.2.1.-)
  misc_feature (1)..(277): Homolog of NCBI NO: 14330332 NR Description: Xet1 protein [Schedonorus pratensis]
  misc_feature (1)..(277): Homolog of NCBI NO: 7447413 NR Description: xyloglucan endo-1,4-beta-D-glucanase (EC 3.2.1.-)
MACLVAVARGGNFFQDSEMTWGDGRGKVVDGGRGLDLTLDKTSGSGFQSKTEYLFGKIDMQIKLVPGNSAGTVTTFYLSSQGTAHDEIDFEFLGNVTGEPYTLHTNVFAKGQGQREQQFRLWFDPTKAFHTYSIIWNPQHVIFAVDGTAIRDFKNHEARGVSFPKSQPMRLYASLWNADDWATQGGRVKTDWSKAPFVASFRNFNADACVMSGGAQRCPAGTMEASAAGGSGSWWNQELSGMGYRRMRWVQRKFMIYNYCTDPKRVAQGVPAECKLR

SEQ ID NO: 61680 - protein, 259 aa, Triticum aestivum
  peptide (1)..(259): Ceres Seq. ID no. 14301897
  misc_feature (1)..(176): Pfam Name: Glycosyl hydrolases family 16 Pfam Description: Glycosyl hydrolases family 16
  misc_feature (1)..(257): Homolog of NCBI NO: 1076604 NR Description: xyloglucan endo-1,4-beta-D-glucanase (EC 3.2.1.-)
  misc_feature (1)..(256): Homolog of NCBI NO: 17064792 NR Description: xyloglucan endo-1, 4-beta-D-glucanase (XTR-6)
  misc_feature (1)..(256): Homolog of NCBI NO: 15235997 NR Description: xyloglucan endotransglycosylase (XTR-6)
  misc_feature (1)..(256): Homolog of NCBI NO: 22947852 NR Description: xyloglucan endotransglycosylase [Malus x
  misc_feature (1)..(257): Homolog of NCBI NO: 8886865 NR Description: xyloglucan endotransglycosylase XET1 [Asparagus
  misc_feature (1)..(258): Homolog of NCBI NO: 29500891 NR Description: putative xyloglucan endotransglycosylase [Cucumis
  misc_feature (1)..(258): Homolog of NCBI NO: 8886867 NR Description: xyloglucan endotransglycosylase XET2 [Asparagus
  misc_feature (1)..(258): Homolog of NCBI NO: 7447412 NR Description: xyloglucan endo-1,4-beta-D-glucanase (EC 3.2.1.-)
  misc_feature (1)..(259): Homolog of NCBI NO: 14330332 NR Description: Xet1 protein [Schedonorus pratensis]
  misc_feature (1)..(259): Homolog of NCBI NO: 7447413 NR Description: xyloglucan endo-1,4-beta-D-glucanase (EC 3.2.1.-)
MTWGDGRGKVVDGGRGLDLTLDKTSGSGFQSKTEYLFGKIDMQIKLVPGNSAGTVTTFYLSSQGTAHDEIDFEFLGNVTGEPYTLHTNVFAKGQGQREQQFRLWFDPTKAFHTYSIIWNPQHVIFAVDGTAIRDFKNHEARGVSFPKSQPMRLYASLWNADDWATQGGRVKTDWSKAPFVASFRNFNADACVMSGGAQRCPAGTMEASAAGGSGSWWNQELSGMGYRRMRWVQRKFMIYNYCTDPKRVAQGVPAECKLR

SEQ ID NO: 61681 - DNA, 955 bp, Triticum aestivum
  misc_feature (1)..(955): Ceres Seq. ID no. 13664314
accgctccagtcccgccaggatctgccgccccacaccgtgcccagctccgccgcccccgcgccccccctctcagccgctcgacgctcgccggagcggcggatctccgacgcgtcgctccctcccgcaggcaacagacggcatctaggcagaacctcccaccattccaccggaatcggagaacctagtcgcggcgcctcaacctcgcctgaactcaccgtcgatggcggccgctgcggggtcgtacggcaagctcgacaagtcattcaagcttgccgctcgctccatactcaccgccttctcccgcgaggatcttaacaatgctttcccatcgttcacggacgccgaaagggagcgcctgtaccaaatgttcatctatgtgatcaagtctttgcatggcaatatagtggaggagttccgaaatctctgcgatgaaatagaaattgctactgcccttgacaaggtagatcagtttgccgaagaacaaactctggacgtattatcttcagacaagactagcattgaagacatcaaagaaaggatatcaaaggagaagaaggatgaaattgaacttttaaaaggtttactagagaagactcaagaaaggaacaatgccatgaaggcccgaatcgaacccttgaagcaaggggaggatttcaatgacacaagagatgttctcacgaagctgaaggaatggaattctgcatgtcagagctgcaatgaccattgagcttctctggttactcgatgtagtcaagagacatctgctgtgtagctttgtgtgttcgtagagtggaggtcgagtcaggggtcatgctcccccatgaaccaatggtgctaaccaattgtagcgtgatttcgtttcttcgttgcaaggcatagctgttgcgtttctgtattttcgtcgcctcatgtttcctgcacccatagttgatgcttgctttagtgatcatcctg

SEQ ID NO: 61682 - protein, 168 aa, Triticum aestivum
  peptide (1)..(168): Ceres Seq. ID no. 13664315
  misc_feature (37)..(155): Homolog of NCBI NO: 7487713 NR Description: hypothetical protein T5K18.130 - Arabidopsis
  misc_feature (11)..(155): Homolog of NCBI NO: 18415295 NR Description: expressed protein [Arabidopsis thaliana]
  misc_feature (2)..(161): Homolog of NCBI NO: 34905298 NR Description: P0577B11.20 [Oryza sativa (japonica
MAAAAGSYGKLDKSFKLAARSILTAFSREDLNNAFPSFTDAERERLYQMFIYVIKSLHGNIVEEFRNLCDEIEIATALDKVDQFAEEQTLDVLSSDKTSIEDIKERISKEKKDEIELLKGLLEKTQERNNAMKARIEPLKQGEDFNDTRDVLTKLKEWNSACQSCNDH

SEQ ID NO: 61683 - protein, 120 aa, Triticum aestivum
  peptide (1)..(120): Ceres Seq. ID no. 13664316
  misc_feature (1)..(107): Homolog of NCBI NO: 7487713 NR Description: hypothetical protein T5K18.130 - Arabidopsis
  misc_feature (1)..(107): Homolog of NCBI NO: 18415295 NR Description: expressed protein [Arabidopsis thaliana]
  misc_feature (1)..(113): Homolog of NCBI NO: 34905298 NR Description: P0577B11.20 [Oryza sativa (japonica
MFIYVIKSLHGNIVEEFRNLCDEIEIATALDKVDQFAEEQTLDVLSSDKTSIEDIKERISKEKKDEIELLKGLLEKTQERNNAMKARIEPLKQGEDFNDTRDVLTKLKEWNSACQSCNDH

SEQ ID NO: 61684 - protein, 104 aa, Triticum aestivum
  peptide (1)..(104): Ceres Seq. ID no. 13664317
PLQSRQDLPPHTVPSSAAPAPPLSAARRSPERRISDASLPPAGNRRHLGRTSHHSTGIGEPSRGASTSPELTVDGGRCGVVRQARQVIQACRSLHTHRLLPRGS

SEQ ID NO: 61685 - DNA, 857 bp, Triticum aestivum
  misc_feature (1)..(857): Ceres Seq. ID no. 13661487
tggaaactttgggtcttagaaatggtcctgctaaggaggccgaagatgctgcagaatgtaccaaacagacaaatttgagcactgagaatgagcaactagaaagtgcagaaggtactgagcggcatctggatgtttcatttcatggtactgaagctagcacagacgaagctgcctctgaagcagctgaatcttcagtctcagctacttagacacaggcagagagaacagttgataaaccagctggctcatctgatttggacaatcctatctctgaagcttcacccgatcctgatgtcaatgggagtgatttggctggctcggcattatcttctgagcaagctgtccgtaacgaagatgtggaggtaccgaccaagactgatgcagtcgtggatactgaaatgaaaactgatacagtcgtggaaactgatgcagtcggggatgttggagtgaaagctgatgcagtcgtggaggtaccaagcaaggaagtatctgccgtggatgttgaagctaaaactggcgcagcagaagcaaaagagtgaagtggcagcttatctcatggactgaaatggcatagctgacgagcaattattagtcagacccctcagaagacaggcaatcatctttgcttcaagtgctcatcagccacaagcaacttcgaagcaaactgctgtacaataagcaagtgtactattttgccttccattgtggccaatcactgtacaaatgggcaccattgtctaactgcacgcgtacacttcatcagaaattggtcaatttgcttcaaaatttaccctccgtttcatggggaacaattggttgatgcgaaatgtcatttggcggtagtctcgtgtcttgcg

SEQ ID NO: 61686 - protein, 90 aa, Triticum aestivum
  peptide (1)..(90): Ceres Seq. ID no. 13661488
MFHFMVLKLAQTKLPLKQLNLQSQLLRHRQREQLINQLAHLIWTILSLKLHPILMSMGVIWLARHYLLSKLSVTKMWRYRPRLMQSWILK

SEQ ID NO: 61687 - protein, 86 aa, Triticum aestivum
  peptide (1)..(86): Ceres Seq. ID no. 13661489
MVLKLAQTKLPLKQLNLQSQLLRHRQREQLINQLAHLIWTILSLKLHPILMSMGVIWLARHYLLSKLSVTKMWRYRPRLMQSWILK

SEQ ID NO: 61688 - protein, 68 aa, Triticum aestivum
  peptide (1)..(68): Ceres Seq. ID no. 13661490
  misc_feature (1)..(68): Homolog of NCBI NO: 34912146 NR Description: P0712E02.15 [Oryza sativa (japonica
ETLGLRNGPAKEAEDAAECTKQTNLSTENEQLESAEGTERHLDVSFHGTEASTDEAASEAAESSVSAT

SEQ ID NO: 61689 - DNA, 659 bp, Triticum aestivum
  misc_feature (1)..(659): Ceres Seq. ID no. 13661877
atcctaatcgaaaagatttttttggcgagagagctaagatgtgtctccgttactccctttgcttgatcttattctctctcatttcactccaaggttttgccaagaagacaggagatgtgtcggaattgcagatcggtgttaagtttaagccagcaacgtgtgaagtgaaggctcacaaaggtgatatgatcaaggtgcactacagggggaaacttactgatggaacagtattcgattcgagctttgaaagggatgaaccgttcgagtttgagttaggaagtggtcaggttatcaaaggctgggatcaaggattgctaggtgcgtgtgtaggagagaagaggaagttaaagatacctgctaaacttggatatggtgaacagggctctcctccaaccatccccggtggggcaacactgatatttgacacagagcttatcgcggtaaatgaaaaaccagctggtggagaacaagaacaagaagaagaagatgtagacgacacatatggagctgacgagctgtgattgattctctattctccaaccgtttagcttcagagttcctctacgaataaaatgtctatgtgcgtttgctttttaatcattggatgcttttagttttgcttctttctaagttatcaacaattacttcgttttggtttg

SEQ ID NO: 61690 - protein, 172 aa, Triticum aestivum
  peptide (1)..(172): Ceres Seq. ID no. 13661878
  misc_feature (52)..(145): Pfam Name: FKBP-type peptidyl-prolyl cis-trans isomerase Pfam Description: FKBP-type peptidyl-prolyl cis-trans isomerase
  misc_feature (21)..(150): Homolog of NCBI NO: 27694894 NR Description: Similar to FK506 binding protein 2 (13 kDa)
  misc_feature (15)..(150): Homolog of NCBI NO: 6679805 NR Description: FK506 binding protein 2; FK506 binding protein 2
  misc_feature (21)..(159): Homolog of NCBI NO: 34906954 NR Description: rapamycin-binding protein-like
  misc_feature (21)..(160): Homolog of NCBI NO: 21593622 NR Description: immunophilin (FKBP15-1) [Arabidopsis thaliana]
  misc_feature (19)..(166): Homolog of NCBI NO: 38174807 NR Description: putative immunophilin [Hordeum vulgare subsp.
  misc_feature (21)..(160): Homolog of NCBI NO: 18404471 NR Description: immunophilin / FKBP-type peptidyl-prolyl
  misc_feature (21)..(160): Homolog of NCBI NO: 2129622 NR Description: probable peptidylprolyl isomerase (EC 5.2.1.8)
  misc_feature (17)..(161): Homolog of NCBI NO: 23396588 NR Description: FK506-binding protein 2 precursor
  misc_feature (12)..(172): Homolog of NCBI NO: 2129623 NR Description: probable peptidylprolyl isomerase (EC 5.2.1.8)
  misc_feature (11)..(172): Homolog of NCBI NO: 15239019 NR Description: immunophilin / FKBP-type peptidyl-prolyl
PNRKDFFGERAKMCLRYSLCLILFSLISLQGFAKKTGDVSELQIGVKFKPATCEVKAHKGDMIKVHYRGKLTDGTVFDSSFERDEPFEFELGSGQVIKGWDQGLLGACVGEKRKLKIPAKLGYGEQGSPPTIPGGATLIFDTELIAVNEKPAGGEQEQEEEDVDDTYGADEL

SEQ ID NO: 61691 - protein, 160 aa, Triticum aestivum
  peptide (1)..(160): Ceres Seq. ID no. 13661879
  misc_feature (40)..(133): Pfam Name: FKBP-type peptidyl-prolyl cis-trans isomerase Pfam Description: FKBP-type peptidyl-prolyl cis-trans isomerase
  misc_feature (9)..(138): Homolog of NCBI NO: 27694894 NR Description: Similar to FK506 binding protein 2 (13 kDa)
  misc_feature (3)..(138): Homolog of NCBI NO: 6679805 NR Description: FK506 binding protein 2; FK506 binding protein 2
  misc_feature (9)..(147): Homolog of NCBI NO: 34906954 NR Description: rapamycin-binding protein-like
  misc_feature (9)..(148): Homolog of NCBI NO: 21593622 NR Description: immunophilin (FKBP15-1) [Arabidopsis thaliana]
  misc_feature (7)..(154): Homolog of NCBI NO: 38174807 NR Description: putative immunophilin [Hordeum vulgare subsp.
  misc_feature (9)..(148): Homolog of NCBI NO: 18404471 NR Description: immunophilin / FKBP-type peptidyl-prolyl
  misc_feature (9)..(148): Homolog of NCBI NO: 2129622 NR Description: probable peptidylprolyl isomerase (EC 5.2.1.8)
  misc_feature (5)..(149): Homolog of NCBI NO: 23396588 NR Description: FK506-binding protein 2 precursor
  misc_feature (1)..(160): Homolog of NCBI NO: 2129623 NR Description: probable peptidylprolyl isomerase (EC 5.2.1.8)
  misc_feature (1)..(160): Homolog of NCBI NO: 15239019 NR Description: immunophilin / FKBP-type peptidyl-prolyl
MCLRYSLCLILFSLISLQGFAKKTGDVSELQIGVKFKPATCEVKAHKGDMIKVHYRGKLTDGTVFDSSFERDEPFEFELGSGQVIKGWDQGLLGACVGEKRKLKIPAKLGYGEQGSPPTIPGGATLIFDTELIAVNEKPAGGEQEQEEEDVDDTYGADEL

SEQ ID NO: 61692 - protein, 111 aa, Triticum aestivum
  peptide (1)..(111): Ceres Seq. ID no. 13661880
  misc_feature (1)..(84): Pfam Name: FKBP-type peptidyl-prolyl cis-trans isomerase Pfam Description: FKBP-type peptidyl-prolyl cis-trans isomerase
  misc_feature (1)..(89): Homolog of NCBI NO: 27694894 NR Description: Similar to FK506 binding protein 2 (13 kDa)
  misc_feature (1)..(89): Homolog of NCBI NO: 6679805 NR Description: FK506 binding protein 2; FK506 binding protein 2
  misc_feature (1)..(98): Homolog of NCBI NO: 34906954 NR Description: rapamycin-binding protein-like
  misc_feature (1)..(99): Homolog of NCBI NO: 21593622 NR Description: immunophilin (FKBP15-1) [Arabidopsis thaliana]
  misc_feature (1)..(105): Homolog of NCBI NO: 38174807 NR Description: putative immunophilin [Hordeum vulgare subsp.
  misc_feature (1)..(99): Homolog of NCBI NO: 18404471 NR Description: immunophilin / FKBP-type peptidyl-prolyl
  misc_feature (1)..(99): Homolog of NCBI NO: 2129622 NR Description: probable peptidylprolyl isomerase (EC 5.2.1.8)
  misc_feature (1)..(100): Homolog of NCBI NO: 23396588 NR Description: FK506-binding protein 2 precursor
  misc_feature (1)..(111): Homolog of NCBI NO: 2129623 NR Description: probable peptidylprolyl isomerase (EC 5.2.1.8)
  misc_feature (1)..(111): Homolog of NCBI NO: 15239019 NR Description: immunophilin / FKBP-type peptidyl-prolyl
MIKVHYRGKLTDGTVFDSSFERDEPFEFELGSGQVIKGWDQGLLGACVGEKRKLKIPAKLGYGEQGSPPTIPGGATLIFDTELIAVNEKPAGGEQEQEEEDVDDTYGADEL

SEQ ID NO: 61693 - DNA, 1136 bp, Triticum aestivum
  misc_feature (1)..(1136): Ceres Seq. ID no. 13662018
cctagaacatcctaatcgaaaaatcacgaaaggtctcgctcgctagctgccgtccccgcccgcctgccgcctcgtgccctcgacacgacacgacacgatggccgcggccgcgccatcccgccaccgccccgagggacctccctcggaggaggaggcggcgagggactgggcggggctgccgggggacgcgctgctggcggtgctccacaggctagaccacgtcgacgtcctcatgggggccggccaggtgtgcagcccctggcgctgcgcggcgcggaacgagccggagctgtggcgccgcgtcgaggtgcgctcccacgccgaccgccgatctcacgtcgcggcgccctcccgcgccagacgccactcctgctccgtcctctgtgggctggcgcgcgccgccgtcaggcgtgccgcggggcagtgcgaggccttctgcggcgagggcgccgtggacgacagcgtcctctccctccttgccgactcggcgccttcgctgaagagcctccggatcatctccggcgacaggatcgtcgacgagaggctcagcctcaccatcacgaacttctccctgctggaggagctggagctctcgctttgcaccgacgtctacccggggacgtgcgaggccgtcggcaccgcctgccctctcctcaagcgcttccgtctgagcaagaagcagttctgcaagtggaacaccaagaacatcgaccaggaggccatggccatcgccaccatgggcgggctgcggtcgcttcagctcttcgccaaccctctcagcgacgacgggctggcggccatccttgacggatgcccgcgcctcgagtctctcgacatccgccactgcttcaacgttgggatgggcgctgctgcgatccgagcacggtgtcctgggatcaagacgctgaggctgccggatgactccacgatcgattacgatctgaagttttctcccccggatatgaccccgtggaacacccaggatgagcatcaatgtgattggcacgagttggtctatttcagttcatggtagtctagtgtactggtgtgcagcttccccacaagataccgctgctgtaagtaggagtacaaccaaatggacgggttaataatggcaatgatacttttttttggtt

SEQ ID NO: 61694 - protein, 311 aa, Triticum aestivum
  peptide (1)..(311): Ceres Seq. ID no. 13662019
  misc_feature (20)..(163): Homolog of NCBI NO: 38637157 NR Description: hypothetical protein [Oryza sativa (japonica
  misc_feature (198)..(276): Homolog of NCBI NO: 40253668 NR Description: glutamic acid-rich protein precursor-like protein
  misc_feature (22)..(196): Homolog of NCBI NO: 40253668 NR Description: glutamic acid-rich protein precursor-like protein
  misc_feature (18)..(281): Homolog of NCBI NO: 18412951 NR Description: F-box protein family, AtFBL22 [Arabidopsis
  misc_feature (14)..(268): Homolog of NCBI NO: 40253645 NR Description: F-box protein-like [Oryza sativa (japonica
  misc_feature (17)..(303): Homolog of NCBI NO: 18412953 NR Description: F-box protein family, AtFBL9/AtFBL23 [Arabidopsis
  misc_feature (95)..(287): Homolog of NCBI NO: 40253669 NR Description: F-box protein-like [Oryza sativa (japonica
  misc_feature (95)..(297): Homolog of NCBI NO: 38637159 NR Description: F-box protein family-like
  misc_feature (1)..(291): Homolog of NCBI NO: 38637156 NR Description: F-box protein family-like
  misc_feature (1)..(300): Homolog of NCBI NO: 40253673 NR Description: putative N7 protein [Oryza sativa (japonica
MAAAAPSRHRPEGPPSEEEAARDWAGLPGDALLAVLHRLDHVDVLMGAGQVCSPWRCAARNEPELWRRVEVRSHADRRSHVAAPSRARRHSCSVLCGLARAAVRRAAGQCEAFCGEGAVDDSVLSLLADSAPSLKSLRIISGDRIVDERLSLTITNFSLLEELELSLCTDVYPGTCEAVGTACPLLKRFRLSKKQFCKWNTKNIDQEAMAIATMGGLRSLQLFANPLSDDGLAAILDGCPRLESLDIRHCFNVGMGAAAIRARCPGIKTLRLPDDSTIDYDLKFSPPDMTPWNTQDEHQCDWHELVYFSSW

SEQ ID NO: 61695 - protein, 266 aa, Triticum aestivum
  peptide (1)..(266): Ceres Seq. ID no. 13662020
  misc_feature (1)..(118): Homolog of NCBI NO: 38637157 NR Description: hypothetical protein [Oryza sativa (japonica
  misc_feature (153)..(231): Homolog of NCBI NO: 40253668 NR Description: glutamic acid-rich protein precursor-like protein
  misc_feature (1)..(151): Homolog of NCBI NO: 40253668 NR Description: glutamic acid-rich protein precursor-like protein
  misc_feature (1)..(236): Homolog of NCBI NO: 18412951 NR Description: F-box protein family, AtFBL22 [Arabidopsis
  misc_feature (1)..(223): Homolog of NCBI NO: 40253645 NR Description: F-box protein-like [Oryza sativa (japonica
  misc_feature (1)..(258): Homolog of NCBI NO: 18412953 NR Description: F-box protein family, AtFBL9/AtFBL23 [Arabidopsis
  misc_feature (50)..(242): Homolog of NCBI NO: 40253669 NR Description: F-box protein-like [Oryza sativa (japonica
  misc_feature (50)..(252): Homolog of NCBI NO: 38637159 NR Description: F-box protein family-like
  misc_feature (1)..(246): Homolog of NCBI NO: 38637156 NR Description: F-box protein family-like
  misc_feature (1)..(255): Homolog of NCBI NO: 40253673 NR Description: putative N7 protein [Oryza sativa (japonica
MGAGQVCSPWRCAARNEPELWRRVEVRSHADRRSHVAAPSRARRHSCSVLCGLARAAVRRAAGQCEAFCGEGAVDDSVLSLLADSAPSLKSLRIISGDRIVDERLSLTITNFSLLEELELSLCTDVYPGTCEAVGTACPLLKRFRLSKKQFCKWNTKNIDQEAMAIATMGGLRSLQLFANPLSDDGLAAILDGCPRLESLDIRHCFNVGMGAAAIRARCPGIKTLRLPDDSTIDYDLKFSPPDMTPWNTQDEHQCDWHELVYFSSW

SEQ ID NO: 61696 - DNA, 643 bp, Triticum aestivum
  misc_feature (1)..(643): Ceres Seq. ID no. 13661491
aatcaggaagacgagtgagaagagaagaagcaatggggagaaagaagggattgccggagtttgaagagacggcgccggatggcttcgatccggcgaatccatacaaggatccggtggcgatggtggaaatgagagagcacatcgtccgcgaaaagtggatccagatcgagaaggctaagatcatgcgcgagaaggtcaaatggtgttaccgcgtcgaaggagtcaaccattaccagaaatgccgtcatctcgtccagcagtacctcgactccactcgcggcgtcggctgggggaaagaccaccgtcctatgtcgctccacggtcctaagcctgaggctgttgaagctgaataatgatttgcgtgtgattaatctgaggtgacggagcttttaatacaagacatgaaaaggtctttggactctgcagatttgctcttgtttgttctttttcttttgttgaaacatgtcagtctttggactggcggatacatggaagggtttttataagcttcagtaatgtattgaagaaactacactcaacattagtctttcattatgctacccaaataagtccatttttttctttgttccgggcttccggctagttttttactttcttgccaaaaactgtagcttaaattctc

SEQ ID NO: 61697 - protein, 116 aa, Triticum aestivum
  peptide (1)..(116): Ceres Seq. ID no. 15218790
  misc_feature (23)..(89): Homolog of NCBI NO: 40742951 NR Description: hypothetical protein AN7561.2 [Aspergillus
  misc_feature (23)..(88): Homolog of NCBI NO: 32420171 NR Description: NADH-UBIQUINONE OXIDOREDUCTASE 12 KD SUBUNIT
  misc_feature (23)..(88): Homolog of NCBI NO: 400649 NR Description: NADH-ubiquinone oxidoreductase 12 kDa subunit,
  misc_feature (14)..(116): Homolog of NCBI NO: 37537116 NR Description: unknown protein [Oryza sativa (japonica
  misc_feature (11)..(107): Homolog of NCBI NO: 11994104 NR Description: gene_id:MYF24.13~similar to unknown
  misc_feature (11)..(114): Homolog of NCBI NO: 18402495 NR Description: NADH-ubiquinone oxidoreductase 12 kD subunit
  misc_feature (11)..(116): Homolog of NCBI NO: 18401879 NR Description: expressed protein [Arabidopsis thaliana]
SGRRVRREEAMGRKKGLPEFEETAPDGFDPANPYKDPVAMVEMREHIVREKWIQIEKAKIMREKVKWCYRVEGVNHYQKCRHLVQQYLDSTRGVGWGKDHRPMSLHGPKPEAVEAE

SEQ ID NO: 61698 - protein, 106 aa, Triticum aestivum
  peptide (1)..(106): Ceres Seq. ID no. 15218791
  misc_feature (13)..(79): Homolog of NCBI NO: 40742951 NR Description: hypothetical protein AN7561.2 [Aspergillus
  misc_feature (13)..(78): Homolog of NCBI NO: 32420171 NR Description: NADH-UBIQUINONE OXIDOREDUCTASE 12 KD SUBUNIT
  misc_feature (13)..(78): Homolog of NCBI NO: 400649 NR Description: NADH-ubiquinone oxidoreductase 12 kDa subunit,
  misc_feature (4)..(106): Homolog of NCBI NO: 37537116 NR Description: unknown protein [Oryza sativa (japonica
  misc_feature (1)..(97): Homolog of NCBI NO: 11994104 NR Description: gene_id:MYF24.13~similar to unknown
  misc_feature (1)..(104): Homolog of NCBI NO: 18402495 NR Description: NADH-ubiquinone oxidoreductase 12 kD subunit
  misc_feature (1)..(106): Homolog of NCBI NO: 18401879 NR Description: expressed protein [Arabidopsis thaliana]
MGRKKGLPEFEETAPDGFDPANPYKDPVAMVEMREHIVREKWIQIEKAKIMREKVKWCYRVEGVNHYQKCRHLVQQYLDSTRGVGWGKDHRPMSLHGPKPEAVEAE

SEQ ID NO: 61699 - protein, 77 aa, Triticum aestivum
  peptide (1)..(77): Ceres Seq. ID no. 15218792
  misc_feature (1)..(50): Homolog of NCBI NO: 40742951 NR Description: hypothetical protein AN7561.2 [Aspergillus
  misc_feature (1)..(49): Homolog of NCBI NO: 32420171 NR Description: NADH-UBIQUINONE OXIDOREDUCTASE 12 KD SUBUNIT
  misc_feature (1)..(49): Homolog of NCBI NO: 400649 NR Description: NADH-ubiquinone oxidoreductase 12 kDa subunit,
  misc_feature (1)..(77): Homolog of NCBI NO: 37537116 NR Description: unknown protein [Oryza sativa (japonica
  misc_feature (1)..(68): Homolog of NCBI NO: 11994104 NR Description: gene_id:MYF24.13~similar to unknown
  misc_feature (1)..(75): Homolog of NCBI NO: 18402495 NR Description: NADH-ubiquinone oxidoreductase 12 kD subunit
  misc_feature (1)..(77): Homolog of NCBI NO: 18401879 NR Description: expressed protein [Arabidopsis thaliana]
MVEMREHIVREKWIQIEKAKIMREKVKWCYRVEGVNHYQKCRHLVQQYLDSTRGVGWGKDHRPMSLHGPKPEAVEAE

SEQ ID NO: 61700 - DNA, 852 bp, Triticum aestivum
  misc_feature (1)..(852): Ceres Seq. ID no. 12624328
atatttaatttgtttctagtttctacatttcgctattcacgaatctgagatgttatgctctagccatgatctgcgattcttctggctcctgcgagattgacaaaatacaagatacttttaatcaatggaagcaagcacctgaaaatacaggagagtatgtgcatcttaccagagaactgctaaccacctgtgagagcgtccaatggcaggtggatgagttagagaaggcaatttctgttgctgagagagatccagcttactatggactaaacgaggttgaaattgggaaacggaggaactggactagcaccgcccgcaaccaggtggtatcaatacggaggaatgttgaagctggaaagcacaagactgcctttggacgttcggtcaatccttccgaactaggcagatccaagcagcacatttctcaggataacgatgacttcattgcttcagaatctgatcaacagatgctcctgatgaagcgtcaggatgatgagttggatgcgcttagtgctagtgtccagcgaattggaggtgtaggtctcacaatacacgaagagcttgttggacaggaaaaacttctaggtgaactaagcctcgacatggaaactacctccaaccggctcgattttgtgcagaaaagagtggctatggttctgaagaaggccagcttgaaagggcagatcatgatgatagctttcttggtggttcttttcatcatccttttcgttttggtattcttgacttgagagatggagtttaagttgcgtgagtatttgccatcaggtgtataattgattcgtgtaattggggccggtatagtttgttcttcgggatctgcctctgccaagt

SEQ ID NO: 61701 - protein, 227 aa, Triticum aestivum
  peptide (1)..(227): Ceres Seq. ID no. 12624329
  misc_feature (140)..(201): Pfam Name: SNARE domain Pfam Description: SNARE domain
  misc_feature (35)..(226): Homolog of NCBI NO: 10946800 NR Description: syntaxin 6 [Mus musculus]
  misc_feature (29)..(226): Homolog of NCBI NO: 12857762 NR Description: unnamed protein product [Mus musculus]
  misc_feature (10)..(133): Homolog of NCBI NO: 6560768 NR Description: F3M18.7 [Arabidopsis thaliana]
  misc_feature (11)..(226): Homolog of NCBI NO: 20148776 NR Description: syntaxin 6 [Chlamydomonas reinhardtii]
  misc_feature (48)..(198): Homolog of NCBI NO: 6560768 NR Description: F3M18.7 [Arabidopsis thaliana]
  misc_feature (11)..(172): Homolog of NCBI NO: 498040 NR Description: ORF
  misc_feature (11)..(227): Homolog of NCBI NO: 18175840 NR Description: unknown protein [Arabidopsis thaliana]
  misc_feature (11)..(227): Homolog of NCBI NO: 18396813 NR Description: syntaxin SYP6 family
  misc_feature (11)..(60): Homolog of NCBI NO: 34905840 NR Description: putative syntaxin [Oryza sativa (japonica
  misc_feature (47)..(227): Homolog of NCBI NO: 34905840 NR Description: putative syntaxin [Oryza sativa (japonica
MICDSSGSCEIDKIQDTFNQWKQAPENTGEYVHLTRELLTTCESVQWQVDELEKAISVAERDPAYYGLNEVEIGKRRNWTSTARNQVVSIRRNVEAGKHKTAFGRSVNPSELGRSKQHISQDNDDFIASESDQQMLLMKRQDDELDALSASVQRIGGVGLTIHEELVGQEKLLGELSLDMETTSNRLDFVQKRVAMVLKKASLKGQIMMIAFLVVLFIILFVLVFLT

SEQ ID NO: 61702 - DNA, 886 bp, Triticum aestivum
  misc_feature (1)..(886): Ceres Seq. ID no. 13661499
  misc_feature: Pfam Name: Drf_FH1 Pfam Description: Formin Homology Region 1
aacccaaagcagaccggaccgtctgaacagacagcataagaagcgagaaggcagagacgggagcctcgccgccgacgggcaagatgcagcgcgcgtcgctcgcgtccgccttgctgctgctctgctccctctgttccttcttcgcgcagccgtcgcaggcgttcctcgacggcacgcgcggcgcaggggcgtgcatttctcggctgcttggcgagggcttcggcgacgagaagatccccatggccgtcgtggtgccgtcggtgccagattactccccgctgccggcaccgaccgctgtcgcggtcgccgcgcctgcgcctgcgcccacgcccacgccaacgccaacgccggtgcccggctcggaggagtacatgccgaagctgccgtcggagaggctgagccctggggcgccggccagcggcaatgcgggcgcgccggcgcctgccgcgtcgggcgatggggcgagcaccgcattcatcagcagcaaccccgcggtgccgctccccgccggcgtcaccgactccgccaccgtcctgcccatgcccacccctggacaagagcaacggcaggacgtggggatgggcaccctgcttcaggctagggcggtgccgttggtcgctcctctcctcatggtgctctacttttgagtttcttgttggggtagtagactagttcctttctcttactgtataatcatcgtgcgattagttgtcagaatctgcgcttgtaatcagcaccgtagtgctttcgttatcatctagtaggcgattgtaagctctaaccatctgtaaacagtgtcacctctgcttactgcatgcttcttgtctcttgttacacctgtatcctgcgtacgagtaagtctgcattgcaaatttgcaattctttc

SEQ ID NO: 61703 - protein, 199 aa, Triticum aestivum
  peptide (1)..(199): Ceres Seq. ID no. 15218793
  misc_feature: Pfam Name: Drf_FH1 Pfam Description: Formin Homology Region 1
TQSRPDRLNRQHKKREGRDGSLAADGQDAARVARVRLAAALLPLFLLRAAVAGVPRRHARRRGVHFSAAWRGLRRREDPHGRRGAVGARLLPAAGTDRCRGRRACACAHAHANANAGARLGGVHAEAAVGEAEPWGAGQRQCGRAGACRVGRWGEHRIHQQQPRGAAPRRRHRLRHRPAHAHPWTRATAGRGDGHPASG

SEQ ID NO: 61704 - protein, 187 aa, Triticum aestivum
  peptide (1)..(187): Ceres Seq. ID no. 15218794
  misc_feature: Pfam Name: Drf_FH1 Pfam Description: Formin Homology Region 1
  misc_feature (72)..(169): Homolog of NCBI NO: 25402935 NR Description: protein T22I11.8 [imported] - Arabidopsis
  misc_feature (59)..(160): Homolog of NCBI NO: 17537803 NR Description: Putative protein, nematode specific
  misc_feature (30)..(185): Homolog of NCBI NO: 21219450 NR Description: putative secreted proline-rich protein
  misc_feature (58)..(156): Homolog of NCBI NO: 9630030 NR Description: unknown [Orgyia pseudotsugata multicapsid
  misc_feature (72)..(185): Homolog of NCBI NO: 18394953 NR Description: expressed protein [Arabidopsis thaliana]
  misc_feature (72)..(185): Homolog of NCBI NO: 21536976 NR Description: unknown [Arabidopsis thaliana]
  misc_feature (52)..(185): Homolog of NCBI NO: 23017292 NR Description: hypothetical protein [Thermobifida fusca]
  misc_feature (61)..(175): Homolog of NCBI NO: 38637992 NR Description: conserved hypothetical protein [Ralstonia
  misc_feature (34)..(177): Homolog of NCBI NO: 21225405 NR Description: putative acyltransferase [Streptomyces coelicolor
  misc_feature (1)..(187): Homolog of NCBI NO: 38605910 NR Description: OSJNBb0088C09.4 [Oryza sativa (japonica
MQRASLASALLLLCSLCSFFAQPSQAFLDGTRGAGACISRLLGEGFGDEKIPMAVVVPSVPDYSPLPAPTAVAVAAPAPAPTPTPTPTPVPGSEEYMPKLPSERLSPGAPASGNAGAPAPAASGDGASTAFISSNPAVPLPAGVTDSATVLPMPTPGQEQRQDVGMGTLLQARAVPLVAPLLMVLYF

SEQ ID NO: 61705 - protein, 135 aa, Triticum aestivum
  peptide (1)..(135): Ceres Seq. ID no. 15218795
  misc_feature: Pfam Name: Drf_FH1 Pfam Description: Formin Homology Region 1
  misc_feature (20)..(117): Homolog of NCBI NO: 25402935 NR Description: protein T22I11.8 [imported] - Arabidopsis
  misc_feature (7)..(108): Homolog of NCBI NO: 17537803 NR Description: Putative protein, nematode specific
  misc_feature (1)..(133): Homolog of NCBI NO: 21219450 NR Description: putative secreted proline-rich protein
  misc_feature (6)..(104): Homolog of NCBI NO: 9630030 NR Description: unknown [Orgyia pseudotsugata multicapsid
  misc_feature (20)..(133): Homolog of NCBI NO: 18394953 NR Description: expressed protein [Arabidopsis thaliana]
  misc_feature (20)..(133): Homolog of NCBI NO: 21536976 NR Description: unknown [Arabidopsis thaliana]
  misc_feature (1)..(133): Homolog of NCBI NO: 23017292 NR Description: hypothetical protein [Thermobifida fusca]
  misc_feature (9)..(123): Homolog of NCBI NO: 38637992 NR Description: conserved hypothetical protein [Ralstonia
  misc_feature (1)..(125): Homolog of NCBI NO: 21225405 NR Description: putative acyltransferase [Streptomyces coelicolor
  misc_feature (1)..(135): Homolog of NCBI NO: 38605910 NR Description: OSJNBb0088C09.4 [Oryza sativa (japonica
MAVVVPSVPDYSPLPAPTAVAVAAPAPAPTPTPTPTPVPGSEEYMPKLPSERLSPGAPASGNAGAPAPAASGDGASTAFISSNPAVPLPAGVTDSATVLPMPTPGQEQRQDVGMGTLLQARAVPLVAPLLMVLYF

SEQ ID NO: 61706 - DNA, 971 bp, Triticum aestivum
  misc_feature (1)..(971): Ceres Seq. ID no. 15226351
aaaccttaggggataacttagaaacaagaaaacggcgtcggtttgacccgacggaggaaccatgtcgtcgtctcttcttctctcaggctctacagtatcttcttcattcattgctccttcgaagctttatctcttacggaatcaaaatcaatcactgtcactatctcggaacgtttcgagaaccttcaaaccccttaggtgctcctccgctgattctccatacggaggcaacgtgcccacgttccctcgaaccagggtctgggacccatacaagcgtctagggataagcccctacgcctccgaggaagagatctgggcctcgcgcaacttcctcttggagcagtacgcgggacacgagaggagccaagagtctatagaaggcgcattcgagaagcttctcatgtctagttttgtgaagaggaagaagactaaaatcaacctcaagacgaggttgaagaagaaagttgaggagtctcctccgtggcttaaagctcttcttgatttcgttgagatgcctcccatggatactgttttcagaagactctttcttttcgctttcatgggtggttggagtatcatgaactctgcagaaggcggtcctgcctttcaggtggcggtgtcgttggcggcttgcgtatatttccttaatgagaagacgaagagcttggggagagcttgcttaatcgggtttggtgcattaacagtcgggtggttctgcggttcgctagtcattcccatgattccgacggctttcattaacccgacatggaccctggagcttctaacgtcactggttgcttatgtgtttttgtttctttcttgtactttcctcaagtaggttgttgcacttttatccagactttgtgtttctttcttgtacctgttctcgccggaaaattgaacttgagttctacaacattggttaactcttgttaaagtatggaatcaagttgatcaggatcttaccaacc

SEQ ID NO: 61707 - protein, 258 aa, Triticum aestivum
  peptide (1)..(258): Ceres Seq. ID no. 15226352
  misc_feature (69)..(258): Homolog of NCBI NO: 16329734 NR Description: unknown protein [Synechocystis sp. PCC 6803]
  misc_feature (70)..(258): Homolog of NCBI NO: 23039527 NR Description: hypothetical protein [Trichodesmium erythraeum
  misc_feature (68)..(258): Homolog of NCBI NO: 23129945 NR Description: COG2214: DnaJ-class molecular chaperone [Nostoc
  misc_feature (69)..(258): Homolog of NCBI NO: 17230751 NR Description: hypothetical protein [Nostoc sp. PCC 7120]
  misc_feature (24)..(258): Homolog of NCBI NO: 18409276 NR Description: expressed protein [Arabidopsis thaliana]
  misc_feature (14)..(258): Homolog of NCBI NO: 11357625 NR Description: hypothetical protein F24M12.180 - Arabidopsis
  misc_feature (145)..(258): Homolog of NCBI NO: 37573058 NR Description: unknown protein [Oryza sativa (japonica
  misc_feature (1)..(258): Homolog of NCBI NO: 15237199 NR Description: expressed protein [Arabidopsis thaliana]
MSSSLLLSGSTVSSSFIAPSKLYLLRNQNQSLSLSRNVSRTFKPLRCSSADSPYGGNVPTFPRTRVWDPYKRLGISPYASEEEIWASRNFLLEQYAGHERSQESIEGAFEKLLMSSFVKRKKTKINLKTRLKKKVEESPPWLKALLDFVEMPPMDTVFRRLFLFAFMGGWSIMNSAEGGPAFQVAVSLAACVYFLNEKTKSLGRACLIGFGALTVGWFCGSLVIPMIPTAFINPTWTLELLTSLVAYVFLFLSCTFLK

SEQ ID NO: 61708 - protein, 145 aa, Triticum aestivum
  peptide (1)..(145): Ceres Seq. ID no. 15226353
  misc_feature (1)..(145): Homolog of NCBI NO: 16329734 NR Description: unknown protein [Synechocystis sp. PCC 6803]
  misc_feature (1)..(145): Homolog of NCBI NO: 23039527 NR Description: hypothetical protein [Trichodesmium erythraeum
  misc_feature (1)..(145): Homolog of NCBI NO: 23129945 NR Description: COG2214: DnaJ-class molecular chaperone [Nostoc
  misc_feature (1)..(145): Homolog of NCBI NO: 17230751 NR Description: hypothetical protein [Nostoc sp. PCC 7120]
  misc_feature (1)..(145): Homolog of NCBI NO: 18409276 NR Description: expressed protein [Arabidopsis thaliana]
  misc_feature (1)..(145): Homolog of NCBI NO: 11357625 NR Description: hypothetical protein F24M12.180 - Arabidopsis
  misc_feature (32)..(145): Homolog of NCBI NO: 37573058 NR Description: unknown protein [Oryza sativa (japonica
  misc_feature (1)..(145): Homolog of NCBI NO: 15237199 NR Description: expressed protein [Arabidopsis thaliana]
MSSFVKRKKTKINLKTRLKKKVEESPPWLKALLDFVEMPPMDTVFRRLFLFAFMGGWSIMNSAEGGPAFQVAVSLAACVYFLNEKTKSLGRACLIGFGALTVGWFCGSLVIPMIPTAFINPTWTLELLTSLVAYVFLFLSCTFLK

SEQ ID NO: 61709 - DNA, 1139 bp, Triticum aestivum
  misc_feature (1)..(1139): Ceres Seq. ID no. 15224904
gctagcttcctgagtagtacatcctcttgacgttgaccattcgctttcccatcgcagaggatcatgtccatgttcacctccagcagctccggcgtgccgtccccgtctccggaggcgggcagcagcatggtcagaacggcgcggcagccccagcgccaggcgtttgactacttcgtggttctagacttcgaggcgacgtgcgagaaaggcgcgcagatctacccgcaggagatcatcgagttcccctccgtgctcgtcgacggcgccaccggcgacctcgactccgccgagttccgcacctacgtgcgcccgcagcaccaccccgcgctgaccgacttctgcagggacctcaccggcatccggcaggcggacgtcgacggcggcgtgcagctggccgaggcgctccgcctgcacgccgcgtggctgcaggactcggcgtgggccaggagcggcggctgcttcgccgtcgtcacgtggggggactgggacctccgcaccatgctggagacggagtgccgcttcaaagacctcgccaagccgccctgcttcaaccactggatcaacctcaagatccccttcgccgcggcgatgggcggaggtcggtgggctgctctgcggtcggccgtcgaagcggcggggctccagtgggagggccgcgcgcactgcggcctcgacgacgctcgtaacacggcgcggcttctcgtggagctgatgcggcgcggcgtccagctcagcatcacgacctcgaccccatcgcctcaggtaactgtaactccatacggtggcgccgccgcggcgtgctactgctactgcggggtggcgagcagaggtggcgtggtggccgtgccggggccgatgcaggggagatgcttctacggttgcggtaactggacgccgtccatgggagcagcgtgctcctacttcacgtgggcagattaattgctactcaatccatgggtttggatttggagaatacgctataaattatatgtgcgagtatcactccagctctttgatttctcttgtcaacacagtgttgacaacactcttttgagcttggttttcttaacaacttgaatcctattgcgtggtgtatttgattttgtcatgaacttcaaattctatacatgtttgagtac

SEQ ID NO: 61710 - protein, 291 aa, Triticum aestivum
  peptide (1)..(291): Ceres Seq. ID no. 15224905
  misc_feature (231)..(289): Homolog of NCBI NO: 34903352 NR Description: unnamed protein product [Oryza sativa (japonica
  misc_feature (165)..(228): Homolog of NCBI NO: 34903352 NR Description: unnamed protein product [Oryza sativa (japonica
  misc_feature (19)..(230): Homolog of NCBI NO: 33859765 NR Description: prion protein interacting protein 1 [Mus
  misc_feature (19)..(230): Homolog of NCBI NO: 28174986 NR Description: Prnpip1 protein [Mus musculus]
  misc_feature (19)..(230): Homolog of NCBI NO: 37547043 NR Description: similar to prion protein interacting 1 like (30.8
  misc_feature (19)..(230): Homolog of NCBI NO: 2852640 NR Description: unknown [Homo sapiens]
  misc_feature (31)..(228): Homolog of NCBI NO: 26325030 NR Description: unnamed protein product [Mus musculus]
  misc_feature (31)..(228): Homolog of NCBI NO: 13386250 NR Description: RIKEN cDNA 4933424N09 [Mus musculus]
  misc_feature (27)..(228): Homolog of NCBI NO: 34534279 NR Description: unnamed protein product [Homo sapiens]
  misc_feature (27)..(228): Homolog of NCBI NO: 18087835 NR Description: hypothetical protein MGC16943 [Homo sapiens]
MSMFTSSSSGVPSPSPEAGSSMVRTARQPQRQAFDYFVVLDFEATCEKGAQIYPQEIIEFPSVLVDGATGDLDSAEFRTYVRPQHHPALTDFCRDLTGIRQADVDGGVQLAEALRLHAAWLQDSAWARSGGCFAVVTWGDWDLRTMLETECRFKDLAKPPCFNHWINLKIPFAAAMGGGRWAALRSAVEAAGLQWEGRAHCGLDDARNTARLLVELMRRGVQLSITTSTPSPQVTVTPYGGAAAACYCYCGVASRGGVVAVPGPMQGRCFYGCGNWTPSMGAACSYFTWAD

SEQ ID NO: 61711 - protein, 289 aa, Triticum aestivum
  peptide (1)..(289): Ceres Seq. ID no. 15224906
  misc_feature (229)..(287): Homolog of NCBI NO: 34903352 NR Description: unnamed protein product [Oryza sativa (japonica
  misc_feature (163)..(226): Homolog of NCBI NO: 34903352 NR Description: unnamed protein product [Oryza sativa (japonica
  misc_feature (17)..(228): Homolog of NCBI NO: 33859765 NR Description: prion protein interacting protein 1 [Mus
  misc_feature (17)..(228): Homolog of NCBI NO: 28174986 NR Description: Prnpip1 protein [Mus musculus]
  misc_feature (17)..(228): Homolog of NCBI NO: 37547043 NR Description: similar to prion protein interacting 1 like (30.8
  misc_feature (17)..(228): Homolog of NCBI NO: 2852640 NR Description: unknown [Homo sapiens]
  misc_feature (29)..(226): Homolog of NCBI NO: 26325030 NR Description: unnamed protein product [Mus musculus]
  misc_feature (29)..(226): Homolog of NCBI NO: 13386250 NR Description: RIKEN cDNA 4933424N09 [Mus musculus]
  misc_feature (25)..(226): Homolog of NCBI NO: 34534279 NR Description: unnamed protein product [Homo sapiens]
  misc_feature (25)..(226): Homolog of NCBI NO: 18087835 NR Description: hypothetical protein MGC16943 [Homo sapiens]
MFTSSSSGVPSPSPEAGSSMVRTARQPQRQAFDYFVVLDFEATCEKGAQIYPQEIIEFPSVLVDGATGDLDSAEFRTYVRPQHHPALTDFCRDLTGIRQADVDGGVQLAEALRLHAAWLQDSAWARSGGCFAVVTWGDWDLRTMLETECRFKDLAKPPCFNHWINLKIPFAAAMGGGRWAALRSAVEAAGLQWEGRAHCGLDDARNTARLLVELMRRGVQLSITTSTPSPQVTVTPYGGAAAACYCYCGVASRGGVVAVPGPMQGRCFYGCGNWTPSMGAACSYFTWAD

SEQ ID NO: 61712 - protein, 270 aa, Triticum aestivum
  peptide (1)..(270): Ceres Seq. ID no. 15224907
  misc_feature (210)..(268): Homolog of NCBI NO: 34903352 NR Description: unnamed protein product [Oryza sativa (japonica
  misc_feature (144)..(207): Homolog of NCBI NO: 34903352 NR Description: unnamed protein product [Oryza sativa (japonica
  misc_feature (1)..(209): Homolog of NCBI NO: 33859765 NR Description: prion protein interacting protein 1 [Mus
  misc_feature (1)..(209): Homolog of NCBI NO: 28174986 NR Description: Prnpip1 protein [Mus musculus]
  misc_feature (1)..(209): Homolog of NCBI NO: 37547043 NR Description: similar to prion protein interacting 1 like (30.8
  misc_feature (1)..(209): Homolog of NCBI NO: 2852640 NR Description: unknown [Homo sapiens]
  misc_feature (10)..(207): Homolog of NCBI NO: 26325030 NR Description: unnamed protein product [Mus musculus]
  misc_feature (10)..(207): Homolog of NCBI NO: 13386250 NR Description: RIKEN cDNA 4933424N09 [Mus musculus]
  misc_feature (6)..(207): Homolog of NCBI NO: 34534279 NR Description: unnamed protein product [Homo sapiens]
  misc_feature (6)..(207): Homolog of NCBI NO: 18087835 NR Description: hypothetical protein MGC16943 [Homo sapiens]
MVRTARQPQRQAFDYFVVLDFEATCEKGAQIYPQEIIEFPSVLVDGATGDLDSAEFRTYVRPQHHPALTDFCRDLTGIRQADVDGGVQLAEALRLHAAWLQDSAWARSGGCFAVVTWGDWDLRTMLETECRFKDLAKPPCFNHWINLKIPFAAAMGGGRWAALRSAVEAAGLQWEGRAHCGLDDARNTARLLVELMRRGVQLSITTSTPSPQVTVTPYGGAAAACYCYCGVASRGGVVAVPGPMQGRCFYGCGNWTPSMGAACSYFTWAD

SEQ ID NO: 61713 - DNA, 648 bp, Triticum aestivum
  misc_feature (1)..(648): Ceres Seq. ID no. 12624019
acactgaccgaagacatcgatatccatggccccgaccgtcatctccccagccacgggcgccgtcgcctcgcccatcgcgagcgacctcgggaaggccgcgcgctccgtcggactcgggctccccgcgctgccgccgctgcccggcctcgcatcccacggccagccccgcgtcgcgtccttttgcaaaaggctcgcgaggaacgtggtgtcaatggccgccggtgagccggccgcgccgctggccgacaacgccgagcttaccgagttcttcaactccttgaaacaagagtgggacagggtggaggacaagtacgcggtgaccacgctcgccgtcgccgccacgctcggcatgtggagcgccggcggagtagtatcggcaatcgacaggctccccgtggttccaggtctcatggaggtcgttggcattggctacagcgggtggtttgcgtacaagaacctgctattcaagcccgacaggaaagcgttcttcgctaaggtcaggaacatttacgaggatataatcagcggctagacgatgaagcacttgaagaggcacatcccaattgagagaagcacaaagtactcaaaacggagacgtgcaattactgtatatcaatatgtactatatatttgagcatagcatctaat

SEQ ID NO: 61714 - protein, 168 aa, Triticum aestivum
  peptide (1)..(168): Ceres Seq. ID no. 12624020
  misc_feature (56)..(166): Homolog of NCBI NO: 21554231 NR Description: unknown [Arabidopsis thaliana]
  misc_feature (12)..(160): Homolog of NCBI NO: 34909746 NR Description: contains ESTs
  misc_feature (56)..(166): Homolog of NCBI NO: 18403896 NR Description: expressed protein
  misc_feature (1)..(165): Homolog of NCBI NO: 18411555 NR Description: expressed protein
  misc_feature (1)..(165): Homolog of NCBI NO: 687677 NR Description: unknown
  misc_feature (33)..(152): Homolog of NCBI NO: 38175474 NR Description: unknown protein [Oryza sativa (japonica
  misc_feature (55)..(165): Homolog of NCBI NO: 34393236 NR Description: unknown protein [Oryza sativa (japonica
  misc_feature (1)..(166): Homolog of NCBI NO: 21555057 NR Description: unknown [Arabidopsis thaliana]
  misc_feature (1)..(166): Homolog of NCBI NO: 18407178 NR Description: expressed protein
  misc_feature (1)..(168): Homolog of NCBI NO: 37536446 NR Description: hypothetical protein [Oryza sativa (japonica
MAPTVISPATGAVASPIASDLGKAARSVGLGLPALPPLPGLASHGQPRVASFCKRLARNVVSMAAGEPAAPLADNAELTEFFNSLKQEWDRVEDKYAVTTLAVAATLGMWSAGGVVSAIDRLPVVPGLMEVVGIGYSGWFAYKNLLFKPDRKAFFAKVRNIYEDIISG

SEQ ID NO: 61715 - protein, 106 aa, Triticum aestivum
  peptide (1)..(106): Ceres Seq. ID no. 12624021
  misc_feature (1)..(104): Homolog of NCBI NO: 21554231 NR Description: unknown [Arabidopsis thaliana]
  misc_feature (1)..(98): Homolog of NCBI NO: 34909746 NR Description: contains ESTs
  misc_feature (1)..(104): Homolog of NCBI NO: 18403896 NR Description: expressed protein
  misc_feature (1)..(103): Homolog of NCBI NO: 18411555 NR Description: expressed protein
  misc_feature (1)..(103): Homolog of NCBI NO: 687677 NR Description: unknown
  misc_feature (1)..(90): Homolog of NCBI NO: 38175474 NR Description: unknown protein [Oryza sativa (japonica
  misc_feature (1)..(103): Homolog of NCBI NO: 34393236 NR Description: unknown protein [Oryza sativa (japonica
  misc_feature (1)..(104): Homolog of NCBI NO: 21555057 NR Description: unknown [Arabidopsis thaliana]
  misc_feature (1)..(104): Homolog of NCBI NO: 18407178 NR Description: expressed protein
  misc_feature (1)..(106): Homolog of NCBI NO: 37536446 NR Description: hypothetical protein [Oryza sativa (japonica
MAAGEPAAPLADNAELTEFFNSLKQEWDRVEDKYAVTTLAVAATLGMWSAGGVVSAIDRLPVVPGLMEVVGIGYSGWFAYKNLLFKPDRKAFFAKVRNIYEDIISG

SEQ ID NO: 61716 - protein, 92 aa, Triticum aestivum
  peptide (1)..(92): Ceres Seq. ID no. 12624022
TDRRHRYPWPRPSSPQPRAPSPRPSRATSGRPRAPSDSGSPRCRRCPASHPTASPASRPFAKGSRGTWCQWPPVSRPRRWPTTPSLPSSSTP

SEQ ID NO: 61717 - DNA, 825 bp, Triticum aestivum
  misc_feature (1)..(825): Ceres Seq. ID no. 12784326
aatctctcggagcctcacaaccaccgtatctcgctgcttctccgccgagccgatcacgagcagcaactagttgagatcaagccgtcgccgtcgccgtattcttcttcctctccgacaggaggttaagccgccgtcgccgtcttcttcttcgtctccgacaggagtttaagccgccgtcctcgtcttgttcttcctcgtcttcatcaggaggagcggccggaaacctcgggaagagctggccaacctggatcagctggagggcggcgccgcctccctgcgcgggcacgagaccgaggagcagcgcaacaaattcctcgtgctccgcctctacgaggcgctcaacggccgcgaccacgccgccgtgcactccctcctcgcccccgacctcgagtggtggttccatggcccgcccacgcaccagcacatgatgcgcctcctcaccggctccagctccccgtcctcctcctcctccttccgcttccagccgcgctccgtcgacgccttcggctccaccgtcatcgccgagggcgtcgacgacaaggccaaggcgtactgggtgcacgcctggaccgtgggtgccgatggggtgatcacccagctgcgcgaatacttcaacaccgacctcaccgtcacgcgcctcgccgccgccgccgcgtccaagtgcgtctggcagagccgccgccccgaccgcgcccgcaactccctcccgggcctcgtcctcgccctctaactgcggaaagcaatgtactcctactgtgtaggttttttattgtgggattacttaccacatttccgcacgtctcgtggacagaatgatgaattggt

SEQ ID NO: 61718 - protein, 101 aa, Triticum aestivum
  peptide (1)..(101): Ceres Seq. ID no. 12784327
  misc_feature (2)..(74): Homolog of NCBI NO: 4574320 NR Description: wound-induced protein WI12 [Mesembryanthemum
  misc_feature (2)..(101): Homolog of NCBI NO: 10241935 NR Description: elicitor inducible protein [Nicotiana tabacum]
  misc_feature (2)..(101): Homolog of NCBI NO: 139780 NR Description: WOUND-INDUCED PROTEIN 1
  misc_feature (2)..(101): Homolog of NCBI NO: 15028339 NR Description: unknown protein [Arabidopsis thaliana]
  misc_feature (1)..(101): Homolog of NCBI NO: 33146884 NR Description: unknown protein [Oryza sativa (japonica
  misc_feature (1)..(101): Homolog of NCBI NO: 15241041 NR Description: putative protein
  misc_feature (1)..(101): Homolog of NCBI NO: 15228414 NR Description: unknown protein; protein id: At3g10980.1
  misc_feature (1)..(101): Homolog of NCBI NO: 34898184 NR Description: P0034A04.2 [Oryza sativa (japonica
MMRLLTGSSSPSSSSSFRFQPRSVDAFGSTVIAEGVDDKAKAYWVHAWTVGADGVITQLREYFNTDLTVTRLAAAAASKCVWQSRRPDRARNSLPGLVLAL

SEQ ID NO: 61719 - protein, 100 aa, Triticum aestivum
  peptide (1)..(100): Ceres Seq. ID no. 12784328
  misc_feature (1)..(73): Homolog of NCBI NO: 4574320 NR Description: wound-induced protein WI12 [Mesembryanthemum
  misc_feature (1)..(100): Homolog of NCBI NO: 10241935 NR Description: elicitor inducible protein [Nicotiana tabacum]
  misc_feature (1)..(100): Homolog of NCBI NO: 139780 NR Description: WOUND-INDUCED PROTEIN 1
  misc_feature (1)..(100): Homolog of NCBI NO: 15028339 NR Description: unknown protein [Arabidopsis thaliana]
  misc_feature (1)..(100): Homolog of NCBI NO: 33146884 NR Description: unknown protein [Oryza sativa (japonica
  misc_feature (1)..(100): Homolog of NCBI NO: 15241041 NR Description: putative protein
  misc_feature (1)..(100): Homolog of NCBI NO: 15228414 NR Description: unknown protein; protein id: At3g10980.1
  misc_feature (1)..(100): Homolog of NCBI NO: 34898184 NR Description: P0034A04.2 [Oryza sativa (japonica
MRLLTGSSSPSSSSSFRFQPRSVDAFGSTVIAEGVDDKAKAYWVHAWTVGADGVITQLREYFNTDLTVTRLAAAAASKCVWQSRRPDRARNSLPGLVLAL

SEQ ID NO: 61720 - DNA, 912 bp, Triticum aestivum
  misc_feature (1)..(912): Ceres Seq. ID no. 15226744
attcaccgacagtctctgactctcttgtcttaataacccccctgccatcctaggaagaatcgaaagagcgagaaaatgatcagaacgtttttcctcttccttgtcttcttcatcatatggacgcaagtccacgcgcagctaattccaccgtcgaagcccgatggtttcgtatacccaccgggtcgccgtgttgacccggattctatactgatcgaggcgttttatgacccggtgtgcccgtacagtagagactcttggccgccgctaaagcaagcgcttaaacactacggatctcgcgtttccttgctcctccacctacttccgttaccgtaccatgacaatgcgtatgtaacctctcgtgctttacacatagtgaatattcacaacgctaatgctaccttcagtttgctggaagggttctttaagcatcaggcaatgttctatggtgcgcaaacacaactcctgactagacctgaagttgtgggaagaattgtcaagcttggaacagccacgttgggaaactcttatcatcatgttcttaaatctggattcaacgacacaaagtcggaacgtgcaaccagagtttcattcaagtatagcgcttcaagaggtgtgtatggaacaccaaccttctccgtgaatgggttcgcattgccagatgctgatgatccctcagattttggaggatggaaaaaaattattgattctctggttcaaccacacaaagtacaaggtagctagagatgcaagatgatctcgtttcctttatttgacgatcgctagtactttaccttttttcacatctatataatgtaaaaataagagtgctattgctgtgtgatgtgacaatatgcactgtatatataatttgtcaaaacctttttatcgtacaaatgaaacatatattcattg

SEQ ID NO: 61721 - protein, 221 aa, Triticum aestivum
  peptide (1)..(221): Ceres Seq. ID no. 15226745
  misc_feature (18)..(173): Homolog of NCBI NO: 32526672 NR Description: unknown protein [Oryza sativa (japonica
  misc_feature (20)..(213): Homolog of NCBI NO: 38346025 NR Description: OSJNBb0071D01.2 [Oryza sativa (japonica
  misc_feature (1)..(212): Homolog of NCBI NO: 25518088 NR Description: T20H2.2 protein - Arabidopsis thaliana
  misc_feature (1)..(218): Homolog of NCBI NO: 22329686 NR Description: expressed protein [Arabidopsis thaliana]
  misc_feature (1)..(195): Homolog of NCBI NO: 8778813 NR Description: T4O12.23 [Arabidopsis thaliana]
  misc_feature (1)..(219): Homolog of NCBI NO: 15222928 NR Description: expressed protein [Arabidopsis thaliana]
MIRTFFLFLVFFIIWTQVHAQLIPPSKPDGFVYPPGRRVDPDSILIEAFYDPVCPYSRDSWPPLKQALKHYGSRVSLLLHLLPLPYHDNAYVTSRALHIVNIHNANATFSLLEGFFKHQAMFYGAQTQLLTRPEVVGRIVKLGTATLGNSYHHVLKSGFNDTKSERATRVSFKYSASRGVYGTPTFSVNGFALPDADDPSDFGGWKKIIDSLVQPHKVQGS

SEQ ID NO: 61722 - DNA, 818 bp, Triticum aestivum
  misc_feature (1)..(818): Ceres Seq. ID no. 13661903
aactagaacatcctaatcgaaaatattttttcgccttacacctcgccatcgactcacatacttttgctggccggccggagccacacgaccacaaggaaggagctaagctagcaccgacaaacagcccttgctgccgtcccgatggcaagcaccaacatggcgtcggccacctccagattcatgctggcggcgggcatccccagcggcaccaacggcggcgtgagcagccgcgtcagcttcgtcccctccaaccgactgggcttgaagctcgtggcccgcgccgaggaggagcccactgccgccgcgccggcggaaccagcaccggccgcggaggagaaaccggacgccgccgtggccaccaaggagcccgccaaagccaagccgccgccgaggggacccaagaggggaaccaaggtgaagattctgaggagggagtcctactggtacaacgggaccggatccgtcgtcacggttgatcaggatcccaacacccgttacccggtggtggtgcgtttcgccaaggtgaactacgccggcgtgtcgaccaacaactacgccctggacgagatcaaggaggttgctgcttaaacgatcgaagctgccgcgtgtgctccatccaatgtttgtatcagtagctcgtcaagtgacgatgtgaatgttagcctctcacaaaccttatgtgtaatacctctgcgattatatgtatttgcctgcttcctcatggacctaataatctcctcctgttgcttaagatgattgcattcttgctcacttttgtacaaaagatcggttgttcatgttaccggaaggctacacag

SEQ ID NO: 61723 - protein, 157 aa, Triticum aestivum
  peptide (1)..(157): Ceres Seq. ID no. 13661904
LEHPNRKYFFALHLAIDSHTFAGRPEPHDHKEGAKLAPTNSPCCRPDGKHQHGVGHLQIHAGGGHPQRHQRRREQPRQLRPLQPTGLEARGPRRGGAHCRRAGGTSTGRGGETGRRRGHQGARQSQAAAEGTQEGNQGEDSEEGVLLVQRDRIRRHG

SEQ ID NO: 61724 - protein, 148 aa, Triticum aestivum
  peptide (1)..(148): Ceres Seq. ID no. 13661905
  misc_feature (86)..(147): Pfam Name: Photosystem I reaction centre subunit IV / PsaE Pfam Description: Photosystem I reaction centre subunit IV / PsaE
  misc_feature (1)..(146): Homolog of NCBI NO: 26986114 NR Description: putative photosystem I reaction centre subunit IV
  misc_feature (1)..(146): Homolog of NCBI NO: 2499967 NR Description: Photosystem I reaction center subunit IV B,
  misc_feature (31)..(148): Homolog of NCBI NO: 22091414 NR Description: putative photosystem I subunit PSI-E [Arabidopsis
  misc_feature (1)..(146): Homolog of NCBI NO: 2499966 NR Description: Photosystem I reaction center subunit IV A,
  misc_feature (6)..(146): Homolog of NCBI NO: 21555308 NR Description: Photosystem I reaction center subunit IV B,
  misc_feature (6)..(146): Homolog of NCBI NO: 15225331 NR Description: photosystem I reaction center subunit IV -related
  misc_feature (6)..(148): Homolog of NCBI NO: 30688100 NR Description: photosystem I subunit PSI-E - like protein
  misc_feature (6)..(148): Homolog of NCBI NO: 24030202 NR Description: putative photosystem I subunit PSI-E protein
  misc_feature (1)..(146): Homolog of NCBI NO: 34394725 NR Description: putative Photosystem I reaction center subunit IV
  misc_feature (1)..(148): Homolog of NCBI NO: 131176 NR Description: Photosystem I reaction center subunit IV,
MASTNMASATSRFMLAAGIPSGTNGGVSSRVSFVPSNRLGLKLVARAEEEPTAAAPAEPAPAAEEKPDAAVATKEPAKAKPPPRGPKRGTKVKILRRESYWYNGTGSVVTVDQDPNTRYPVVVRFAKVNYAGVSTNNYALDEIKEVAA

SEQ ID NO: 61725 - protein, 143 aa, Triticum aestivum
  peptide (1)..(143): Ceres Seq. ID no. 13661906
  misc_feature (81)..(142): Pfam Name: Photosystem I reaction centre subunit IV / PsaE Pfam Description: Photosystem I reaction centre subunit IV / PsaE
  misc_feature (1)..(141): Homolog of NCBI NO: 26986114 NR Description: putative photosystem I reaction centre subunit IV
  misc_feature (1)..(141): Homolog of NCBI NO: 2499967 NR Description: Photosystem I reaction center subunit IV B,
  misc_feature (26)..(143): Homolog of NCBI NO: 22091414 NR Description: putative photosystem I subunit PSI-E [Arabidopsis
  misc_feature (1)..(141): Homolog of NCBI NO: 2499966 NR Description: Photosystem I reaction center subunit IV A,
  misc_feature (1)..(141): Homolog of NCBI NO: 21555308 NR Description: Photosystem I reaction center subunit IV B,
  misc_feature (1)..(141): Homolog of NCBI NO: 15225331 NR Description: photosystem I reaction center subunit IV -related
  misc_feature (1)..(143): Homolog of NCBI NO: 30688100 NR Description: photosystem I subunit PSI-E - like protein
  misc_feature (1)..(143): Homolog of NCBI NO: 24030202 NR Description: putative photosystem I subunit PSI-E protein
  misc_feature (1)..(141): Homolog of NCBI NO: 34394725 NR Description: putative Photosystem I reaction center subunit IV
  misc_feature (1)..(143): Homolog of NCBI NO: 131176 NR Description: Photosystem I reaction center subunit IV,
MASATSRFMLAAGIPSGTNGGVSSRVSFVPSNRLGLKLVARAEEEPTAAAPAEPAPAAEEKPDAAVATKEPAKAKPPPRGPKRGTKVKILRRESYWYNGTGSVVTVDQDPNTRYPVVVRFAKVNYAGVSTNNYALDEIKEVAA

SEQ ID NO: 61726 - DNA, 839 bp, Triticum aestivum
  misc_feature (1)..(839): Ceres Seq. ID no. 12624558
aagcccatacatccacactgcttagtctatagactctataccatagtttcaccaccacctagctttaccagaaatggagggtcagagatcacagcgctggggttacttgaaagacaaggctatagccaccagccttgctgaagaagaaacggagaatagcatggatggagaggaggatgatactggagatgaagacaaaaggaagagagtgatagagagagctagaggtcctaacacagaacgtgttcccttgcggctgtgcctggtcgataggtgcactgctaacttaactgaggccaagcagtattaccgcagacacaaagtctgtgaggttcatgcaaaggcctcttctgcaactgttgctggagtcaagcaacgtttttgtcaacaatgcagcaggttccatgagctagcagagtttgatgaaactaaaagaagttgcaggaggcgcttagctggacacaatgagaggaggaggaagatatccggtgacagttacggagaagggtcaggccggagaggggttagcttgacacagactcaagaaagaaacaggatagacatgaaacttcctatgactaactcaccattcaagcgaccacagatcagataaaacaatatcaactcacccaaacgctctctctcttctgtcatctacttatgttctatgtctacgttctcttgttatccaaataatggcatctaaccatgtggtattatctcctacacctctatataattacaaaactctagtaccctttatgtaatcatgtaaaggatgcctatccacaaatgtataagaccttatcatactcttgtattgtctaattatgtttcgt

SEQ ID NO: 61727 - protein, 179 aa, Triticum aestivum
  peptide (1)..(179): Ceres Seq. ID no. 12624559
  misc_feature (62)..(140): Pfam Name: SBP domain Pfam Description: SBP domain
  misc_feature (13)..(149): Homolog of NCBI NO: 6094241 NR Description: SQUAMOSA-PROMOTER BINDING PROTEIN 2
  misc_feature (21)..(140): Homolog of NCBI NO: 25408313 NR Description: probable squamosa-promoter binding protein
  misc_feature (27)..(146): Homolog of NCBI NO: 30577628 NR Description: squamosa promoter binding like-protein [Betula
  misc_feature (6)..(140): Homolog of NCBI NO: 21618221 NR Description: putative squamosa-promoter binding protein
  misc_feature (6)..(140): Homolog of NCBI NO: 18403387 NR Description: putative squamosa-promoter binding protein
  misc_feature (33)..(142): Homolog of NCBI NO: 6094239 NR Description: SQUAMOSA-PROMOTER BINDING PROTEIN 1
  misc_feature (10)..(179): Homolog of NCBI NO: 25456654 NR Description: squamosa promoter binding protein 4
  misc_feature (1)..(179): Homolog of NCBI NO: 15219210 NR Description: transcription factor, putative
  misc_feature (1)..(138): Homolog of NCBI NO: 25456671 NR Description: squamosa promoter binding protein-like 5
  misc_feature (1)..(179): Homolog of NCBI NO: 15232541 NR Description: squamosa promoter binding protein-like 5; protein
MEGQRSQRWGYLKDKAIATSLAEEETENSMDGEEDDTGDEDKRKRVIERARGPNTERVPLRLCLVDRCTANLTEAKQYYRRHKVCEVHAKASSATVAGVKQRFCQQCSRFHELAEFDETKRSCRRRLAGHNERRRKISGDSYGEGSGRRGVSLTQTQERNRIDMKLPMTNSPFKRPQIR

SEQ ID NO: 61728 - protein, 150 aa, Triticum aestivum
  peptide (1)..(150): Ceres Seq. ID no. 12624560
  misc_feature (33)..(111): Pfam Name: SBP domain Pfam Description: SBP domain
  misc_feature (1)..(120): Homolog of NCBI NO: 6094241 NR Description: SQUAMOSA-PROMOTER BINDING PROTEIN 2
  misc_feature (1)..(111): Homolog of NCBI NO: 25408313 NR Description: probable squamosa-promoter binding protein
  misc_feature (1)..(117): Homolog of NCBI NO: 30577628 NR Description: squamosa promoter binding like-protein [Betula
  misc_feature (1)..(111): Homolog of NCBI NO: 21618221 NR Description: putative squamosa-promoter binding protein
  misc_feature (1)..(111): Homolog of NCBI NO: 18403387 NR Description: putative squamosa-promoter binding protein
  misc_feature (4)..(113): Homolog of NCBI NO: 6094239 NR Description: SQUAMOSA-PROMOTER BINDING PROTEIN 1
  misc_feature (1)..(150): Homolog of NCBI NO: 25456654 NR Description: squamosa promoter binding protein 4
  misc_feature (1)..(150): Homolog of NCBI NO: 15219210 NR Description: transcription factor, putative
  misc_feature (1)..(109): Homolog of NCBI NO: 25456671 NR Description: squamosa promoter binding protein-like 5
  misc_feature (1)..(150): Homolog of NCBI NO: 15232541 NR Description: squamosa promoter binding protein-like 5; protein
MDGEEDDTGDEDKRKRVIERARGPNTERVPLRLCLVDRCTANLTEAKQYYRRHKVCEVHAKASSATVAGVKQRFCQQCSRFHELAEFDETKRSCRRRLAGHNERRRKISGDSYGEGSGRRGVSLTQTQERNRIDMKLPMTNSPFKRPQIR

SEQ ID NO: 61729 - DNA, 854 bp, Triticum aestivum
  misc_feature (1)..(854): Ceres Seq. ID no. 12624081
aatcgcttcttcgaaacgccaaaagagcaacaacatccaatggcttctcacaccttcctctccttctcatcgcctccgcgcctcctcgtttcccctccgtccactctccgttcctctttcggcggcgtctctctcaacctccaccgtccccagtctgtttccttcccggcctcgaagaaatcgctgacagtcgtttccgccgcgaagaaagctgttgctgtgctcaagggtaactccgacgtcgaaggagttgttactttgacacaagaagacacaggtcctacaaaagtgagtgttcgtatcaccggtctcacaccagggcctcatggctttcacctccatgagtttggtgatacaacaaatggatgcatctcaacagggccacatttcaaccctaacaacatgacacacggagctcctgaagacgagatccgtcatgcgggtgacctgggaaacattactgccaaggccgatggcgtggcagaaacaacacttgtggacaatcagattcctctgactggtcctaactctgttgttggaagagcctttgtggttcacgagcttaaggatgacctcggaaagggtgggcatgagcttagcctgaccactggaaacgcaggcgggagattggcatgcggtgtggttggtttgacgccgctctaagtctgggctaagtaagtactttggtgtctactgtgttggtcgtcttgtctgttgaatcagatgtcaaataaaagttggctgaataagcttttgatgtttatgttcctagcatcaaagtctctttctggagttgtgcctttgtaaacgtgtttgttacttttggtttaaatctgcatttgatcgtttgtttt

SEQ ID NO: 61730 - protein, 220 aa, Triticum aestivum
  peptide (1)..(220): Ceres Seq. ID no. 12624082
  misc_feature (68)..(219): Pfam Name: Copper/zinc superoxide dismutase (SODC) Pfam Description: Copper/zinc superoxide dismutase (SODC)
  misc_feature (15)..(220): Homolog of NCBI NO: 3914999 NR Description: Superoxide dismutase [Cu-Zn], chloroplast
  misc_feature (16)..(220): Homolog of NCBI NO: 12230570 NR Description: Superoxide dismutase [Cu-Zn], chloroplast
  misc_feature (14)..(220): Homolog of NCBI NO: 38073257 NR Description: superoxide dismutase [Trifolium pratense]
  misc_feature (14)..(220): Homolog of NCBI NO: 12230569 NR Description: Superoxide dismutase [Cu-Zn], chloroplast
  misc_feature (14)..(220): Homolog of NCBI NO: 134683 NR Description: Superoxide dismutase [Cu-Zn], chloroplast
  misc_feature (14)..(220): Homolog of NCBI NO: 20900 NR Description: Cu/Zn superoxide dismutase II [Pisum sativum]
  misc_feature (15)..(218): Homolog of NCBI NO: 25285791 NR Description: probable copper/zinc superoxide dismutase
  misc_feature (15)..(220): Homolog of NCBI NO: 5689611 NR Description: copper/zinc superoxide dismutase [Arabidopsis
  misc_feature (15)..(220): Homolog of NCBI NO: 18401659 NR Description: copper/zinc superoxide dismutase (CSD2)
  misc_feature (15)..(220): Homolog of NCBI NO: 11358868 NR Description: superoxide dismutase (EC 1.15.1.1) (Cu-Zn)
NRFFETPKEQQHPMASHTFLSFSSPPRLLVSPPSTLRSSFGGVSLNLHRPQSVSFPASKKSLTVVSAAKKAVAVLKGNSDVEGVVTLTQEDTGPTKVSVRITGLTPGPHGFHLHEFGDTTNGCISTGPHFNPNNMTHGAPEDEIRHAGDLGNITAKADGVAETTLVDNQIPLTGPNSVVGRAFVVHELKDDLGKGGHELSLTTGNAGGRLACGVVGLTPL

SEQ ID NO: 61731 - protein, 207 aa, Triticum aestivum
  peptide (1)..(207): Ceres Seq. ID no. 12624083
  misc_feature (55)..(206): Pfam Name: Copper/zinc superoxide dismutase (SODC) Pfam Description: Copper/zinc superoxide dismutase (SODC)
  misc_feature (2)..(207): Homolog of NCBI NO: 3914999 NR Description: Superoxide dismutase [Cu-Zn], chloroplast
  misc_feature (3)..(207): Homolog of NCBI NO: 12230570 NR Description: Superoxide dismutase [Cu-Zn], chloroplast
  misc_feature (1)..(207): Homolog of NCBI NO: 38073257 NR Description: superoxide dismutase [Trifolium pratense]
  misc_feature (1)..(207): Homolog of NCBI NO: 12230569 NR Description: Superoxide dismutase [Cu-Zn], chloroplast
  misc_feature (1)..(207): Homolog of NCBI NO: 134683 NR Description: Superoxide dismutase [Cu-Zn], chloroplast
  misc_feature (1)..(207): Homolog of NCBI NO: 20900 NR Description: Cu/Zn superoxide dismutase II [Pisum sativum]
  misc_feature (2)..(205): Homolog of NCBI NO: 25285791 NR Description: probable copper/zinc superoxide dismutase
  misc_feature (2)..(207): Homolog of NCBI NO: 5689611 NR Description: copper/zinc superoxide dismutase [Arabidopsis
  misc_feature (2)..(207): Homolog of NCBI NO: 18401659 NR Description: copper/zinc superoxide dismutase (CSD2)
  misc_feature (2)..(207): Homolog of NCBI NO: 11358868 NR Description: superoxide dismutase (EC 1.15.1.1) (Cu-Zn)
MASHTFLSFSSPPRLLVSPPSTLRSSFGGVSLNLHRPQSVSFPASKKSLTVVSAAKKAVAVLKGNSDVEGVVTLTQEDTGPTKVSVRITGLTPGPHGFHLHEFGDTTNGCISTGPHFNPNNMTHGAPEDEIRHAGDLGNITAKADGVAETTLVDNQIPLTGPNSVVGRAFVVHELKDDLGKGGHELSLTTGNAGGRLACGVVGLTPL

SEQ ID NO: 61732 - DNA, 780 bp, Triticum aestivum
  misc_feature (1)..(780): Ceres Seq. ID no. 15172618
aaatcacccacagctaagcttccgccacccaactcttccgtccatccaaaagacgtacggcacgtgcaagttcgaagaaggaaagcatcgaatcaatggcgggcgtgagccggagcatggtggcgccgctgctggtgctgaacctggtgatgtacatcgtcgtcatcggcctcgccagctggaacctcaaccacttcatcaacggcaccaccaactacgccggcgtggccggcaacggcgccaccttctacttcctcctcttcgccatcctcgccggcgtggtgggcgccgcctccaagctcgccggcgtgcaccacgtcaggacctggcgcggggacagcctcgccaccagcgcctcctccgcgctcgtcgcctgggccatcacggcgctcgccttcgggctcgcgtgcaaggagatccacgtcggcggtcaccgcggctggcggctccgggttctcgaggcgttcatcatcatactcgccttcacccagctgctctacgtgatggcgctccacgccggtctcttcggcaaccagttcggcgacgggtacggcgcggagcaccagtacggcgaccaccatcacaagggcatgggcaccggcgcccccgccgccagggtctgaccgtctttgagcttttactttgcttaatttcttgatgggccaatgaacaagatgtatgtatgtatcaatgtatgtgtgcgtgtgtttgtgttgggcgagtgtgatgtaacatgtatgcatacatagtgtcggtgcatgtgctgccgttgttttttac

SEQ ID NO: 61733 - protein, 218 aa, Triticum aestivum
  peptide (1)..(218): Ceres Seq. ID no. 15172619
NHPQLSFRHPTLPSIQKTYGTCKFEEGKHRINGGREPEHGGAAAGAEPGDVHRRHRPRQLEPQPLHQRHHQLRRRGRQRRHLLLPPLRHPRRRGGRRLQARRRAPRQDLARGQPRHQRLLRARRLGHHGARLRARVQGDPRRRSPRLAAPGSRGVHHHTRLHPAALRDGAPRRSLRQPVRRRVRRGAPVRRPPSQGHGHRRPRRQGLTVFELLLCLIS

SEQ ID NO: 61734 - protein, 175 aa, Triticum aestivum
  peptide (1)..(175): Ceres Seq. ID no. 15172620
  misc_feature (14)..(143): Pfam Name: AWPM-19-like family Pfam Description: AWPM-19-like family
  misc_feature (2)..(151): Homolog of NCBI NO: 15239619 NR Description: plasma membrane associated protein -related
  misc_feature (1)..(140): Homolog of NCBI NO: 15218953 NR Description: plasma membrane associated protein -related
  misc_feature (1)..(142): Homolog of NCBI NO: 34911480 NR Description: putative plasma membrane associated protein
  misc_feature (4)..(165): Homolog of NCBI NO: 18390408 NR Description: expressed protein [Arabidopsis thaliana]
  misc_feature (1)..(171): Homolog of NCBI NO: 7488688 NR Description: maturation protein PM3 - soybean
  misc_feature (1)..(172): Homolog of NCBI NO: 4097340 NR Description: hydrophobic LEA-like protein [Oryza sativa]
  misc_feature (1)..(175): Homolog of NCBI NO: 7489659 NR Description: ABA-induced plasma membrane protein PM 19 - wheat
  misc_feature (1)..(175): Homolog of NCBI NO: 6851373 NR Description: plasma membrane associated protein [Hordeum
MAGVSRSMVAPLLVLNLVMYIVVIGLASWNLNHFINGTTNYAGVAGNGATFYFLLFAILAGVVGAASKLAGVHHVRTWRGDSLATSASSALVAWAITALAFGLACKEIHVGGHRGWRLRVLEAFIIILAFTQLLYVMALHAGLFGNQFGDGYGAEHQYGDHHHKGMGTGAPAARV

SEQ ID NO: 61735 - protein, 168 aa, Triticum aestivum
  peptide (1)..(168): Ceres Seq. ID no. 15172621
  misc_feature (7)..(136): Pfam Name: AWPM-19-like family Pfam Description: AWPM-19-like family
  misc_feature (1)..(144): Homolog of NCBI NO: 15239619 NR Description: plasma membrane associated protein -related
  misc_feature (1)..(133): Homolog of NCBI NO: 15218953 NR Description: plasma membrane associated protein -related
  misc_feature (1)..(135): Homolog of NCBI NO: 34911480 NR Description: putative plasma membrane associated protein
  misc_feature (1)..(158): Homolog of NCBI NO: 18390408 NR Description: expressed protein [Arabidopsis thaliana]
  misc_feature (1)..(164): Homolog of NCBI NO: 7488688 NR Description: maturation protein PM3 - soybean
  misc_feature (1)..(165): Homolog of NCBI NO: 4097340 NR Description: hydrophobic LEA-like protein [Oryza sativa]
  misc_feature (1)..(168): Homolog of NCBI NO: 7489659 NR Description: ABA-induced plasma membrane protein PM 19 - wheat
  misc_feature (1)..(168): Homolog of NCBI NO: 6851373 NR Description: plasma membrane associated protein [Hordeum
MVAPLLVLNLVMYIVVIGLASWNLNHFINGTTNYAGVAGNGATFYFLLFAILAGVVGAASKLAGVHHVRTWRGDSLATSASSALVAWAITALAFGLACKEIHVGGHRGWRLRVLEAFIIILAFTQLLYVMALHAGLFGNQFGDGYGAEHQYGDHHHKGMGTGAPAARV

SEQ ID NO: 61736 - DNA, 940 bp, Triticum aestivum
  misc_feature (1)..(940): Ceres Seq. ID no. 15173936
aagaacgcaatgtctggtgccgctgacacagctgcggccgccgccgtcgccgccgtcgccggctcatcgggtcccgcggcgttgccgctcagcggacgcgtggccatcgtgaccggcgcgtcgcgcggcatcgggcgagccatcgcggcccacctctcctccctcggcgcaagcgtcgtcctgggctacgcggccagcgcggccgaggccgacgcgctcgccgcagagctcccacgagccgtcgccgtgaaggccaacgtgtccgaagaggccggcgtgcgctccctcttcgacgccgccgagtcggccttcggctgcgcggcgccgcacatcatagtcgccaacgccggcgtgctcggcgacaagtacccgcccctcgccgacaccgccacggcggacttcgaccgcgtgttcgccgtcaacacgcgcggcgccttcctctgcctccgcgaggccgccaaccggctgccccgtggcggcggcggccggatcgtggccgtgacgtcgtccgtggtcgggtcgaacccgacggggtactccgcctacaccgcgtccaaggcggccgtggaggcgatggtgcgtaccatggccaaggagctcaagggcacgcgcgtgacggccaactgcgtggctccgggggccacggccacggacatgttcttcgccgggaagagcaacgagacggtgaggcggaccgcggagatgaacccgatggagcggctcggggaggccggcgacatcgcaccagtggtcggcttcctctgcactgacgccgccgagtgggtcaacgggcaggtcatcagggtcaacggcgggtacgtctgataatctgctggctggcctgtcatgccattagacattacggtgggagcgaaataatgcctctgggtgttgcagaaaactaaaaaaatatatctgccggaaatttatagcacaattt

SEQ ID NO: 61737 - protein, 274 aa, Triticum aestivum
  peptide (1)..(274): Ceres Seq. ID no. 15173937
  misc_feature (30)..(272): Homolog of NCBI NO: 14280348 NR Description: oxygenase-reductase PgaM [Streptomyces sp. PGA64]
  misc_feature (30)..(272): Homolog of NCBI NO: 29469257 NR Description: oxygenase reductase-like protein [Streptomyces
  misc_feature (30)..(272): Homolog of NCBI NO: 14346023 NR Description: oxygenase-like protein [Streptomyces aureofaciens]
  misc_feature (1)..(272): Homolog of NCBI NO: 16264709 NR Description: putative SDR family dehydrogenase protein
  misc_feature (127)..(274): Homolog of NCBI NO: 14326547 NR Description: AT3g03980/T11I18_9 [Arabidopsis thaliana]
  misc_feature (26)..(274): Homolog of NCBI NO: 15235621 NR Description: short-chain dehydrogenase/reductase family
  misc_feature (28)..(274): Homolog of NCBI NO: 15229203 NR Description: short-chain dehydrogenase/reductase family
  misc_feature (26)..(272): Homolog of NCBI NO: 34395018 NR Description: putative short-chain dehydrogenase/reductase
  misc_feature (8)..(274): Homolog of NCBI NO: 34395019 NR Description: putative short-chain dehydrogenase/reductase
  misc_feature (13)..(274): Homolog of NCBI NO: 34393370 NR Description: putative short-chain dehydrogenase/reductase
KNAMSGAADTAAAAAVAAVAGSSGPAALPLSGRVAIVTGASRGIGRAIAAHLSSLGASVVLGYAASAAEADALAAELPRAVAVKANVSEEAGVRSLFDAAESAFGCAAPHIIVANAGVLGDKYPPLADTATADFDRVFAVNTRGAFLCLREAANRLPRGGGGRIVAVTSSVVGSNPTGYSAYTASKAAVEAMVRTMAKELKGTRVTANCVAPGATATDMFFAGKSNETVRRTAEMNPMERLGEAGDIAPVVGFLCTDAAEWVNGQVIRVNGGYV

SEQ ID NO: 61738 - protein, 271 aa, Triticum aestivum
  peptide (1)..(271): Ceres Seq. ID no. 15173938
  misc_feature (27)..(269): Homolog of NCBI NO: 14280348 NR Description: oxygenase-reductase PgaM [Streptomyces sp. PGA64]
  misc_feature (27)..(269): Homolog of NCBI NO: 29469257 NR Description: oxygenase reductase-like protein [Streptomyces
  misc_feature (27)..(269): Homolog of NCBI NO: 14346023 NR Description: oxygenase-like protein [Streptomyces aureofaciens]
  misc_feature (1)..(269): Homolog of NCBI NO: 16264709 NR Description: putative SDR family dehydrogenase protein
  misc_feature (124)..(271): Homolog of NCBI NO: 14326547 NR Description: AT3g03980/T11I18_9 [Arabidopsis thaliana]
  misc_feature (23)..(271): Homolog of NCBI NO: 15235621 NR Description: short-chain dehydrogenase/reductase family
  misc_feature (25)..(271): Homolog of NCBI NO: 15229203 NR Description: short-chain dehydrogenase/reductase family
  misc_feature (23)..(269): Homolog of NCBI NO: 34395018 NR Description: putative short-chain dehydrogenase/reductase
  misc_feature (5)..(271): Homolog of NCBI NO: 34395019 NR Description: putative short-chain dehydrogenase/reductase
  misc_feature (10)..(271): Homolog of NCBI NO: 34393370 NR Description: putative short-chain dehydrogenase/reductase
MSGAADTAAAAAVAAVAGSSGPAALPLSGRVAIVTGASRGIGRAIAAHLSSLGASVVLGYAASAAEADALAAELPRAVAVKANVSEEAGVRSLFDAAESAFGCAAPHIIVANAGVLGDKYPPLADTATADFDRVFAVNTRGAFLCLREAANRLPRGGGGRIVAVTSSVVGSNPTGYSAYTASKAAVEAMVRTMAKELKGTRVTANCVAPGATATDMFFAGKSNETVRRTAEMNPMERLGEAGDIAPVVGFLCTDAAEWVNGQVIRVNGGYV

SEQ ID NO: 61739 - DNA, 634 bp, Triticum aestivum
  misc_feature (1)..(634): Ceres Seq. ID no. 15173929
aaatacacacaagaaatgcaaatgattgatgagcttcttaatgaaaggaatgtaatccatgcatcctataccaacaatccacctctaaaacggacttcgagcaggaataaatctaaatcatcaccttctttcaaatatgatgaagaaaaaaaccagaggaaagaaaagaaagtgaaggatcagcacatggaagcctgcggaagcgaagatgacgactcgagtgataagaaaaccaaagagcggttcccaaggaagagatggctaaacattcctttcaaagttgacaggagaaagccatgctgaccataatggtaagcttacaagtgaaatacaaactattttcattttgactgccccagaagaactcattcgccattacctttttccttagtgttgtctattatatttcctgcaaagattgggtgcaaccctgagttcatatgatgtatggctacgaggcacgagcactcgtagcttctaagggtgctgccaccgtagtccagttccatattcttgagtgtgataatgtcaattttgatttcattggctgtgtaatcagttgtaaatattagttatctcgtctctgttgcacattatctctttccccgctttcgaatcctgatgtgtaattaac

SEQ ID NO: 61740 - protein, 100 aa, Triticum aestivum
  peptide (1)..(100): Ceres Seq. ID no. 15173930
  misc_feature (1)..(100): Homolog of NCBI NO: 22329767 NR Description: Altered Response to Gravity (ARG1) protein,
  misc_feature (1)..(100): Homolog of NCBI NO: 7433053 NR Description: hypothetical protein F3I6.4 - Arabidopsis
KYTQEMQMIDELLNERNVIHASYTNNPPLKRTSSRNKSKSSPSFKYDEEKNQRKEKKVKDQHMEACGSEDDDSSDKKTKERFPRKRWLNIPFKVDRRKPC

SEQ ID NO: 61741 - protein, 95 aa, Triticum aestivum
  peptide (1)..(95): Ceres Seq. ID no. 15173931
  misc_feature (1)..(95): Homolog of NCBI NO: 22329767 NR Description: Altered Response to Gravity (ARG1) protein,
  misc_feature (1)..(95): Homolog of NCBI NO: 7433053 NR Description: hypothetical protein F3I6.4 - Arabidopsis
MQMIDELLNERNVIHASYTNNPPLKRTSSRNKSKSSPSFKYDEEKNQRKEKKVKDQHMEACGSEDDDSSDKKTKERFPRKRWLNIPFKVDRRKPC

SEQ ID NO: 61742 - protein, 93 aa, Triticum aestivum
  peptide (1)..(93): Ceres Seq. ID no. 15173932
  misc_feature (1)..(93): Homolog of NCBI NO: 22329767 NR Description: Altered Response to Gravity (ARG1) protein,
  misc_feature (1)..(93): Homolog of NCBI NO: 7433053 NR Description: hypothetical protein F3I6.4 - Arabidopsis
MIDELLNERNVIHASYTNNPPLKRTSSRNKSKSSPSFKYDEEKNQRKEKKVKDQHMEACGSEDDDSSDKKTKERFPRKRWLNIPFKVDRRKPC

SEQ ID NO: 61743 - DNA, 797 bp, Triticum aestivum
  misc_feature (1)..(797): Ceres Seq. ID no. 15173925
tagacaaggaaggaatgtggtagaaaatccaaaaatggaagctgaacttcgatacaaggatttgtctcataaatttcacaaaatggcacaaaaagcagccaactctccacaatgttgtattctattggataatgcacttgattccgtcgctccgcatatacatgatttactcaatgcatccactagtgccatgaatgaactatgtaaagacaaagagaatgttgacccaaatgtgcagcaagtagatgagttgcttagatctgcacggctgaagaaaaaagaggttcagtcaaagaacttaaggagatagaaaatttggcttgataagttactcaaggggaagcacagagtaactaaaggaccaacaaaacagggagaaaagccacaaaggaagaaggatggtgtgcaacaaaagaaaaaagatggtgtgcagcctcaagtagaagtcgagaagtatgacaacaacaaagaagtaaatttggtgcttcaagagtgcaataatattatgagtttcacccagctcttgacggctgaccatgataatctgttctagcatggaagctccttagataatattttgtacatggtggtgatcatgatgattatctgttctagcatggaactcgtgagatagtatttaatactgaatttcaatcaagtggtactgaatttgtattgttaaattactgctgttttttgttgctatatgactgctgtttgcatacagttttttttgtatagctaagtttgaaatttaatactgaatttcaatcaagtggtattgaatttgtattgtt

SEQ ID NO: 61744 - protein, 102 aa, Triticum aestivum
  peptide (1)..(102): Ceres Seq. ID no. 15173926
  misc_feature (21)..(102): Homolog of NCBI NO: 37535818 NR Description: putative DNA excision repair cross-complementing
  misc_feature (3)..(58): Homolog of NCBI NO: 34912682 NR Description: P0686E09.10 [Oryza sativa (japonica
  misc_feature (77)..(102): Homolog of NCBI NO: 34912682 NR Description: P0686E09.10 [Oryza sativa (japonica
  misc_feature (8)..(102): Homolog of NCBI NO: 22758363 NR Description: putative far-red impaired response protein
  misc_feature (2)..(102): Homolog of NCBI NO: 38346897 NR Description: OSJNBb0006L01.4 [Oryza sativa (japonica
RQGRNVVENPKMEAELRYKDLSHKFHKMAQKAANSPQCCILLDNALDSVAPHIHDLLNASTSAMNELCKDKENVDPNVQQVDELLRSARLKKKEVQSKNLRR

SEQ ID NO: 61745 - protein, 91 aa, Triticum aestivum
  peptide (1)..(91): Ceres Seq. ID no. 15173927
  misc_feature (10)..(91): Homolog of NCBI NO: 37535818 NR Description: putative DNA excision repair cross-complementing
  misc_feature (1)..(47): Homolog of NCBI NO: 34912682 NR Description: P0686E09.10 [Oryza sativa (japonica
  misc_feature (66)..(91): Homolog of NCBI NO: 34912682 NR Description: P0686E09.10 [Oryza sativa (japonica
  misc_feature (1)..(91): Homolog of NCBI NO: 22758363 NR Description: putative far-red impaired response protein
  misc_feature (1)..(91): Homolog of NCBI NO: 38346897 NR Description: OSJNBb0006L01.4 [Oryza sativa (japonica
MEAELRYKDLSHKFHKMAQKAANSPQCCILLDNALDSVAPHIHDLLNASTSAMNELCKDKENVDPNVQQVDELLRSARLKKKEVQSKNLRR

SEQ ID NO: 61746 - protein, 75 aa, Triticum aestivum
  peptide (1)..(75): Ceres Seq. ID no. 15173928
  misc_feature (1)..(75): Homolog of NCBI NO: 37535818 NR Description: putative DNA excision repair cross-complementing
  misc_feature (1)..(31): Homolog of NCBI NO: 34912682 NR Description: P0686E09.10 [Oryza sativa (japonica
  misc_feature (50)..(75): Homolog of NCBI NO: 34912682 NR Description: P0686E09.10 [Oryza sativa (japonica
  misc_feature (1)..(75): Homolog of NCBI NO: 22758363 NR Description: putative far-red impaired response protein
  misc_feature (1)..(75): Homolog of NCBI NO: 38346897 NR Description: OSJNBb0006L01.4 [Oryza sativa (japonica
MAQKAANSPQCCILLDNALDSVAPHIHDLLNASTSAMNELCKDKENVDPNVQQVDELLRSARLKKKEVQSKNLRR

SEQ ID NO: 61747 - DNA, 889 bp, Triticum aestivum
  misc_feature (1)..(889): Ceres Seq. ID no. 15173862
tccgttctcccttctcccatcccatgtaacaaaatcagctcagctcagcgacaacagcggcggatgatgagagctcctcctcggctactgtcgcctccttcctccgccacggctcctcacctcctcctctacgcttcctccgcggcctgccgcctccctccctccgcggccgccgtcgcccgctccgtctccgtctccaccaccgtcgtcgacgccccggccgccgccgccgagccgggctcctccgactcggcctccgccacgccgcgacgccgcctcatcctcctccgccacggggacagcgcggttggggaacgcttcaccagagatcatgacaaaccactgagcaaagctggaagagctgatgcaataagcgtttctgataaattccatcaaatgggatggatacctgagcttatcctatgcagtgatgcaactcgtacaaaggaaactcttcagatcatgcaagagcatgttcaaggattgtctcaagcacttgtgcatttcatcccaagtttctactcgattgctgcaatggatggtcaaactgccgagcacttgcaaaaggcaatttgtgaatattcaactgatgagatactaacggtgatgtgcatgggacataataaaggatgggaagaagcagcctctatgttttctggtgattcagtggtgctcaagacgtgtaatgctgcattgctagaagctgctgggaaatcatggattgaggctttttcgcaggctggccttgggggatggaagcttcacggcattgtaaagccataaagtgaaaacattgtagctaaagctagatacagtttttttgtagcatttttgttctcattttgcctggtgtagctatgattgaatgttaatgaagttattgatgtgg

SEQ ID NO: 61748 - protein, 260 aa, Triticum aestivum
  peptide (1)..(260): Ceres Seq. ID no. 15173863
  misc_feature (92)..(215): Pfam Name: Phosphoglycerate mutase family Pfam Description: Phosphoglycerate mutase family
  misc_feature (91)..(240): Homolog of NCBI NO: 23136095 NR Description: hypothetical protein [Cytophaga hutchinsonii]
  misc_feature (91)..(215): Homolog of NCBI NO: 22961147 NR Description: hypothetical protein [Rhodopseudomonas palustris]
  misc_feature (86)..(253): Homolog of NCBI NO: 32475477 NR Description: conserved hypothetical protein-putative
  misc_feature (108)..(260): Homolog of NCBI NO: 11357772 NR Description: hypothetical protein F4F15.260 - Arabidopsis
  misc_feature (47)..(260): Homolog of NCBI NO: 18409499 NR Description: expressed protein [Arabidopsis thaliana]
SVLPSPIPCNKISSAQRQQRRMMRAPPRLLSPPSSATAPHLLLYASSAACRLPPSAAAVARSVSVSTTVVDAPAAAAEPGSSDSASATPRRRLILLRHGDSAVGERFTRDHDKPLSKAGRADAISVSDKFHQMGWIPELILCSDATRTKETLQIMQEHVQGLSQALVHFIPSFYSIAAMDGQTAEHLQKAICEYSTDEILTVMCMGHNKGWEEAASMFSGDSVVLKTCNAALLEAAGKSWIEAFSQAGLGGWKLHGIVKP

SEQ ID NO: 61749 - protein, 239 aa, Triticum aestivum
  peptide (1)..(239): Ceres Seq. ID no. 15173864
  misc_feature (71)..(194): Pfam Name: Phosphoglycerate mutase family Pfam Description: Phosphoglycerate mutase family
  misc_feature (70)..(219): Homolog of NCBI NO: 23136095 NR Description: hypothetical protein [Cytophaga hutchinsonii]
  misc_feature (70)..(194): Homolog of NCBI NO: 22961147 NR Description: hypothetical protein [Rhodopseudomonas palustris]
  misc_feature (65)..(232): Homolog of NCBI NO: 32475477 NR Description: conserved hypothetical protein-putative
  misc_feature (87)..(239): Homolog of NCBI NO: 11357772 NR Description: hypothetical protein F4F15.260 - Arabidopsis
  misc_feature (26)..(239): Homolog of NCBI NO: 18409499 NR Description: expressed protein [Arabidopsis thaliana]
MMRAPPRLLSPPSSATAPHLLLYASSAACRLPPSAAAVARSVSVSTTVVDAPAAAAEPGSSDSASATPRRRLILLRHGDSAVGERFTRDHDKPLSKAGRADAISVSDKFHQMGWIPELILCSDATRTKETLQIMQEHVQGLSQALVHFIPSFYSIAAMDGQTAEHLQKAICEYSTDEILTVMCMGHNKGWEEAASMFSGDSVVLKTCNAALLEAAGKSWIEAFSQAGLGGWKLHGIVKP

SEQ ID NO: 61750 - protein, 238 aa, Triticum aestivum
  peptide (1)..(238): Ceres Seq. ID no. 15173865
  misc_feature (70)..(193): Pfam Name: Phosphoglycerate mutase family Pfam Description: Phosphoglycerate mutase family
  misc_feature (69)..(218): Homolog of NCBI NO: 23136095 NR Description: hypothetical protein [Cytophaga hutchinsonii]
  misc_feature (69)..(193): Homolog of NCBI NO: 22961147 NR Description: hypothetical protein [Rhodopseudomonas palustris]
  misc_feature (64)..(231): Homolog of NCBI NO: 32475477 NR Description: conserved hypothetical protein-putative
  misc_feature (86)..(238): Homolog of NCBI NO: 11357772 NR Description: hypothetical protein F4F15.260 - Arabidopsis
  misc_feature (25)..(238): Homolog of NCBI NO: 18409499 NR Description: expressed protein [Arabidopsis thaliana]
MRAPPRLLSPPSSATAPHLLLYASSAACRLPPSAAAVARSVSVSTTVVDAPAAAAEPGSSDSASATPRRRLILLRHGDSAVGERFTRDHDKPLSKAGRADAISVSDKFHQMGWIPELILCSDATRTKETLQIMQEHVQGLSQALVHFIPSFYSIAAMDGQTAEHLQKAICEYSTDEILTVMCMGHNKGWEEAASMFSGDSVVLKTCNAALLEAAGKSWIEAFSQAGLGGWKLHGIVKP

SEQ ID NO: 61751 - DNA, 870 bp, Triticum aestivum
  misc_feature (1)..(870): Ceres Seq. ID no. 15173847
caattcagattccccaagatcgtctcgtctcgtctcgaatcgcatccatgggttggcgttggcacgacgacggcgagggcgacggtggccgcggcgggctcggcgacatccccgacctcgccggccgaggcggcggcgaggcggcgcacgtcggcacgcgccgggtggtgcagtcccgctgccacacggaggaggtggagcccggccgcttcgtccgcaagtgcgagaagaccgagcagctcctccgcaactgcgtcggcaggccttctgaactggtggagtcgaaaactgagaacaccgaagaagatgtcacagatgaaatgaccggtggtgcctcgcattctcttggcttcccaacaaaagagccctttgcatttccaggacttcgcagtgacattgaagctattgagaaaggcttcggtagctttctggatgaagctgagcggatgaccaacgaattcttcaaatcttttggatttccaaccattcacgacggggactcgagaccgtttcctaggcaacctgcagagaggcatgttggagaaggtaccgtgaagaagcccaatgagaatgagtactcagaattcggtagccagataactgatgtgtaacaagctacagtcgtataacatgccttgttggagctgaagcctgagaagtgtgtttcgctgggtatctagggtactaaagtggtttctcttttggactcttcattatggttgtaatagtcgatgaagaatcatattttactaattttatctgcaactatcataagtgtatgacttttggttgtatgggcattatgtatagtactgttttcagacgcttcagctgtaacatggataaatctgaagatctcagggctgcaag

SEQ ID NO: 61752 - protein, 202 aa, Triticum aestivum
  peptide (1)..(202): Ceres Seq. ID no. 15173848
  misc_feature (130)..(202): Homolog of NCBI NO: 34909928 NR Description: P0665A11.24 [Oryza sativa (japonica
  misc_feature (16)..(127): Homolog of NCBI NO: 34909928 NR Description: P0665A11.24 [Oryza sativa (japonica
  misc_feature (16)..(179): Homolog of NCBI NO: 32709122 NR Description: Mal d 1-associated protein [Malus x domestica]
  misc_feature (16)..(202): Homolog of NCBI NO: 15227527 NR Description: expressed protein [Arabidopsis thaliana]
IQIPQDRLVSSRIASMGWRWHDDGEGDGGRGGLGDIPDLAGRGGGEAAHVGTRRVVQSRCHTEEVEPGRFVRKCEKTEQLLRNCVGRPSELVESKTENTEEDVTDEMTGGASHSLGFPTKEPFAFPGLRSDIEAIEKGFGSFLDEAERMTNEFFKSFGFPTIHDGDSRPFPRQPAERHVGEGTVKKPNENEYSEFGSQITDV

SEQ ID NO: 61753 - protein, 187 aa, Triticum aestivum
  peptide (1)..(187): Ceres Seq. ID no. 15173849
  misc_feature (115)..(187): Homolog of NCBI NO: 34909928 NR Description: P0665A11.24 [Oryza sativa (japonica
  misc_feature (1)..(112): Homolog of NCBI NO: 34909928 NR Description: P0665A11.24 [Oryza sativa (japonica
  misc_feature (1)..(164): Homolog of NCBI NO: 32709122 NR Description: Mal d 1-associated protein [Malus x domestica]
  misc_feature (1)..(187): Homolog of NCBI NO: 15227527 NR Description: expressed protein [Arabidopsis thaliana]
MGWRWHDDGEGDGGRGGLGDIPDLAGRGGGEAAHVGTRRVVQSRCHTEEVEPGRFVRKCEKTEQLLRNCVGRPSELVESKTENTEEDVTDEMTGGASHSLGFPTKEPFAFPGLRSDIEAIEKGFGSFLDEAERMTNEFFKSFGFPTIHDGDSRPFPRQPAERHVGEGTVKKPNENEYSEFGSQITDV

SEQ ID NO: 61754 - protein, 107 aa, Triticum aestivum
  peptide (1)..(107): Ceres Seq. ID no. 15173850
QFRFPKIVSSRLESHPWVGVGTTTARATVAAAGSATSPTSPAEAAARRRTSARAGWCSPAATRRRWSPAASSASARRPSSSSATASAGLLNWWSRKLRTPKKMSQMK

SEQ ID NO: 61755 - DNA, 783 bp, Triticum aestivum
  misc_feature (1)..(783): Ceres Seq. ID no. 15173814
attcaacaacccaaatcctttcaatgctgggtcatccactagtaatagcactcaatcatctgggctgtttacgtcttcccctacaatggggcagcagccatttggccactcatttaaccagcaatcaagcactccagctttctccaccagtatgttcaatacatctaacatcggaatcactggaggtggagggatatttggcaacacttcttcaccttttcaaacatcaccatttcaacaatctgctttggtgaccctcctgaacatcaagtgcatgaataagaagacgggtgagcagtacacgcaagggccgaggttggacaagttcaaggagatgttggtgaagaaggctgaggagcagggagtggagtttatctcgtttgacggtgccaagggcgagtggaagttcagggtgaagcacttcagctcctacgggtttggtgaagccgaagccgacgacctggccgattccttgtagctttgttgataggtgcttgttttcttttggatgaacggtggacactcgattccatgtagcgttggtcggtagctggtctgggagaatattggttgtgatgcttttcttctctgaatgctgctatgagttccttcccatgttcttctgtacatattcttttttcttgcagaatgcacaaaaattacattctggcaccaatctagcacgtgcgtggattggataatgaactgacatctgtacaaatctggtcgatgaataatcttgttactgtcctggatggaatgcatccttttggcagtttatct

SEQ ID NO: 61756 - protein, 158 aa, Triticum aestivum
  peptide (1)..(158): Ceres Seq. ID no. 15173815
  misc_feature (82)..(153): Pfam Name: Nucleoporin autopeptidase Pfam Description: Nucleoporin autopeptidase
  misc_feature (69)..(142): Homolog of NCBI NO: 34914964 NR Description: similar to Arabidopsis thaliana chromosome 1,
  misc_feature (82)..(148): Homolog of NCBI NO: 25404873 NR Description: protein T30E16.23 [imported] - Arabidopsis
  misc_feature (82)..(148): Homolog of NCBI NO: 15218866 NR Description: nucleoporin 98-related protein [Arabidopsis
  misc_feature (82)..(153): Homolog of NCBI NO: 25402598 NR Description: protein F14N23.29 [imported] - Arabidopsis
  misc_feature (82)..(153): Homolog of NCBI NO: 22329468 NR Description: expressed protein [Arabidopsis thaliana]
FNNPNPFNAGSSTSNSTQSSGLFTSSPTMGQQPFGHSFNQQSSTPAFSTSMFNTSNIGITGGGGIFGNTSSPFQTSPFQQSALVTLLNIKCMNKKTGEQYTQGPRLDKFKEMLVKKAEEQGVEFISFDGAKGEWKFRVKHFSSYGFGEAEADDLADSL

SEQ ID NO: 61757 - protein, 130 aa, Triticum aestivum
  peptide (1)..(130): Ceres Seq. ID no. 15173816
  misc_feature (54)..(125): Pfam Name: Nucleoporin autopeptidase Pfam Description: Nucleoporin autopeptidase
  misc_feature (41)..(114): Homolog of NCBI NO: 34914964 NR Description: similar to Arabidopsis thaliana chromosome 1,
  misc_feature (54)..(120): Homolog of NCBI NO: 25404873 NR Description: protein T30E16.23 [imported] - Arabidopsis
  misc_feature (54)..(120): Homolog of NCBI NO: 15218866 NR Description: nucleoporin 98-related protein [Arabidopsis
  misc_feature (54)..(125): Homolog of NCBI NO: 25402598 NR Description: protein F14N23.29 [imported] - Arabidopsis
  misc_feature (54)..(125): Homolog of NCBI NO: 22329468 NR Description: expressed protein [Arabidopsis thaliana]
MGQQPFGHSFNQQSSTPAFSTSMFNTSNIGITGGGGIFGNTSSPFQTSPFQQSALVTLLNIKCMNKKTGEQYTQGPRLDKFKEMLVKKAEEQGVEFISFDGAKGEWKFRVKHFSSYGFGEAEADDLADSL

SEQ ID NO: 61758 - protein, 108 aa, Triticum aestivum
  peptide (1)..(108): Ceres Seq. ID no. 15173817
  misc_feature (32)..(103): Pfam Name: Nucleoporin autopeptidase Pfam Description: Nucleoporin autopeptidase
  misc_feature (19)..(92): Homolog of NCBI NO: 34914964 NR Description: similar to Arabidopsis thaliana chromosome 1,
  misc_feature (32)..(98): Homolog of NCBI NO: 25404873 NR Description: protein T30E16.23 [imported] - Arabidopsis
  misc_feature (32)..(98): Homolog of NCBI NO: 15218866 NR Description: nucleoporin 98-related protein [Arabidopsis
  misc_feature (32)..(103): Homolog of NCBI NO: 25402598 NR Description: protein F14N23.29 [imported] - Arabidopsis
  misc_feature (32)..(103): Homolog of NCBI NO: 22329468 NR Description: expressed protein [Arabidopsis thaliana]
MFNTSNIGITGGGGIFGNTSSPFQTSPFQQSALVTLLNIKCMNKKTGEQYTQGPRLDKFKEMLVKKAEEQGVEFISFDGAKGEWKFRVKHFSSYGFGEAEADDLADSL

SEQ ID NO: 61759 - DNA, 827 bp, Triticum aestivum
  misc_feature (1)..(827): Ceres Seq. ID no. 15173803
tccagtccagtatccgtcgttccccctcgccatcgtcccgcgccccgtccatggccaccgccacgctccctctccgcctcctcccctcgagaaccccactcctccacaccgccgccttcctccctgcgagcacttctctctccgtcaccgcgtccgcgccccgcaactggcgcatcttcgccgccgccgaggaggcgcccgctccggtggaagccgaggcggaggaggtggtagaggatgccgcggttccggagcctgttgaggtgcagctggctgctgctggcgcggggaaggacgccgacatcttcgccgttgtcatgattgggtccagacaatacattgtgatgccagatcattttgaacaaggtactactggtgtcaactagagacaaagcttatattggcatgccagtggtgaccaatgctgctgttcatgcaattcttgaagaacagggactggacgataaagtgattgttttcaagttcaagaagaagaagaagtaccagaggaaagctggtcacagacagccaaatacgaggttaagaattactggcataagtggatatgaggaattccctgctgatccaatacttcaagttccagcttaagtgtaattgtaagttgtttagttacaaatgcttggtagtacattagagtgcaagagcattttccccactgttccccaagtgaggctcttccccaagttaatgtactcgaaatgctgccattcgtcgagtggttggttccatccttttgtttattccgccagctcttgtgttcctttgaaatccaattgtattatcttgattgtgcagaaagacagggg

SEQ ID NO: 61760 - protein, 127 aa, Triticum aestivum
  peptide (1)..(127): Ceres Seq. ID no. 15173804
  misc_feature (32)..(119): Homolog of NCBI NO: 15219695 NR Description: 50S ribosomal protein L21 chloroplast precursor
QSSIRRSPSPSSRAPSMATATLPLRLLPSRTPLLHTAAFLPASTSLSVTASAPRNWRIFAAAEEAPAPVEAEAEEVVEDAAVPEPVEVQLAAAGAGKDADIFAVVMIGSRQYIVMPDHFEQGTTGVN

SEQ ID NO: 61761 - protein, 111 aa, Triticum aestivum
  peptide (1)..(111): Ceres Seq. ID no. 15173805
  misc_feature (16)..(103): Homolog of NCBI NO: 15219695 NR Description: 50S ribosomal protein L21 chloroplast precursor
MATATLPLRLLPSRTPLLHTAAFLPASTSLSVTASAPRNWRIFAAAEEAPAPVEAEAEEVVEDAAVPEPVEVQLAAAGAGKDADIFAVVMIGSRQYIVMPDHFEQGTTGVN

SEQ ID NO: 61762 - protein, 86 aa, Triticum aestivum
  peptide (1)..(86): Ceres Seq. ID no. 15173806
PVQYPSFPLAIVPRPVHGHRHAPSPPPPLENPTPPHRRLPPCEHFSLRHRVRAPQLAHLRRRRGGARSGGSRGGGGGRGCRGSGAC

SEQ ID NO: 61763 - DNA, 922 bp, Triticum aestivum
  misc_feature (1)..(922): Ceres Seq. ID no. 15173795
cacgggcctctctccacgcctgcattccaacacggacgagccaacgagaggagggaggcgagatgacggcggggcctaagagcggcgggggcggcgcggcagccgcgcgagcggcggccgcggggccgaggacggtgctcatcacgggggtcagccgggggctgggccgagctttagctctggagctcgcgcgccgggggcacgccgtcgtcggctgcggccgctcggtcgatcccatccgctccctcgaggccgagatgggttccccgtctcgccactttctcaccgtcgccgacgtcaggtctgacacccccatgggtgaactggcaaaggctgttgtggaaaggaagcaaattcctgatatcatagtaaacaatgctggtacaataaacaagaataacaaaacgtggaatgttccagcagaagaatttgatacggtggttgatacaaatattaaaggaacagcaaatgtacttcgccattttgtaccacttatgatacagaagaaacatgggatgataatcaatttatcctctggttggggaaggtctgctgctgcagaggttgctccatattgtgcttcaaagtgggctattgaaggtttaacacgctcattagcaaaggagttgcctcctggattggcagcaattgctcttagccctggtgttgtgaataccgacatgcttacttcatgctttggaagttcagctgcgttataccaatctactgagcaatgggcacccaaggcagccacaatgattctaagcctttcactggaagataatggtgcctcactaactgtatgatgctgtagcaatgttgtattaatcacagatcggttctcaagtaattatgacatttaacttgcagctgttgaatatcaattatgttgtagtaataagataaaaaggttcatgtaaag

SEQ ID NO: 61764 - protein, 267 aa, Triticum aestivum
  peptide (1)..(267): Ceres Seq. ID no. 15173796
  misc_feature (43)..(238): Homolog of NCBI NO: 20091507 NR Description: 3-oxoacyl-
  misc_feature (43)..(227): Homolog of NCBI NO: 23056407 NR Description: hypothetical protein [Geobacter metallireducens]
  misc_feature (43)..(227): Homolog of NCBI NO: 28210515 NR Description: 3-oxoacyl-
  misc_feature (43)..(267): Homolog of NCBI NO: 20091506 NR Description: 3-oxoacyl-
  misc_feature (43)..(227): Homolog of NCBI NO: 28209901 NR Description: 3-oxoacyl-
  misc_feature (43)..(267): Homolog of NCBI NO: 30020410 NR Description: Short chain dehydrogenase [Bacillus cereus ATCC
  misc_feature (43)..(267): Homolog of NCBI NO: 23042686 NR Description: hypothetical protein [Trichodesmium erythraeum
  misc_feature (43)..(267): Homolog of NCBI NO: 17229376 NR Description: probable short-chain dehydrogenase [Nostoc sp.
  misc_feature (31)..(267): Homolog of NCBI NO: 21593553 NR Description: unknown [Arabidopsis thaliana]
  misc_feature (31)..(267): Homolog of NCBI NO: 18391139 NR Description: short-chain dehydrogenase/reductase family
RASLHACIPTRTSQREEGGEMTAGPKSGGGGAAAARAAAAGPRTVLITGVSRGLGRALALELARRGHAVVGCGRSVDPIRSLEAEMGSPSRHFLTVADVRSDTPMGELAKAVVERKQIPDIIVNNAGTINKNNKTWNVPAEEFDTVVDTNIKGTANVLRHFVPLMIQKKHGMIINLSSGWGRSAAAEVAPYCASKWAIEGLTRSLAKELPPGLAAIALSPGVVNTDMLTSCFGSSAALYQSTEQWAPKAATMILSLSLEDNGASLTV

SEQ ID NO: 61765 - protein, 247 aa, Triticum aestivum
  peptide (1)..(247): Ceres Seq. ID no. 15173797
  misc_feature (23)..(218): Homolog of NCBI NO: 20091507 NR Description: 3-oxoacyl-
  misc_feature (23)..(207): Homolog of NCBI NO: 23056407 NR Description: hypothetical protein [Geobacter metallireducens]
  misc_feature (23)..(207): Homolog of NCBI NO: 28210515 NR Description: 3-oxoacyl-
  misc_feature (23)..(247): Homolog of NCBI NO: 20091506 NR Description: 3-oxoacyl-
  misc_feature (23)..(207): Homolog of NCBI NO: 28209901 NR Description: 3-oxoacyl-
  misc_feature (23)..(247): Homolog of NCBI NO: 30020410 NR Description: Short chain dehydrogenase [Bacillus cereus ATCC
  misc_feature (23)..(247): Homolog of NCBI NO: 23042686 NR Description: hypothetical protein [Trichodesmium erythraeum
  misc_feature (23)..(247): Homolog of NCBI NO: 17229376 NR Description: probable short-chain dehydrogenase [Nostoc sp.
  misc_feature (11)..(247): Homolog of NCBI NO: 21593553 NR Description: unknown [Arabidopsis thaliana]
  misc_feature (11)..(247): Homolog of NCBI NO: 18391139 NR Description: short-chain dehydrogenase/reductase family
MTAGPKSGGGGAAAARAAAAGPRTVLITGVSRGLGRALALELARRGHAVVGCGRSVDPIRSLEAEMGSPSRHFLTVADVRSDTPMGELAKAVVERKQIPDIIVNNAGTINKNNKTWNVPAEEFDTVVDTNIKGTANVLRHFVPLMIQKKHGMIINLSSGWGRSAAAEVAPYCASKWAIEGLTRSLAKELPPGLAAIALSPGVVNTDMLTSCFGSSAALYQSTEQWAPKAATMILSLSLEDNGASLTV

SEQ ID NO: 61766 - protein, 182 aa, Triticum aestivum
  peptide (1)..(182): Ceres Seq. ID no. 15173798
  misc_feature (1)..(153): Homolog of NCBI NO: 20091507 NR Description: 3-oxoacyl-
  misc_feature (1)..(142): Homolog of NCBI NO: 23056407 NR Description: hypothetical protein [Geobacter metallireducens]
  misc_feature (1)..(142): Homolog of NCBI NO: 28210515 NR Description: 3-oxoacyl-
  misc_feature (1)..(182): Homolog of NCBI NO: 20091506 NR Description: 3-oxoacyl-
  misc_feature (1)..(142): Homolog of NCBI NO: 28209901 NR Description: 3-oxoacyl-
  misc_feature (1)..(182): Homolog of NCBI NO: 30020410 NR Description: Short chain dehydrogenase [Bacillus cereus ATCC
  misc_feature (1)..(182): Homolog of NCBI NO: 23042686 NR Description: hypothetical protein [Trichodesmium erythraeum
  misc_feature (1)..(182): Homolog of NCBI NO: 17229376 NR Description: probable short-chain dehydrogenase [Nostoc sp.
  misc_feature (1)..(182): Homolog of NCBI NO: 21593553 NR Description: unknown [Arabidopsis thaliana]
  misc_feature (1)..(182): Homolog of NCBI NO: 18391139 NR Description: short-chain dehydrogenase/reductase family
MGSPSRHFLTVADVRSDTPMGELAKAVVERKQIPDIIVNNAGTINKNNKTWNVPAEEFDTVVDTNIKGTANVLRHFVPLMIQKKHGMIINLSSGWGRSAAAEVAPYCASKWAIEGLTRSLAKELPPGLAAIALSPGVVNTDMLTSCFGSSAALYQSTEQWAPKAATMILSLSLEDNGASLTV

SEQ ID NO: 61767 - DNA, 1132 bp, Triticum aestivum
  misc_feature (1)..(1132): Ceres Seq. ID no. 15173789
acacagggagcaaccaaaccaaacgaacccagccaaccagcaaactccccttctcttctcttcttcttcctcctagtacaccttttgtctctccgtccacagtccacacacagcactctccaccaaaagatcaagcaagagccaagagcacgtgcgatggcggcgacggcgactgcgacggcggcggcgacgagcgtggtgacggggacgacgcggtggtgcccgacgccggagcagctgatgatcctggaggagatgtaccgcggcgggctgcgcacccccaacgcgtcgcagatccagcagatcacggcgcacctggcccactacggccgcatcgagggcaagaacgtcttctactggttccagaaccacaaggcccgggaccgccagaagctccgccgcaggctctgcatgagccaccacctcctctcctgcgcgcactactacgccgccgccaacgccggccagtaccaccagcagcagcagctcctcggcgccggcgcggtgcctcctccgctgctgcagcacccgcagcagcagcagtactactccgcctcttgcgccggtggcggctacgaccagcacctgctcccgacgaccgtcccagcttccgcttacgctgctgctgctgggtacgcctaccccttcgccggcgtgccggcaagccggtgcgccgagccctcgccgccaaacaccccgctctccttccatcatcagggaggaggcgtagtgggatcgccggagtactcgctggggaggctgggcaacttcggcgtggtggaggacacatgccggccgtcgcggtacgagcagcagccgcagcagctggccgcggcaacggaagatcaggcggcgccggtgacggcgacggggctgttctgccggccgctgaagacgctggacctcttccccggcgcgatcaaggaggagcagcgcgacgtcgcctagctatatactacctccaacctatagctagccaccagtagcagcagcagcagcagtcgtcgtcgtagtacgtagagcagtccgtacgttgcgcgcgttgtacgtacgcaggtagagcagtacgtaggagtacgtatctttgtaattcccatcgatttttcgttgattattaatccgctttagtagc

SEQ ID NO: 61768 - protein, 327 aa, Triticum aestivum
  peptide (1)..(327): Ceres Seq. ID no. 15173790
TGSNQTKRTQPTSKLPFSSLLLPPSTPFVSPSTVHTQHSPPKDQARAKSTCDGGDGDCDGGGDERGDGDDAVVPDAGAADDPGGDVPRRAAHPQRVADPADHGAPGPLRPHRGQERLLLVPEPQGPGPPEAPPQALHEPPPPLLRALLRRRQRRPVPPAAAAPRRRRGASSAAAAPAAAAVLLRLLRRWRLRPAPAPDDRPSFRLRCCCWVRLPLRRRAGKPVRRALAAKHPALLPSSGRRRSGIAGVLAGEAGQLRRGGGHMPAVAVRAAAAAAGRGNGRSGGAGDGDGAVLPAAEDAGPLPRRDQGGAARRRLAIYYLQPIASHQ

SEQ ID NO: 61769 - protein, 315 aa, Triticum aestivum
  peptide (1)..(315): Ceres Seq. ID no. 15173791
  misc_feature (72)..(130): Pfam Name: Homeobox domain Pfam Description: Homeobox domain
  misc_feature (69)..(193): Homolog of NCBI NO: 25405177 NR Description: hypothetical protein F2G19.11 [imported] -
  misc_feature (69)..(153): Homolog of NCBI NO: 10241438 NR Description: putative homeodomain transcripition factor
  misc_feature (70)..(140): Homolog of NCBI NO: 37909316 NR Description: WOX1 protein [Arabidopsis thaliana]
  misc_feature (70)..(146): Homolog of NCBI NO: 15229567 NR Description: hypothetical protein [Arabidopsis thaliana]
  misc_feature (70)..(146): Homolog of NCBI NO: 9294502 NR Description: homeodomain transcription factor-like protein
  misc_feature (2)..(153): Homolog of NCBI NO: 32488911 NR Description: OSJNBb0059K02.2 [Oryza sativa (japonica
  misc_feature (70)..(141): Homolog of NCBI NO: 15226914 NR Description: homeodomain transcription factor -related
  misc_feature (68)..(304): Homolog of NCBI NO: 39841615 NR Description: narrow sheath 2 [Zea mays]
  misc_feature (59)..(130): Homolog of NCBI NO: 8099120 NR Description: similar to a putative homeodomain transcription
  misc_feature (196)..(314): Homolog of NCBI NO: 8099120 NR Description: similar to a putative homeodomain transcription
TQGATKPNEPSQPANSPSLLFFFLLVHLLSLRPQSTHSTLHQKIKQEPRARAMAATATATAAATSVVTGTTRWCPTPEQLMILEEMYRGGLRTPNASQIQQITAHLAHYGRIEGKNVFYWFQNHKARDRQKLRRRLCMSHHLLSCAHYYAAANAGQYHQQQQLLGAGAVPPPLLQHPQQQQYYSASCAGGGYDQHLLPTTVPASAYAAAAGYAYPFAGVPASRCAEPSPPNTPLSFHHQGGGVVGSPEYSLGRLGNFGVVEDTCRPSRYEQQPQQLAAATEDQAAPVTATGLFCRPLKTLDLFPGAIKEEQRDVA

SEQ ID NO: 61770 - protein, 263 aa, Triticum aestivum
  peptide (1)..(263): Ceres Seq. ID no. 15173792
  misc_feature (20)..(78): Pfam Name: Homeobox domain Pfam Description: Homeobox domain
  misc_feature (17)..(141): Homolog of NCBI NO: 25405177 NR Description: hypothetical protein F2G19.11 [imported] -
  misc_feature (17)..(101): Homolog of NCBI NO: 10241438 NR Description: putative homeodomain transcripition factor
  misc_feature (18)..(88): Homolog of NCBI NO: 37909316 NR Description: WOX1 protein [Arabidopsis thaliana]
  misc_feature (18)..(94): Homolog of NCBI NO: 15229567 NR Description: hypothetical protein [Arabidopsis thaliana]
  misc_feature (18)..(94): Homolog of NCBI NO: 9294502 NR Description: homeodomain transcription factor-like protein
  misc_feature (1)..(101): Homolog of NCBI NO: 32488911 NR Description: OSJNBb0059K02.2 [Oryza sativa (japonica
  misc_feature (18)..(89): Homolog of NCBI NO: 15226914 NR Description: homeodomain transcription factor -related
  misc_feature (16)..(252): Homolog of NCBI NO: 39841615 NR Description: narrow sheath 2 [Zea mays]
  misc_feature (7)..(78): Homolog of NCBI NO: 8099120 NR Description: similar to a putative homeodomain transcription
  misc_feature (144)..(262): Homolog of NCBI NO: 8099120 NR Description: similar to a putative homeodomain transcription
MAATATATAAATSVVTGTTRWCPTPEQLMILEEMYRGGLRTPNASQIQQITAHLAHYGRIEGKNVFYWFQNHKARDRQKLRRRLCMSHHLLSCAHYYAAANAGQYHQQQQLLGAGAVPPPLLQHPQQQQYYSASCAGGGYDQHLLPTTVPASAYAAAAGYAYPFAGVPASRCAEPSPPNTPLSFHHQGGGVVGSPEYSLGRLGNFGVVEDTCRPSRYEQQPQQLAAATEDQAAPVTATGLFCRPLKTLDLFPGAIKEEQRDVA

SEQ ID NO: 61771 - DNA, 797 bp, Triticum aestivum
  misc_feature (1)..(797): Ceres Seq. ID no. 15173774
atcccaagctagcaaagcccacctagcgctcagccacaagccagtagcccagtacgctctagctagctactagcgttatccacatagcaatggcgccctccatgctcgccctcttcctcgccatgaatctggtcctcctcgtggcagtgcatggctgcgggtcgtgcggcaacacaccgcccgtccctgttccaagcccaccgattgcgtttccaccgccagctcccgtgccgtctccgccttcccccggcggcgggggcggcacctgctcaatcgacactctgaagctgaaggtttgcgccaacgtgctgaacctgctgaagctcaacctcggcgtgccgacggacgagcagtgctgcccgcttctgagcggcctcgctgacctagacgccgccctgtgtctctgcactgccatcaaggccaacgtcctcggcatcaagctcaatgtgcccgtcgacctcgtgctcctcctcaaccagtgcggcaagacctgccccgccgacttcacctgccctcgctgatccatccatcacaaaccatgcattttttacctgcatcgcatcatcgtcgtcggcgtactcgtacttacaatattttttcgtatccgcatgtacctatatattttctcgcaattacaatatggtagtatatgtcagtcgcgtgcatgcatgggctccctcgcaagtgcatgcatgcttcagttagtcattccccgttatggtatctaagtgcatgattcaagtatttgtaaacgggtatatgtacgtggaataaaattttgttcaggttgtcttttt

SEQ ID NO: 61772 - protein, 143 aa, Triticum aestivum
  peptide (1)..(143): Ceres Seq. ID no. 15173775
  misc_feature (60)..(141): Pfam Name: Protease inhibitor/seed storage/LTP family Pfam Description: Protease inhibitor/seed storage/LTP family
  misc_feature (1)..(142): Homolog of NCBI NO: 38568019 NR Description: OSJNBa0070C17.11 [Oryza sativa (japonica
  misc_feature (31)..(141): Homolog of NCBI NO: 15235388 NR Description: protease inhibitor/seed storage/lipid transfer
  misc_feature (29)..(141): Homolog of NCBI NO: 15235390 NR Description: protease inhibitor/seed storage/lipid transfer
  misc_feature (1)..(142): Homolog of NCBI NO: 399204 NR Description: CORTICAL CELL DELINEATING PROTEIN PRECURSOR
  misc_feature (1)..(142): Homolog of NCBI NO: 2226329 NR Description: physical impedance induced protein [Zea mays]
  misc_feature (1)..(141): Homolog of NCBI NO: 37533212 NR Description: putative lipid transfer protein
  misc_feature (1)..(141): Homolog of NCBI NO: 1084460 NR Description: RCc2 protein - rice
  misc_feature (1)..(141): Homolog of NCBI NO: 37536702 NR Description: putative lipid transfer protein
  misc_feature (1)..(141): Homolog of NCBI NO: 37536704 NR Description: putative lipid transfer protein
  misc_feature (7)..(142): Homolog of NCBI NO: 39748092 NR Description: lipid transfer protein-like protein
MAPSMLALFLAMNLVLLVAVHGCGSCGNTPPVPVPSPPIAFPPPAPVPSPPSPGGGGGTCSIDTLKLKVCANVLNLLKLNLGVPTDEQCCPLLSGLADLDAALCLCTAIKANVLGIKLNVPVDLVLLLNQCGKTCPADFTCPR

SEQ ID NO: 61773 - protein, 139 aa, Triticum aestivum
  peptide (1)..(139): Ceres Seq. ID no. 15173776
  misc_feature (56)..(137): Pfam Name: Protease inhibitor/seed storage/LTP family Pfam Description: Protease inhibitor/seed storage/LTP family
  misc_feature (1)..(138): Homolog of NCBI NO: 38568019 NR Description: OSJNBa0070C17.11 [Oryza sativa (japonica
  misc_feature (27)..(137): Homolog of NCBI NO: 15235388 NR Description: protease inhibitor/seed storage/lipid transfer
  misc_feature (25)..(137): Homolog of NCBI NO: 15235390 NR Description: protease inhibitor/seed storage/lipid transfer
  misc_feature (1)..(138): Homolog of NCBI NO: 399204 NR Description: CORTICAL CELL DELINEATING PROTEIN PRECURSOR
  misc_feature (1)..(138): Homolog of NCBI NO: 2226329 NR Description: physical impedance induced protein [Zea mays]
  misc_feature (1)..(137): Homolog of NCBI NO: 37533212 NR Description: putative lipid transfer protein
  misc_feature (1)..(137): Homolog of NCBI NO: 1084460 NR Description: RCc2 protein - rice
  misc_feature (1)..(137): Homolog of NCBI NO: 37536702 NR Description: putative lipid transfer protein
  misc_feature (1)..(137): Homolog of NCBI NO: 37536704 NR Description: putative lipid transfer protein
  misc_feature (3)..(138): Homolog of NCBI NO: 39748092 NR Description: lipid transfer protein-like protein
MLALFLAMNLVLLVAVHGCGSCGNTPPVPVPSPPIAFPPPAPVPSPPSPGGGGGTCSIDTLKLKVCANVLNLLKLNLGVPTDEQCCPLLSGLADLDAALCLCTAIKANVLGIKLNVPVDLVLLLNQCGKTCPADFTCPR

SEQ ID NO: 61774 - protein, 132 aa, Triticum aestivum
  peptide (1)..(132): Ceres Seq. ID no. 15173777
  misc_feature (49)..(130): Pfam Name: Protease inhibitor/seed storage/LTP family Pfam Description: Protease inhibitor/seed storage/LTP family
  misc_feature (1)..(131): Homolog of NCBI NO: 38568019 NR Description: OSJNBa0070C17.11 [Oryza sativa (japonica
  misc_feature (20)..(130): Homolog of NCBI NO: 15235388 NR Description: protease inhibitor/seed storage/lipid transfer
  misc_feature (18)..(130): Homolog of NCBI NO: 15235390 NR Description: protease inhibitor/seed storage/lipid transfer
  misc_feature (1)..(131): Homolog of NCBI NO: 399204 NR Description: CORTICAL CELL DELINEATING PROTEIN PRECURSOR
  misc_feature (1)..(131): Homolog of NCBI NO: 2226329 NR Description: physical impedance induced protein [Zea mays]
  misc_feature (1)..(130): Homolog of NCBI NO: 37533212 NR Description: putative lipid transfer protein
  misc_feature (1)..(130): Homolog of NCBI NO: 1084460 NR Description: RCc2 protein - rice
  misc_feature (1)..(130): Homolog of NCBI NO: 37536702 NR Description: putative lipid transfer protein
  misc_feature (1)..(130): Homolog of NCBI NO: 37536704 NR Description: putative lipid transfer protein
  misc_feature (1)..(131): Homolog of NCBI NO: 39748092 NR Description: lipid transfer protein-like protein
MNLVLLVAVHGCGSCGNTPPVPVPSPPIAFPPPAPVPSPPSPGGGGGTCSIDTLKLKVCANVLNLLKLNLGVPTDEQCCPLLSGLADLDAALCLCTAIKANVLGIKLNVPVDLVLLLNQCGKTCPADFTCPR

SEQ ID NO: 61775 - DNA, 783 bp, Triticum aestivum
  misc_feature (1)..(783): Ceres Seq. ID no. 15173749
atcgatgtcgacggcgacgtcccagcgcctacacgtacgtgtacacccccgcacccccctgactttatctcgccgacatggtcacggccctcctataaaatcaccacacccgacactgctaaatcaacaacactcatcaccgccaaccatcagctttcaatctagctaccagttccagtttagcacacagattttttcctcgggccaacctccagatccatcaacaatggcgaactctgtgtccggagtggcggtgaacgaggagtgcgtgaaggcgttccaggagctgcgggcggaccgcaagcaccggttcgtggtgtacaagatggacgacgacgcgcagcaggtggtggtggacaaggtgggcgcgctcgacgccaccttcgacgacctggcggcggccatgcccgccgacgactgccgctacgccgtctacgacctggacttcgtgtccgaggactcggccggcgagaccccccgcagcaagatcttcttcatccactggtcgccggagtcggcggacgcgaggaacaagatgctgtacgccagctccacggaggggctcaagaaggagctggacggcgtgcagatcgacgtgcaggccaccgacgccagcgagctcaccctcgacatcctcaaggactacaccacctaagttaatcgatgaatcacgtacgcgcttggcatcgcgttcctgcttggagttggatcgtgtcttgtggatccaaataatgtttttccatgtgcagcggggtgtgaataattgatgagtggttttctttc

SEQ ID NO: 61776 - protein, 217 aa, Triticum aestivum
  peptide (1)..(217): Ceres Seq. ID no. 15173750
  misc_feature (87)..(217): Pfam Name: Cofilin/tropomyosin-type actin-binding protein Pfam Description: Cofilin/tropomyosin-type actin-binding protein
  misc_feature (76)..(213): Homolog of NCBI NO: 15223471 NR Description: actin depolymerizing factor -related [Arabidopsis
  misc_feature (76)..(213): Homolog of NCBI NO: 30697300 NR Description: actin depolymerizing factor 4 - like protein
  misc_feature (76)..(213): Homolog of NCBI NO: 22831338 NR Description: putative actin-depolymerizing factor 2
  misc_feature (76)..(213): Homolog of NCBI NO: 18411410 NR Description: actin-depolymerizing factor -related [Arabidopsis
  misc_feature (76)..(213): Homolog of NCBI NO: 30697295 NR Description: actin depolymerizing factor 3 - like protein
  misc_feature (76)..(213): Homolog of NCBI NO: 38345587 NR Description: OSJNBb0012E24.5 [Oryza sativa (japonica
  misc_feature (76)..(217): Homolog of NCBI NO: 29124120 NR Description: putative actin-binding protein
  misc_feature (76)..(217): Homolog of NCBI NO: 11066101 NR Description: actin depolymerization factor-like protein
  misc_feature (76)..(217): Homolog of NCBI NO: 7441447 NR Description: actin-binding protein WCOR719 - wheat
  misc_feature (76)..(217): Homolog of NCBI NO: 1381154 NR Description: WCOR719
SMSTATSQRLHVRVHPRTPLTLSRRHGHGPPIKSPHPTLLNQQHSSPPTISFQSSYQFQFSTQIFSSGQPPDPSTMANSVSGVAVNEECVKAFQELRADRKHRFVVYKMDDDAQQVVVDKVGALDATFDDLAAAMPADDCRYAVYDLDFVSEDSAGETPRSKIFFIHWSPESADARNKMLYASSTEGLKKELDGVQIDVQATDASELTLDILKDYTT

SEQ ID NO: 61777 - protein, 216 aa, Triticum aestivum
  peptide (1)..(216): Ceres Seq. ID no. 15173751
  misc_feature (86)..(216): Pfam Name: Cofilin/tropomyosin-type actin-binding protein Pfam Description: Cofilin/tropomyosin-type actin-binding protein
  misc_feature (75)..(212): Homolog of NCBI NO: 15223471 NR Description: actin depolymerizing factor -related [Arabidopsis
  misc_feature (75)..(212): Homolog of NCBI NO: 30697300 NR Description: actin depolymerizing factor 4 - like protein
  misc_feature (75)..(212): Homolog of NCBI NO: 22831338 NR Description: putative actin-depolymerizing factor 2
  misc_feature (75)..(212): Homolog of NCBI NO: 18411410 NR Description: actin-depolymerizing factor -related [Arabidopsis
  misc_feature (75)..(212): Homolog of NCBI NO: 30697295 NR Description: actin depolymerizing factor 3 - like protein
  misc_feature (75)..(212): Homolog of NCBI NO: 38345587 NR Description: OSJNBb0012E24.5 [Oryza sativa (japonica
  misc_feature (75)..(216): Homolog of NCBI NO: 29124120 NR Description: putative actin-binding protein
  misc_feature (75)..(216): Homolog of NCBI NO: 11066101 NR Description: actin depolymerization factor-like protein
  misc_feature (75)..(216): Homolog of NCBI NO: 7441447 NR Description: actin-binding protein WCOR719 - wheat
  misc_feature (75)..(216): Homolog of NCBI NO: 1381154 NR Description: WCOR719
MSTATSQRLHVRVHPRTPLTLSRRHGHGPPIKSPHPTLLNQQHSSPPTISFQSSYQFQFSTQIFSSGQPPDPSTMANSVSGVAVNEECVKAFQELRADRKHRFVVYKMDDDAQQVVVDKVGALDATFDDLAAAMPADDCRYAVYDLDFVSEDSAGETPRSKIFFIHWSPESADARNKMLYASSTEGLKKELDGVQIDVQATDASELTLDILKDYTT

SEQ ID NO: 61778 - protein, 142 aa, Triticum aestivum
  peptide (1)..(142): Ceres Seq. ID no. 15173752
  misc_feature (12)..(142): Pfam Name: Cofilin/tropomyosin-type actin-binding protein Pfam Description: Cofilin/tropomyosin-type actin-binding protein
  misc_feature (1)..(138): Homolog of NCBI NO: 15223471 NR Description: actin depolymerizing factor -related [Arabidopsis
  misc_feature (1)..(138): Homolog of NCBI NO: 30697300 NR Description: actin depolymerizing factor 4 - like protein
  misc_feature (1)..(138): Homolog of NCBI NO: 22831338 NR Description: putative actin-depolymerizing factor 2
  misc_feature (1)..(138): Homolog of NCBI NO: 18411410 NR Description: actin-depolymerizing factor -related [Arabidopsis
  misc_feature (1)..(138): Homolog of NCBI NO: 30697295 NR Description: actin depolymerizing factor 3 - like protein
  misc_feature (1)..(138): Homolog of NCBI NO: 38345587 NR Description: OSJNBb0012E24.5 [Oryza sativa (japonica
  misc_feature (1)..(142): Homolog of NCBI NO: 29124120 NR Description: putative actin-binding protein
  misc_feature (1)..(142): Homolog of NCBI NO: 11066101 NR Description: actin depolymerization factor-like protein
  misc_feature (1)..(142): Homolog of NCBI NO: 7441447 NR Description: actin-binding protein WCOR719 - wheat
  misc_feature (1)..(142): Homolog of NCBI NO: 1381154 NR Description: WCOR719
MANSVSGVAVNEECVKAFQELRADRKHRFVVYKMDDDAQQVVVDKVGALDATFDDLAAAMPADDCRYAVYDLDFVSEDSAGETPRSKIFFIHWSPESADARNKMLYASSTEGLKKELDGVQIDVQATDASELTLDILKDYTT

SEQ ID NO: 61779 - DNA, 775 bp, Triticum aestivum
  misc_feature (1)..(775): Ceres Seq. ID no. 15173736
gcaattgcatccagttctcgcgccgcccccgtcccataatcccttcccgtcctcgcctcgtcgccggtaatggcgggtcccggcatcggagcggccgcgcctcgcctgtcgctgctgctgctgctgctcgtcgtcgtcttcgcgggctcctcccgccacagccgcaccgaggcggccgtgcggacgtgcacgtacacggtgaaggtgaagacgagctgcgcgtcgccggcgccgacgtcggacgcggttagcgtggcgttcggggacgcgtaccgcaacgaggcgtacggcgcgcgcctcccgagcgcgccgggcgggagggccttcgagcggtgcggcaccgacaccttccgcgtctccggggtgtgcggctacggcgtctgctacctctacctccgccgcgccggccgcgacggctgggcgcccgagtgggtccaggtcaccgagccgggccccggcgccggagagaagcccgccaccttctacttcggggcgccgctgccggacggcgtctggtacggccacaaccgctgcctcaaggccaaggccaaggcagcgggcacggcagcggcggcggctcggacaaacaccacctctgctgctgcttcgcctctgggctagcgcgacctgattcggctctacccaccgggcgcagcccctctccgtatgtaattcggcattcgtcgagaataagcagactgtgcttacagattcagaataagtaattagagaatcataatccgaaatatgatgaggccatgagggcaccttcttc

SEQ ID NO: 61780 - protein, 183 aa, Triticum aestivum
  peptide (1)..(183): Ceres Seq. ID no. 15173737
  misc_feature (34)..(155): Pfam Name: Embryo-specific protein 3, (ATS3) Pfam Description: Embryo-specific protein 3, (ATS3)
  misc_feature (11)..(155): Homolog of NCBI NO: 15240721 NR Description: embryo-specific protein 3 (ATS3) [Arabidopsis
  misc_feature (11)..(155): Homolog of NCBI NO: 13877521 NR Description: embryo-specific protein 3; ATS3 [Arabidopsis
  misc_feature (11)..(155): Homolog of NCBI NO: 3335171 NR Description: embryo-specific protein 3 [Arabidopsis thaliana]
  misc_feature (13)..(155): Homolog of NCBI NO: 26450767 NR Description: embryo-specific protein like [Arabidopsis
  misc_feature (13)..(155): Homolog of NCBI NO: 15241758 NR Description: embryo-specific protein - like [Arabidopsis
  misc_feature (39)..(158): Homolog of NCBI NO: 15241727 NR Description: expressed protein [Arabidopsis thaliana]
  misc_feature (39)..(158): Homolog of NCBI NO: 8809633 NR Description: contains similarity to embryo-specific protein
  misc_feature (40)..(180): Homolog of NCBI NO: 15227355 NR Description: hypothetical protein [Arabidopsis thaliana]
  misc_feature (34)..(163): Homolog of NCBI NO: 34910236 NR Description: OSJNBa0089K24.2 [Oryza sativa (japonica
MAGPGIGAAAPRLSLLLLLLVVVFAGSSRHSRTEAAVRTCTYTVKVKTSCASPAPTSDAVSVAFGDAYRNEAYGARLPSAPGGRAFERCGTDTFRVSGVCGYGVCYLYLRRAGRDGWAPEWVQVTEPGPGAGEKPATFYFGAPLPDGVWYGHNRCLKAKAKAAGTAAAAARTNTTSAAASPLG

SEQ ID NO: 61781 - DNA, 652 bp, Triticum aestivum
  misc_feature (1)..(652): Ceres Seq. ID no. 15173713
acccaactcattcgctctctcgttctcctctccccgcaccaagagcagcaagaggcaagcgcaccccaaagctaagctctgctcagcaattttctccaaagtaacctacacacaaataccaatataccatggcgccatcagtggcctgctccttcttcttcgacgccgagctgcacggtgagcccgacatgccgtcgatggacgcgtgcgcgctctgtgccaagccgctggcgtgcgacagcgacgtcttcatgtacaaaggggacacggcctactgtagcgaggagtgccgccacgagcagatgcacctcgacaccgtctgtgccaagcaggccgcgcggaggcagcagcggttctcggcggggacagaatcccaccgtgggcagcggcagtccagcaaggtgtccgtcgcgagctaagcggccggcctggccgaggaaagttttgttcgaatagacaagatcggaattctgaagaaaacaacatctgtgggcatctgatgtctccgtctctccggccggtgctcttgcctcaaccggaggaagcatcaggtggcacgaagcataggttgttagaagggagagagaaggattgttgcgaaataattggatgtattattgagcctcgagggcgagtatatatatatgaacac

SEQ ID NO: 61782 - protein, 96 aa, Triticum aestivum
  peptide (1)..(96): Ceres Seq. ID no. 15173714
  misc_feature (9)..(62): Pfam Name: Protein of unknown function (DUF581) Pfam Description: Protein of unknown function (DUF581)
  misc_feature (24)..(62): Homolog of NCBI NO: 38344280 NR Description: OSJNBa0013K16.12 [Oryza sativa (japonica
  misc_feature (1)..(90): Homolog of NCBI NO: 15238001 NR Description: senescence-associated protein -related
  misc_feature (11)..(93): Homolog of NCBI NO: 7485163 NR Description: hypothetical protein - Arabidopsis thaliana
  misc_feature (1)..(93): Homolog of NCBI NO: 21594214 NR Description: unknown [Arabidopsis thaliana]
  misc_feature (1)..(93): Homolog of NCBI NO: 18414940 NR Description: senescence-associated protein -related
  misc_feature (1)..(96): Homolog of NCBI NO: 38344285 NR Description: OSJNBa0013K16.17 [Oryza sativa (japonica
  misc_feature (1)..(96): Homolog of NCBI NO: 38344284 NR Description: OSJNBa0013K16.16 [Oryza sativa (japonica
MAPSVACSFFFDAELHGEPDMPSMDACALCAKPLACDSDVFMYKGDTAYCSEECRHEQMHLDTVCAKQAARRQQRFSAGTESHRGQRQSSKVSVAS

SEQ ID NO: 61783 - protein, 76 aa, Triticum aestivum
  peptide (1)..(76): Ceres Seq. ID no. 15173715
  misc_feature (1)..(42): Pfam Name: Protein of unknown function (DUF581) Pfam Description: Protein of unknown function (DUF581)
  misc_feature (4)..(42): Homolog of NCBI NO: 38344280 NR Description: OSJNBa0013K16.12 [Oryza sativa (japonica
  misc_feature (1)..(70): Homolog of NCBI NO: 15238001 NR Description: senescence-associated protein -related
  misc_feature (1)..(73): Homolog of NCBI NO: 7485163 NR Description: hypothetical protein - Arabidopsis thaliana
  misc_feature (1)..(73): Homolog of NCBI NO: 21594214 NR Description: unknown [Arabidopsis thaliana]
  misc_feature (1)..(73): Homolog of NCBI NO: 18414940 NR Description: senescence-associated protein -related
  misc_feature (1)..(76): Homolog of NCBI NO: 38344285 NR Description: OSJNBa0013K16.17 [Oryza sativa (japonica
  misc_feature (1)..(76): Homolog of NCBI NO: 38344284 NR Description: OSJNBa0013K16.16 [Oryza sativa (japonica
MPSMDACALCAKPLACDSDVFMYKGDTAYCSEECRHEQMHLDTVCAKQAARRQQRFSAGTESHRGQRQSSKVSVAS

SEQ ID NO: 61784 - protein, 73 aa, Triticum aestivum
  peptide (1)..(73): Ceres Seq. ID no. 15173716
  misc_feature (1)..(39): Homolog of NCBI NO: 38344280 NR Description: OSJNBa0013K16.12 [Oryza sativa (japonica
  misc_feature (1)..(67): Homolog of NCBI NO: 15238001 NR Description: senescence-associated protein -related
  misc_feature (1)..(70): Homolog of NCBI NO: 7485163 NR Description: hypothetical protein - Arabidopsis thaliana
  misc_feature (1)..(70): Homolog of NCBI NO: 21594214 NR Description: unknown [Arabidopsis thaliana]
  misc_feature (1)..(70): Homolog of NCBI NO: 18414940 NR Description: senescence-associated protein -related
  misc_feature (1)..(73): Homolog of NCBI NO: 38344285 NR Description: OSJNBa0013K16.17 [Oryza sativa (japonica
  misc_feature (1)..(73): Homolog of NCBI NO: 38344284 NR Description: OSJNBa0013K16.16 [Oryza sativa (japonica
MDACALCAKPLACDSDVFMYKGDTAYCSEECRHEQMHLDTVCAKQAARRQQRFSAGTESHRGQRQSSKVSVAS

SEQ ID NO: 61785 - DNA, 624 bp, Triticum aestivum
  misc_feature (1)..(624): Ceres Seq. ID no. 15173027
acttcccccgaaaaggacctcactccccagcccagcccacccctccccgcccgctgcacagtccaaatccccgctccggcccggcgaccgaccgaggatgcccgcctccatgcccaagctgctcttcctcctgctgctcctcctcctcgccgcggccgcccactcttcaccggtcgtcccggatgcggcgggcgaggggtccgaccaggcggcggtgcgcatggtgccgatggccccggctggggggtcggggttcagcggggtggtgctgaacgagacgcggcggcggctggggagcttccagctctgcgcgccctgcacctgctgcggcgggcccaggggcgcctgcgtcctctccccgtgctgctacgctatcaactgcaacatccccaaccgcccattcggattctgctccttcacgcccaggtcttgcgactgcctccactgcaacgtctgagctctgcttctgctctgccctgctctcgagggtgatgagggcaatgttgagggcgatagtaagtattttagagtgtgggtggggaaaaaggacatgacagcatgagagttcccccaacccgaatgcttgccgatttgttattgttttagccctatagccattttgcc

SEQ ID NO: 61786 - protein, 163 aa, Triticum aestivum
  peptide (1)..(163): Ceres Seq. ID no. 15173028
TSPEKDLTPQPSPPLPARCTVQIPAPARRPTEDARLHAQAALPPAAPPPRRGRPLFTGRPGCGGRGVRPGGGAHGADGPGWGVGVQRGGAERDAAAAGELPALRALHLLRRAQGRLRPLPVLLRYQLQHPQPPIRILLLHAQVLRLPPLQRLSSASALPCSRG

SEQ ID NO: 61787 - protein, 151 aa, Triticum aestivum
  peptide (1)..(151): Ceres Seq. ID no. 15173029
  misc_feature (33)..(151): Homolog of NCBI NO: 18412619 NR Description: expressed protein [Arabidopsis thaliana]
  misc_feature (40)..(151): Homolog of NCBI NO: 21954063 NR Description: unknown protein [Arabidopsis thaliana]
  misc_feature (40)..(151): Homolog of NCBI NO: 18408246 NR Description: expressed protein [Arabidopsis thaliana]
  misc_feature (40)..(151): Homolog of NCBI NO: 21593890 NR Description: unknown [Arabidopsis thaliana]
  misc_feature (38)..(151): Homolog of NCBI NO: 34906984 NR Description: P0413C03.15 [Oryza sativa (japonica
LPPKRTSLPSPAHPSPPAAQSKSPLRPGDRPRMPASMPKLLFLLLLLLLAAAAHSSPVVPDAAGEGSDQAAVRMVPMAPAGGSGFSGVVLNETRRRLGSFQLCAPCTCCGGPRGACVLSPCCYAINCNIPNRPFGFCSFTPRSCDCLHCNV

SEQ ID NO: 61788 - protein, 119 aa, Triticum aestivum
  peptide (1)..(119): Ceres Seq. ID no. 15173030
  misc_feature (1)..(119): Homolog of NCBI NO: 18412619 NR Description: expressed protein [Arabidopsis thaliana]
  misc_feature (8)..(119): Homolog of NCBI NO: 21954063 NR Description: unknown protein [Arabidopsis thaliana]
  misc_feature (8)..(119): Homolog of NCBI NO: 18408246 NR Description: expressed protein [Arabidopsis thaliana]
  misc_feature (8)..(119): Homolog of NCBI NO: 21593890 NR Description: unknown [Arabidopsis thaliana]
  misc_feature (6)..(119): Homolog of NCBI NO: 34906984 NR Description: P0413C03.15 [Oryza sativa (japonica
MPASMPKLLFLLLLLLLAAAAHSSPVVPDAAGEGSDQAAVRMVPMAPAGGSGFSGVVLNETRRRLGSFQLCAPCTCCGGPRGACVLSPCCYAINCNIPNRPFGFCSFTPRSCDCLHCNV

SEQ ID NO: 61789 - DNA, 792 bp, Triticum aestivum
  misc_feature (1)..(792): Ceres Seq. ID no. 15173676
ttgttttcaagatatggtgtccgtggcttcccagccattcttctggcaagtgagactacaatggttcgttacaggggcacaaaagatctgaagtctctggttcagttctatcaagagactacaggcctcgacccaattacatatattgatgttgatcagcaagagagcactggaagtttaggatcagccatgccaggaggccgctctctgcgcaaaatggcgaaagacgagccctttctgtttcttggagccctttttataatcatgaagatcgcggcacacttcgtccccactgtcatctcccaactgagagccttcttgattgtgcgtgttcagaacttgaacttaagaatctgtaggggatcaagccaacttatggaacgggcattgactgtgcttgatgttcagaggctctggagcaagcttagactgagcagtaagacaagggacctaagtaaaggggcgagtaatgctcgagcttgggcttcgtcgtttgcgtccgtctcactgggtgaaccatcctccttacggcatgcctagcctcttcctcatgatgctggtcgatagtctagctgctgatatatggcccaaaattgtttggtcttgcttccccatcctgctatgtacgtgcatccgcgcatgtggggacccaggaatgtaaattttcaggatctcatcttgttgtaaataggaacgcgttttcgctttgctgacgcgatagctgatttctgacctttgtttcagttaactctttgatgtatggggaagatctgagtattttttcgatctctt

SEQ ID NO: 61790 - protein, 179 aa, Triticum aestivum
  peptide (1)..(179): Ceres Seq. ID no. 15173677
  misc_feature (1)..(176): Homolog of NCBI NO: 29367467 NR Description: disulfide isomerase-like protein
  misc_feature (3)..(175): Homolog of NCBI NO: 18399435 NR Description: expressed protein [Arabidopsis thaliana]
  misc_feature (42)..(175): Homolog of NCBI NO: 6006856 NR Description: unknown protein [Arabidopsis thaliana]
  misc_feature (1)..(42): Homolog of NCBI NO: 9758894 NR Description: contains similarity to protein disulfide
  misc_feature (43)..(175): Homolog of NCBI NO: 9758894 NR Description: contains similarity to protein disulfide
  misc_feature (1)..(175): Homolog of NCBI NO: 18418521 NR Description: expressed protein [Arabidopsis thaliana]
  misc_feature (1)..(175): Homolog of NCBI NO: 21536613 NR Description: contains similarity to protein disulfide
  misc_feature (1)..(175): Homolog of NCBI NO: 18396691 NR Description: expressed protein [Arabidopsis thaliana]
  misc_feature (1)..(179): Homolog of NCBI NO: 30103009 NR Description: unknown protein [Oryza sativa (japonica
LFSRYGVRGFPAILLASETTMVRYRGTKDLKSLVQFYQETTGLDPITYIDVDQQESTGSLGSAMPGGRSLRKMAKDEPFLFLGALFIIMKIAAHFVPTVISQLRAFLIVRVQNLNLRICRGSSQLMERALTVLDVQRLWSKLRLSSKTRDLSKGASNARAWASSFASVSLGEPSSLRHA

SEQ ID NO: 61791 - protein, 159 aa, Triticum aestivum; identical to SEQ ID NO: 60924
  peptide (1)..(159): Ceres Seq. ID no. 15173678
  misc_feature (1)..(156): Homolog of NCBI NO: 29367467 NR Description: disulfide isomerase-like protein
  misc_feature (1)..(155): Homolog of NCBI NO: 18399435 NR Description: expressed protein [Arabidopsis thaliana]
  misc_feature (22)..(155): Homolog of NCBI NO: 6006856 NR Description: unknown protein [Arabidopsis thaliana]
  misc_feature (1)..(22): Homolog of NCBI NO: 9758894 NR Description: contains similarity to protein disulfide
  misc_feature (23)..(155): Homolog of NCBI NO: 9758894 NR Description: contains similarity to protein disulfide
  misc_feature (1)..(155): Homolog of NCBI NO: 18418521 NR Description: expressed protein [Arabidopsis thaliana]
  misc_feature (1)..(155): Homolog of NCBI NO: 21536613 NR Description: contains similarity to protein disulfide
  misc_feature (1)..(155): Homolog of NCBI NO: 18396691 NR Description: expressed protein [Arabidopsis thaliana]
  misc_feature (1)..(159): Homolog of NCBI NO: 30103009 NR Description: unknown protein [Oryza sativa (japonica

SEQ ID NO: 61792 - protein, 116 aa, Triticum aestivum
  peptide (1)..(116): Ceres Seq. ID no. 15173679
  misc_feature (1)..(113): Homolog of NCBI NO: 29367467 NR Description: disulfide isomerase-like protein
  misc_feature (1)..(112): Homolog of NCBI NO: 18399435 NR Description: expressed protein [Arabidopsis thaliana]
  misc_feature (1)..(112): Homolog of NCBI NO: 6006856 NR Description: unknown protein [Arabidopsis thaliana]
  misc_feature (1)..(112): Homolog of NCBI NO: 9758894 NR Description: contains similarity to protein disulfide
  misc_feature (1)..(112): Homolog of NCBI NO: 18418521 NR Description: expressed protein [Arabidopsis thaliana]
  misc_feature (1)..(112): Homolog of NCBI NO: 21536613 NR Description: contains similarity to protein disulfide
  misc_feature (1)..(112): Homolog of NCBI NO: 18396691 NR Description: expressed protein [Arabidopsis thaliana]
  misc_feature (1)..(116): Homolog of NCBI NO: 30103009 NR Description: unknown protein [Oryza sativa (japonica
MPGGRSLRKMAKDEPFLFLGALFIIMKIAAHFVPTVISQLRAFLIVRVQNLNLRICRGSSQLMERALTVLDVQRLWSKLRLSSKTRDLSKGASNARAWASSFASVSLGEPSSLRHA

SEQ ID NO: 61793 - DNA, 662 bp, Triticum aestivum
  misc_feature (1)..(662): Ceres Seq. ID no. 15173534
atccaaccctcctgctgctgctgtctgtgttgccgccccgaccgccgcctccaccacccacccacccccaccgcgccggcctctcccccctgtcccgtctccctcatggcctccgccgccgcttccgccgtctccttcgccaggcccgtcaagacaatcaatgccaactcggtctccttctctgctccaaggaaagacaatgtatccttccgtcttcagccagttccccagagattttctgttcgctgtgctgccaaaaaggagacagtagaaaaggtttgtgatattgtgaagagccagcttgcgcttgctgatgacactgtagtttctggctcctctacgtttgctgatcttggtgccgattctttggacacggttgagattgtcatgggcctcgaggaggctttcgggatcagcgtggaggagtcgagcgcgcagaccattgcaacggtggaggacgccgccaacctcatcgacagccttgttgcaaactaaacatatttcctggcaataatgtgctacccactgcaatcgttgctgctggagatggatcccatttgacgtgctagattttactgtggagagtcggtgacatctgtatcagtgtttttgcctgtcttgcgatattacgacattatttattaagcggttgttgaaggaat

SEQ ID NO: 61794 - protein, 164 aa, Triticum aestivum
  peptide (1)..(164): Ceres Seq. ID no. 15173535
  misc_feature (91)..(158): Pfam Name: Phosphopantetheine attachment site Pfam Description: Phosphopantetheine attachment site
  misc_feature (58)..(162): Homolog of NCBI NO: 2465010 NR Description: acyl carrier protein [Fragaria vesca]
  misc_feature (36)..(162): Homolog of NCBI NO: 20137323 NR Description: Acyl carrier protein 1, chloroplast precursor
  misc_feature (38)..(161): Homolog of NCBI NO: 30102979 NR Description: putative acyl carrier protein, 3'-partial
  misc_feature (36)..(161): Homolog of NCBI NO: 5669599 NR Description: acyl carrier protein [Coriandrum sativum]
  misc_feature (36)..(163): Homolog of NCBI NO: 4457219 NR Description: acyl carrier protein [Capsicum chinense]
  misc_feature (58)..(163): Homolog of NCBI NO: 166975 NR Description: acyl carrier protein III precursor
  misc_feature (36)..(163): Homolog of NCBI NO: 16518983 NR Description: acyl carrier protein [Olea europaea]
  misc_feature (50)..(163): Homolog of NCBI NO: 7442270 NR Description: acyl carrier protein - maize
  misc_feature (36)..(163): Homolog of NCBI NO: 113172 NR Description: Acyl carrier protein III, chloroplast precursor
  misc_feature (36)..(162): Homolog of NCBI NO: 113169 NR Description: Acyl carrier protein II, chloroplast precursor
IQPSCCCCLCCRPDRRLHHPPTPTAPASPPCPVSLMASAAASAVSFARPVKTINANSVSFSAPRKDNVSFRLQPVPQRFSVRCAAKKETVEKVCDIVKSQLALADDTVVSGSSTFADLGADSLDTVEIVMGLEEAFGISVEESSAQTIATVEDAANLIDSLVAN

SEQ ID NO: 61795 - protein, 129 aa, Triticum aestivum
  peptide (1)..(129): Ceres Seq. ID no. 15173536
  misc_feature (56)..(123): Pfam Name: Phosphopantetheine attachment site Pfam Description: Phosphopantetheine attachment site
  misc_feature (23)..(127): Homolog of NCBI NO: 2465010 NR Description: acyl carrier protein [Fragaria vesca]
  misc_feature (1)..(127): Homolog of NCBI NO: 20137323 NR Description: Acyl carrier protein 1, chloroplast precursor
  misc_feature (3)..(126): Homolog of NCBI NO: 30102979 NR Description: putative acyl carrier protein, 3'-partial
  misc_feature (1)..(126): Homolog of NCBI NO: 5669599 NR Description: acyl carrier protein [Coriandrum sativum]
  misc_feature (1)..(128): Homolog of NCBI NO: 4457219 NR Description: acyl carrier protein [Capsicum chinense]
  misc_feature (23)..(128): Homolog of NCBI NO: 166975 NR Description: acyl carrier protein III precursor
  misc_feature (1)..(128): Homolog of NCBI NO: 16518983 NR Description: acyl carrier protein [Olea europaea]
  misc_feature (15)..(128): Homolog of NCBI NO: 7442270 NR Description: acyl carrier protein - maize
  misc_feature (1)..(128): Homolog of NCBI NO: 113172 NR Description: Acyl carrier protein III, chloroplast precursor
  misc_feature (1)..(127): Homolog of NCBI NO: 113169 NR Description: Acyl carrier protein II, chloroplast precursor
MASAAASAVSFARPVKTINANSVSFSAPRKDNVSFRLQPVPQRFSVRCAAKKETVEKVCDIVKSQLALADDTVVSGSSTFADLGADSLDTVEIVMGLEEAFGISVEESSAQTIATVEDAANLIDSLVAN

SEQ ID NO: 61796 - protein, 93 aa, Triticum aestivum
  peptide (1)..(93): Ceres Seq. ID no. 15173537
PTLLLLLSVLPPRPPPPPPTHPHRAGLSPLSRLPHGLRRRFRRLLRQARQDNQCQLGLLLCSKERQCILPSSASSPEIFCSLCCQKGDSRKGL

SEQ ID NO: 61797 - DNA, 852 bp, Triticum aestivum
  misc_feature (1)..(852): Ceres Seq. ID no. 15173523
cctgcacccacccactccgccgagaaacagcaacagccacagccacacgcccacgcgcacacaccagatcgtcgacagcgatggcaacggcagcggcagcgggaacgagggaggagatggtctacatggcgaagctggcggagcaggccgagcggtacgaggagatggtcgagttcatggagaaggccgccgtcgccgtcgacgccaaggtattctacctgaatatgaagggagactaccatcgctacctcgcggagttcaagtcggccgccgagcgcaaggatgccgctgactccaccctcggtgcctaccaggccgctcaggacatagccatgaaggagctgccaccgactcaccccatcagactgggcctcgcgctcaacttctccgtgttctactatgagatcctcaactcgcctgatcgtgcgtgctcgctcgccaaacaggccttcgatgaagccatcgctgagctggattccctcggagaagattcctacaaggacagcaccctgataatgcaacttctccgtgacaatctcaccttgtggacctctgatatgcaggatgacgctggcgatgaaatgagggattcaagcaagcctgaggatgagcagtagtgaagggtcctagctactgccctctttctctcttaaccttcgggtagttatgatgcttgtacaaggaccattttcgtgtgtcctttgttgcttggtcttttacctaccctttctttcgttatattgttatacatcgccgtcctcgtgcattattttactttacaacttgaatactgctcgtgtatgcacggcttccttcagatttgaaccagagggttgtcaactcttgcttcct

SEQ ID NO: 61798 - protein, 204 aa, Triticum aestivum
  peptide (1)..(204): Ceres Seq. ID no. 15173524
  misc_feature (57)..(190): Pfam Name: 14-3-3 protein Pfam Description: 14-3-3 protein
  misc_feature (32)..(67): Homolog of NCBI NO: 13447104 NR Description: GF14 omega [Brassica napus]
  misc_feature (27)..(67): Homolog of NCBI NO: 1702986 NR Description: 14-3-3-like protein GF14 chi (General regulatory
  misc_feature (62)..(204): Homolog of NCBI NO: 13447104 NR Description: GF14 omega [Brassica napus]
  misc_feature (62)..(204): Homolog of NCBI NO: 1702986 NR Description: 14-3-3-like protein GF14 chi (General regulatory
  misc_feature (27)..(67): Homolog of NCBI NO: 18413181 NR Description: 14-3-3 protein GF14 chi (grf1) [Arabidopsis
  misc_feature (62)..(204): Homolog of NCBI NO: 18413181 NR Description: 14-3-3 protein GF14 chi (grf1) [Arabidopsis
  misc_feature (27)..(68): Homolog of NCBI NO: 29367361 NR Description: WIN2-like protein [Oryza sativa (japonica
  misc_feature (57)..(203): Homolog of NCBI NO: 29367361 NR Description: WIN2-like protein [Oryza sativa (japonica
  misc_feature (30)..(65): Homolog of NCBI NO: 9798605 NR Description: TaWIN2 [Triticum aestivum]
  misc_feature (57)..(204): Homolog of NCBI NO: 9798605 NR Description: TaWIN2 [Triticum aestivum]
CTHPLRRETATATATRPRAHTRSSTAMATAAAAGTREEMVYMAKLAEQAERYEEMVEFMEKAAVAVDAKVFYLNMKGDYHRYLAEFKSAAERKDAADSTLGAYQAAQDIAMKELPPTHPIRLGLALNFSVFYYEILNSPDRACSLAKQAFDEAIAELDSLGEDSYKDSTLIMQLLRDNLTLWTSDMQDDAGDEMRDSSKPEDEQ

SEQ ID NO: 61799 - protein, 178 aa, Triticum aestivum
  peptide (1)..(178): Ceres Seq. ID no. 15173525
  misc_feature (31)..(164): Pfam Name: 14-3-3 protein Pfam Description: 14-3-3 protein
  misc_feature (6)..(41): Homolog of NCBI NO: 13447104 NR Description: GF14 omega [Brassica napus]
  misc_feature (1)..(41): Homolog of NCBI NO: 1702986 NR Description: 14-3-3-like protein GF14 chi (General regulatory
  misc_feature (36)..(178): Homolog of NCBI NO: 13447104 NR Description: GF14 omega [Brassica napus]
  misc_feature (36)..(178): Homolog of NCBI NO: 1702986 NR Description: 14-3-3-like protein GF14 chi (General regulatory
  misc_feature (1)..(41): Homolog of NCBI NO: 18413181 NR Description: 14-3-3 protein GF14 chi (grf1) [Arabidopsis
  misc_feature (36)..(178): Homolog of NCBI NO: 18413181 NR Description: 14-3-3 protein GF14 chi (grf1) [Arabidopsis
  misc_feature (1)..(42): Homolog of NCBI NO: 29367361 NR Description: WIN2-like protein [Oryza sativa (japonica
  misc_feature (31)..(177): Homolog of NCBI NO: 29367361 NR Description: WIN2-like protein [Oryza sativa (japonica
  misc_feature (4)..(39): Homolog of NCBI NO: 9798605 NR Description: TaWIN2 [Triticum aestivum]
  misc_feature (31)..(178): Homolog of NCBI NO: 9798605 NR Description: TaWIN2 [Triticum aestivum]
MATAAAAGTREEMVYMAKLAEQAERYEEMVEFMEKAAVAVDAKVFYLNMKGDYHRYLAEFKSAAERKDAADSTLGAYQAAQDIAMKELPPTHPIRLGLALNFSVFYYEILNSPDRACSLAKQAFDEAIAELDSLGEDSYKDSTLIMQLLRDNLTLWTSDMQDDAGDEMRDSSKPEDEQ

SEQ ID NO: 61800 - protein, 166 aa, Triticum aestivum
  peptide (1)..(166): Ceres Seq. ID no. 15173526
  misc_feature (19)..(152): Pfam Name: 14-3-3 protein Pfam Description: 14-3-3 protein
  misc_feature (1)..(29): Homolog of NCBI NO: 13447104 NR Description: GF14 omega [Brassica napus]
  misc_feature (1)..(29): Homolog of NCBI NO: 1702986 NR Description: 14-3-3-like protein GF14 chi (General regulatory
  misc_feature (24)..(166): Homolog of NCBI NO: 13447104 NR Description: GF14 omega [Brassica napus]
  misc_feature (24)..(166): Homolog of NCBI NO: 1702986 NR Description: 14-3-3-like protein GF14 chi (General regulatory
  misc_feature (1)..(29): Homolog of NCBI NO: 18413181 NR Description: 14-3-3 protein GF14 chi (grf1) [Arabidopsis
  misc_feature (24)..(166): Homolog of NCBI NO: 18413181 NR Description: 14-3-3 protein GF14 chi (grf1) [Arabidopsis
  misc_feature (1)..(30): Homolog of NCBI NO: 29367361 NR Description: WIN2-like protein [Oryza sativa (japonica
  misc_feature (19)..(165): Homolog of NCBI NO: 29367361 NR Description: WIN2-like protein [Oryza sativa (japonica
  misc_feature (1)..(27): Homolog of NCBI NO: 9798605 NR Description: TaWIN2 [Triticum aestivum]
  misc_feature (19)..(166): Homolog of NCBI NO: 9798605 NR Description: TaWIN2 [Triticum aestivum]
MVYMAKLAEQAERYEEMVEFMEKAAVAVDAKVFYLNMKGDYHRYLAEFKSAAERKDAADSTLGAYQAAQDIAMKELPPTHPIRLGLALNFSVFYYEILNSPDRACSLAKQAFDEAIAELDSLGEDSYKDSTLIMQLLRDNLTLWTSDMQDDAGDEMRDSSKPEDEQ

SEQ ID NO: 61801 - DNA, 986 bp, Triticum aestivum
  misc_feature (1)..(986): Ceres Seq. ID no. 15173516
acatcggcccgtagcggaggagcctcctacagtcctactctcctcctctccccccattcactccatcgacgaagcgcacggagggtaactgcacaggaggaaaaccggcgaaggaagcggcggcggctccgggcgtggtcatggacgagaagacgcaggataaggtggaggcggcggtgctggagatcctgcggggttccgacatggagtccctgacggagtacaaggtccgcaccgccgccgccgaacgcctcggcatcgacctcgacctccccctccacaagcgcttcgtgcgacgcctcgtggaggactacctcaagtccctcgccgaagaagaagacgagaagcagaagggcggctcccgcaaggaggggaaaaagaaacagcagcgtcaggaggaggaagagcaggaagaggatgaggagaaggagggggaagaagaggaggaggaggaggacaagggaggtgaaggaaagaaagagttcgacgataatggagacctcatcctctgccgcctgtcgaagaacaggagggtgacgctgcaggagtttaagggcaaaacgctggtgtcgatccgcgagtactacatcaaggacggcaaggaaatgcccagctccaaagggatgagtatgacggtcgagcagtgggagacattcagcaaatcagtacctgcaatagaagacgccatcagaacacttggagaatcagattgaaaggatgccagaaaaacctaaaaatctcgacgctcgttctggacctctgcaagtagagtagtccatgggtgctctgagtactccatggggctactagagttcatctggacttgtataaagcttctcccttagtcaaggtaccgtacctactgatgcgtgctgggtagacagtttgggtgtgttcgcgaactagttctccgccggtatggtggaccgaagtttcatcgctgtgccatgtgatcttgtgctgttgaattgtcctttctgataccg

SEQ ID NO: 61802 - protein, 190 aa, Triticum aestivum
  peptide (1)..(190): Ceres Seq. ID no. 15173517
  misc_feature (94)..(183): Pfam Name: Transcriptional Coactivator p15 (PC4) Pfam Description: Transcriptional Coactivator p15 (PC4)
  misc_feature (60)..(186): Homolog of NCBI NO: 6755364 NR Description: RNA polymerase II transcriptional coactivator
  misc_feature (1)..(106): Homolog of NCBI NO: 15236980 NR Description: transcriptional co-activator (KELP) -related
  misc_feature (59)..(180): Homolog of NCBI NO: 17542398 NR Description: RNA polymerase II Transcriptional Coactivator
  misc_feature (112)..(189): Homolog of NCBI NO: 40739125 NR Description: hypothetical protein AN5806.2 [Aspergillus
  misc_feature (83)..(186): Homolog of NCBI NO: 15242365 NR Description: transcriptional co-activator (KIWI) -related
  misc_feature (1)..(105): Homolog of NCBI NO: 13699910 NR Description: putative transcriptional coactivator [Brassica
  misc_feature (1)..(186): Homolog of NCBI NO: 16610191 NR Description: PBF68 protein [Nicotiana tabacum]
  misc_feature (22)..(186): Homolog of NCBI NO: 15236980 NR Description: transcriptional co-activator (KELP) -related
  misc_feature (22)..(186): Homolog of NCBI NO: 13699910 NR Description: putative transcriptional coactivator [Brassica
  misc_feature (1)..(189): Homolog of NCBI NO: 34910378 NR Description: P0684B02.23 [Oryza sativa (japonica
MDEKTQDKVEAAVLEILRGSDMESLTEYKVRTAAAERLGIDLDLPLHKRFVRRLVEDYLKSLAEEEDEKQKGGSRKEGKKKQQRQEEEEQEEDEEKEGEEEEEEEDKGGEGKKEFDDNGDLILCRLSKNRRVTLQEFKGKTLVSIREYYIKDGKEMPSSKGMSMTVEQWETFSKSVPAIEDAIRTLGESD

SEQ ID NO: 61803 - protein, 169 aa, Triticum aestivum
  peptide (1)..(169): Ceres Seq. ID no. 15173518
  misc_feature (73)..(162): Pfam Name: Transcriptional Coactivator p15 (PC4) Pfam Description: Transcriptional Coactivator p15 (PC4)
  misc_feature (39)..(165): Homolog of NCBI NO: 6755364 NR Description: RNA polymerase II transcriptional coactivator
  misc_feature (1)..(85): Homolog of NCBI NO: 15236980 NR Description: transcriptional co-activator (KELP) -related
  misc_feature (38)..(159): Homolog of NCBI NO: 17542398 NR Description: RNA polymerase II Transcriptional Coactivator
  misc_feature (91)..(168): Homolog of NCBI NO: 40739125 NR Description: hypothetical protein AN5806.2 [Aspergillus
  misc_feature (62)..(165): Homolog of NCBI NO: 15242365 NR Description: transcriptional co-activator (KIWI) -related
  misc_feature (1)..(84): Homolog of NCBI NO: 13699910 NR Description: putative transcriptional coactivator [Brassica
  misc_feature (1)..(165): Homolog of NCBI NO: 16610191 NR Description: PBF68 protein [Nicotiana tabacum]
  misc_feature (1)..(165): Homolog of NCBI NO: 15236980 NR Description: transcriptional co-activator (KELP) -related
  misc_feature (1)..(165): Homolog of NCBI NO: 13699910 NR Description: putative transcriptional coactivator [Brassica
  misc_feature (1)..(168): Homolog of NCBI NO: 34910378 NR Description: P0684B02.23 [Oryza sativa (japonica
MESLTEYKVRTAAAERLGIDLDLPLHKRFVRRLVEDYLKSLAEEEDEKQKGGSRKEGKKKQQRQEEEEQEEDEEKEGEEEEEEEDKGGEGKKEFDDNGDLILCRLSKNRRVTLQEFKGKTLVSIREYYIKDGKEMPSSKGMSMTVEQWETFSKSVPAIEDAIRTLGESD

SEQ ID NO: 61804 - DNA, 615 bp, Triticum aestivum
  misc_feature (1)..(615): Ceres Seq. ID no. 15173484
gcgaggcaggatgctgctatgtcaaggtcagcatggatggggccccatacctgaggaaggtcgatcttaagacctactccagctatgacaacctttccctggagctggagaagatgttcagctgcttcatcactggcaaaagcagttcctgcaaaacatcgacgagagacaggctcactgatggttctagggctgatgctcttcaggaccaagagtatgtacttacctatgaggacaaggatgctgactggatgcttgttggtgatcttccttgggacttgtttaccactacttgtcggaaactgagaatcatgagaggctctgatgctgctggaatggccccaagatagctggaaccgatcggccagaacaaacaagcgtctgtccgtcctggcctctcctcctcctgaagtcttgtgtctgaatcacgcaagtgtggaattttgagttaacgctgcaaggcgccgctgaagggtgcgatggttgtctcaactctctgaaagtgtctgcgctgctgccagtttatctatctacgtgtgtagtggaatatgtgcgtcctactgtaaaacaatccgtttttgacctcgccgttgtagatggtcccttttggttcat

SEQ ID NO: 61805 - protein, 115 aa, Triticum aestivum
  peptide (1)..(115): Ceres Seq. ID no. 15173485
  misc_feature (1)..(115): Pfam Name: AUX/IAA family Pfam Description: AUX/IAA family
  misc_feature (3)..(115): Homolog of NCBI NO: 20269051 NR Description: aux/IAA protein [Populus tremula x Populus
  misc_feature (6)..(115): Homolog of NCBI NO: 25989504 NR Description: Aux/IAA protein [Solanum tuberosum]
  misc_feature (6)..(115): Homolog of NCBI NO: 16610193 NR Description: IAA9 protein [Nicotiana tabacum]
  misc_feature (3)..(115): Homolog of NCBI NO: 15227275 NR Description: auxin-responsive protein IAA8 (Indoleacetic
  misc_feature (1)..(115): Homolog of NCBI NO: 15235556 NR Description: AUX/IAA family [Arabidopsis thaliana]
  misc_feature (3)..(115): Homolog of NCBI NO: 20257219 NR Description: auxin-regulated protein [Zinnia elegans]
  misc_feature (1)..(115): Homolog of NCBI NO: 34911088 NR Description: OJ1117_G01.11 [Oryza sativa (japonica
EAGCCYVKVSMDGAPYLRKVDLKTYSSYDNLSLELEKMFSCFITGKSSSCKTSTRDRLTDGSRADALQDQEYVLTYEDKDADWMLVGDLPWDLFTTTCRKLRIMRGSDAAGMAPR

SEQ ID NO: 61806 - protein, 105 aa, Triticum aestivum
  peptide (1)..(105): Ceres Seq. ID no. 15173486
  misc_feature (1)..(105): Pfam Name: AUX/IAA family Pfam Description: AUX/IAA family
  misc_feature (1)..(105): Homolog of NCBI NO: 20269051 NR Description: aux/IAA protein [Populus tremula x Populus
  misc_feature (1)..(105): Homolog of NCBI NO: 25989504 NR Description: Aux/IAA protein [Solanum tuberosum]
  misc_feature (1)..(105): Homolog of NCBI NO: 16610193 NR Description: IAA9 protein [Nicotiana tabacum]
  misc_feature (1)..(105): Homolog of NCBI NO: 15227275 NR Description: auxin-responsive protein IAA8 (Indoleacetic
  misc_feature (1)..(105): Homolog of NCBI NO: 15235556 NR Description: AUX/IAA family [Arabidopsis thaliana]
  misc_feature (1)..(105): Homolog of NCBI NO: 20257219 NR Description: auxin-regulated protein [Zinnia elegans]
  misc_feature (1)..(105): Homolog of NCBI NO: 34911088 NR Description: OJ1117_G01.11 [Oryza sativa (japonica
MDGAPYLRKVDLKTYSSYDNLSLELEKMFSCFITGKSSSCKTSTRDRLTDGSRADALQDQEYVLTYEDKDADWMLVGDLPWDLFTTTCRKLRIMRGSDAAGMAPR

SEQ ID NO: 61807 - protein, 78 aa, Triticum aestivum
  peptide (1)..(78): Ceres Seq. ID no. 15173487
  misc_feature (1)..(78): Pfam Name: AUX/IAA family Pfam Description: AUX/IAA family
  misc_feature (1)..(78): Homolog of NCBI NO: 20269051 NR Description: aux/IAA protein [Populus tremula x Populus
  misc_feature (1)..(78): Homolog of NCBI NO: 25989504 NR Description: Aux/IAA protein [Solanum tuberosum]
  misc_feature (1)..(78): Homolog of NCBI NO: 16610193 NR Description: IAA9 protein [Nicotiana tabacum]
  misc_feature (1)..(78): Homolog of NCBI NO: 15227275 NR Description: auxin-responsive protein IAA8 (Indoleacetic
  misc_feature (1)..(78): Homolog of NCBI NO: 15235556 NR Description: AUX/IAA family [Arabidopsis thaliana]
  misc_feature (1)..(78): Homolog of NCBI NO: 20257219 NR Description: auxin-regulated protein [Zinnia elegans]
  misc_feature (1)..(78): Homolog of NCBI NO: 34911088 NR Description: OJ1117_G01.11 [Oryza sativa (japonica
MFSCFITGKSSSCKTSTRDRLTDGSRADALQDQEYVLTYEDKDADWMLVGDLPWDLFTTTCRKLRIMRGSDAAGMAPR

SEQ ID NO: 61808 - DNA, 905 bp, Triticum aestivum
  misc_feature (1)..(905): Ceres Seq. ID no. 15173417
acgactccatcgcggagacaaccaaacaacctcgtacagcacaggcgatcgatcggcgcggccatggagaagccgccgatcccgagcatcatctccaccgtcacctactgctgcggggcgtgcgggtacgacctgaggctgagctcgctggcgcgggacacggcgggcggcgctggcgcgaggcggcggtgcgtgggcgcggcggaggtggtgttcgacgccatcgacgacgcgcgcttcggccacctggaggagttccggtggctggacgtgcgcgcctgcctccccttctcgcgccgcacgcgcctgctctgccgcaagtgcggcgcccgcctcggctacggctacgacgacaccgccgccgccgaccgcccgccgcgctaccacatcaagatccgggccctccagcccgcccccgatcccgcctcggaccacgcggcgccgtccgatccgtgatctgagatcctgccgtattctttgattgcctgtgcatgcagccgcatctgtctctctctcctttcaatcgaatctcctccaaagtcgctcgcttggacccgaagcaaggaatgaaacagactggttgattgatcgggatccgattttgctttctgatatttttaagcggaattattggtcttgacttggttgcgttgtggaactgtagaagtcaaaagttgtgtactgttccagtctgaacttccaatgctggtggcgacactgatcgtgcaagggggaggatcgccagcagcagctttcaaccatgcatcgtctctttgattcaaaggatcttcataggatttttgaaggattagaatccttaggaatgtttcctacgttggtcgtttgattcgtaggattgaatcttgtagaatttttttctaaggatttatttgtactacatttcg

SEQ ID NO: 61809 - protein, 152 aa, Triticum aestivum
  peptide (1)..(152): Ceres Seq. ID no. 15173418
DSIAETTKQPRTAQAIDRRGHGEAADPEHHLHRHLLLRGVRVRPEAELAGAGHGGRRWREAAVRGRGGGGVRRHRRRALRPPGGVPVAGRARLPPLLAPHAPALPQVRRPPRLRLRRHRRRRPPAALPHQDPGPPARPRSRLGPRGAVRSVI

SEQ ID NO: 61810 - protein, 151 aa, Triticum aestivum
  peptide (1)..(151): Ceres Seq. ID no. 15173419
  misc_feature (34)..(137): Homolog of NCBI NO: 15236464 NR Description: expressed protein [Arabidopsis thaliana]
  misc_feature (23)..(125): Homolog of NCBI NO: 34908010 NR Description: P0460C04.15 [Oryza sativa (japonica
TTPSRRQPNNLVQHRRSIGAAMEKPPIPSIISTVTYCCGACGYDLRLSSLARDTAGGAGARRRCVGAAEVVFDAIDDARFGHLEEFRWLDVRACLPFSRRTRLLCRKCGARLGYGYDDTAAADRPPRYHIKIRALQPAPDPASDHAAPSDP

SEQ ID NO: 61811 - protein, 130 aa, Triticum aestivum
  peptide (1)..(130): Ceres Seq. ID no. 15173420
  misc_feature (13)..(116): Homolog of NCBI NO: 15236464 NR Description: expressed protein [Arabidopsis thaliana]
  misc_feature (2)..(104): Homolog of NCBI NO: 34908010 NR Description: P0460C04.15 [Oryza sativa (japonica
MEKPPIPSIISTVTYCCGACGYDLRLSSLARDTAGGAGARRRCVGAAEVVFDAIDDARFGHLEEFRWLDVRACLPFSRRTRLLCRKCGARLGYGYDDTAAADRPPRYHIKIRALQPAPDPASDHAAPSDP

SEQ ID NO: 61812 - DNA, 1086 bp, Triticum aestivum
  misc_feature (1)..(1086): Ceres Seq. ID no. 15173410
gcattgtcgcatcgagttgcacacccactgcctgcacacgtctacgtacaccatggcagccatgcagagacttgtgctccttctgtccgtggcgatcgcggcgtcggcgcagggcccggcggtggcgcccgcggcgccgacgacgcccacggccccggcggcgcccgctccggcggccggcacgacgaacatcacgggggtgctggccaaggccgggcagttcaacaccttcatccggctgctcaagtcgacgggcgtggcggcgcagatcgacaaccagctcaacaacagcttcggcagcggcatgacggtgttcgcgcccaccgacaacgccttcacctcgctcgcctccggcacgctcaactcgctgtccgacagccagaagaacgcgctcatccagtaccacgtcctctccaccgccatccccatgtcgcagttcgacaccgtcagcaacccgctccgcacgcaggccggcagcacctcccccgcccagtacccgctcaacgtcaccgccgagggccagcaggtcaacatcaccaccggcgtcgtcaacgccaccgtcgacaacacgctctacaccggcgaccagctcgtcgtctaccaggtcaacaaggtgctcctgcccatggccatcgccggcacggccgcacccgcgcccgcgccgctcgcgcccaccaagaccaaggggaagacgcccacgtcgacggtcgccgacgcgcccgaggccgaagcgtcgacggacacgtcgctcgcggcgccggcacgggtggtcacactcacaggaggtggtgtcgtcgcggtggttcacgtgcttgccctggcctgcgtctggtgggggccgtgacagcgccgcgcccgatcagagtgtgagccccaacctgaggtctagatccatgcatcacaatctttttttgctcactttcttttcaaaggtgttggtctttttcgtttgatttgttctttttatttcagctcatttttatacctctgtaattgctagggacatgtaaagtgaaatgtactattacgggagtcacatttttatgtaatgttgttactaaataaatatacatatttttatagtgc

SEQ ID NO: 61813 - protein, 289 aa, Triticum aestivum
  peptide (1)..(289): Ceres Seq. ID no. 15173411
  misc_feature (79)..(189): Pfam Name: Sperm histone P2 Pfam Description: Sperm histone P2
ALSHRVAHPLPAHVYVHHGSHAETCAPSVRGDRGVGAGPGGGARGADDAHGPGGARSGGRHDEHHGGAGQGRAVQHLHPAAQVDGRGGADRQPAQQQLRQRHDGVRAHRQRLHLARLRHAQLAVRQPEERAHPVPRPLHRHPHVAVRHRQQPAPHAGRQHLPRPVPAQRHRRGPAGQHHHRRRQRHRRQHALHRRPARRLPGQQGAPAHGHRRHGRTRARAARAHQDQGEDAHVDGRRRARGRSVDGHVARGAGTGGHTHRRWCRRGGSRACPGLRLVGAVTAPRPIRV

SEQ ID NO: 61814 - protein, 280 aa, Triticum aestivum
  peptide (1)..(280): Ceres Seq. ID no. 15173412
  misc_feature (61)..(208): Pfam Name: Fasciclin domain Pfam Description: Fasciclin domain
  misc_feature (14)..(242): Homolog of NCBI NO: 15232973 NR Description: fasciclin-like arabinogalactan-protein (FLA10)
  misc_feature (14)..(242): Homolog of NCBI NO: 14190409 NR Description: AT3g60900/T4C21_310 [Arabidopsis thaliana]
  misc_feature (18)..(271): Homolog of NCBI NO: 34910950 NR Description: putative arabinogalactan-like protein
  misc_feature (24)..(230): Homolog of NCBI NO: 15294288 NR Description: AT5g60490/muf9_140 [Arabidopsis thaliana]
  misc_feature (24)..(251): Homolog of NCBI NO: 21553590 NR Description: arabinogalactan protein-like [Arabidopsis
  misc_feature (24)..(251): Homolog of NCBI NO: 15239344 NR Description: fasciclin-like arabinogalactan-protein (FLA12)
  misc_feature (45)..(277): Homolog of NCBI NO: 15242651 NR Description: fasciclin-like arabinogalactan-protein (FLA11)
  misc_feature (45)..(277): Homolog of NCBI NO: 21553523 NR Description: arabinogalactan protein-like [Arabidopsis
  misc_feature (47)..(273): Homolog of NCBI NO: 30841338 NR Description: arabinogalactan protein [Gossypium hirsutum]
  misc_feature (30)..(279): Homolog of NCBI NO: 34896012 NR Description: EST D25138(R3286) corresponds to a region of the gene.~Similar to Pinus taeda arabinogalactan-like protein
HCRIELHTHCLHTSTYTMAAMQRLVLLLSVAIAASAQGPAVAPAAPTTPTAPAAPAPAAGTTNITGVLAKAGQFNTFIRLLKSTGVAAQIDNQLNNSFGSGMTVFAPTDNAFTSLASGTLNSLSDSQKNALIQYHVLSTAIPMSQFDTVSNPLRTQAGSTSPAQYPLNVTAEGQQVNITTGVVNATVDNTLYTGDQLVVYQVNKVLLPMAIAGTAAPAPAPLAPTKTKGKTPTSTVADAPEAEASTDTSLAAPARVVTLTGGGVVAVVHVLALACVWWGP

SEQ ID NO: 61815 - protein, 263 aa, Triticum aestivum
  peptide (1)..(263): Ceres Seq. ID no. 15173413
  misc_feature (44)..(191): Pfam Name: Fasciclin domain Pfam Description: Fasciclin domain
  misc_feature (1)..(225): Homolog of NCBI NO: 15232973 NR Description: fasciclin-like arabinogalactan-protein (FLA10)
  misc_feature (1)..(225): Homolog of NCBI NO: 14190409 NR Description: AT3g60900/T4C21_310 [Arabidopsis thaliana]
  misc_feature (1)..(254): Homolog of NCBI NO: 34910950 NR Description: putative arabinogalactan-like protein
  misc_feature (7)..(213): Homolog of NCBI NO: 15294288 NR Description: AT5g60490/muf9_140 [Arabidopsis thaliana]
  misc_feature (7)..(234): Homolog of NCBI NO: 21553590 NR Description: arabinogalactan protein-like [Arabidopsis
  misc_feature (7)..(234): Homolog of NCBI NO: 15239344 NR Description: fasciclin-like arabinogalactan-protein (FLA12)
  misc_feature (28)..(260): Homolog of NCBI NO: 15242651 NR Description: fasciclin-like arabinogalactan-protein (FLA11)
  misc_feature (28)..(260): Homolog of NCBI NO: 21553523 NR Description: arabinogalactan protein-like [Arabidopsis
  misc_feature (30)..(256): Homolog of NCBI NO: 30841338 NR Description: arabinogalactan protein [Gossypium hirsutum]
  misc_feature (13)..(262): Homolog of NCBI NO: 34896012 NR Description: EST D25138(R3286) corresponds to a region of the gene.~Similar to Pinus taeda arabinogalactan-like protein
MAAMQRLVLLLSVAIAASAQGPAVAPAAPTTPTAPAAPAPAAGTTNITGVLAKAGQFNTFIRLLKSTGVAAQIDNQLNNSFGSGMTVFAPTDNAFTSLASGTLNSLSDSQKNALIQYHVLSTAIPMSQFDTVSNPLRTQAGSTSPAQYPLNVTAEGQQVNITTGVVNATVDNTLYTGDQLVVYQVNKVLLPMAIAGTAAPAPAPLAPTKTKGKTPTSTVADAPEAEASTDTSLAAPARVVTLTGGGVVAVVHVLALACVWWGP

SEQ ID NO: 61816 - DNA, 728 bp, Triticum aestivum
  misc_feature (1)..(728): Ceres Seq. ID no. 15173047
gcgtgtccccattccgatccccctcccggcgccgcctccagcctagggtttcctcccgccgcccgtccgccccacccgccgccatggcccgccgcagcggaggaggaaggtcttcccgccctgctccacgtgctgctccagtgagaaacccaccagcgccagcccgtccagctcctccacctgctaccacccagagcagcggtggtggtatcatgagcgggattgggtccaccattgctcagggcatggctttcggtactggaagtgccatggcgcacagggctgttgatgctgtgatgggtccccgtaccattcagcatgagactgttgtcggtgaggctgctgcatctatgactccaatggacaatgctgctgatgacaagtgtggcaacccttccaaggccttccaagattgcatcaaccactacggaagcgatatcagcaagtgccagttctaccttgacatgctgaacgagtgccgccgtggaggagcaactctttaagctactatctttgcttgattggggcttaattgggcagaacctgttttcagtcatgatgatgatgatatatatctcctaaataattcattggcaatattatgaacctatgccacagcttgtgtctattacctaccctagttcgtggtctctgttgtcccgggagtatttccttgtattgatgttggaattaccttcatggcagtgggtttataaatatggagtttg

SEQ ID NO: 61817 - protein, 166 aa, Triticum aestivum
  peptide (1)..(166): Ceres Seq. ID no. 15173048
  misc_feature (9)..(160): Homolog of NCBI NO: 40741607 NR Description: hypothetical protein AN4755.2 [Aspergillus
  misc_feature (38)..(161): Homolog of NCBI NO: 23509031 NR Description: hypothetical protein, conserved [Plasmodium
  misc_feature (28)..(166): Homolog of NCBI NO: 15242455 NR Description: expressed protein [Arabidopsis thaliana]
  misc_feature (28)..(166): Homolog of NCBI NO: 15237688 NR Description: expressed protein [Arabidopsis thaliana]
  misc_feature (28)..(165): Homolog of NCBI NO: 13174237 NR Description: unknown protein [Oryza sativa]
VSPFRSPSRRRLQPRVSSRRPSAPPAAMARRSGGGRSSRPAPRAAPVRNPPAPARPAPPPATTQSSGGGIMSGIGSTIAQGMAFGTGSAMAHRAVDAVMGPRTIQHETVVGEAAASMTPMDNAADDKCGNPSKAFQDCINHYGSDISKCQFYLDMLNECRRGGATL

SEQ ID NO: 61818 - protein, 139 aa, Triticum aestivum
  peptide (1)..(139): Ceres Seq. ID no. 15173049
  misc_feature (1)..(133): Homolog of NCBI NO: 40741607 NR Description: hypothetical protein AN4755.2 [Aspergillus
  misc_feature (11)..(134): Homolog of NCBI NO: 23509031 NR Description: hypothetical protein, conserved [Plasmodium
  misc_feature (1)..(139): Homolog of NCBI NO: 15242455 NR Description: expressed protein [Arabidopsis thaliana]
  misc_feature (1)..(139): Homolog of NCBI NO: 15237688 NR Description: expressed protein [Arabidopsis thaliana]
  misc_feature (1)..(138): Homolog of NCBI NO: 13174237 NR Description: unknown protein [Oryza sativa]
MARRSGGGRSSRPAPRAAPVRNPPAPARPAPPPATTQSSGGGIMSGIGSTIAQGMAFGTGSAMAHRAVDAVMGPRTIQHETVVGEAAASMTPMDNAADDKCGNPSKAFQDCINHYGSDISKCQFYLDMLNECRRGGATL

SEQ ID NO: 61819 - protein, 96 aa, Triticum aestivum
  peptide (1)..(96): Ceres Seq. ID no. 15173050
  misc_feature (1)..(90): Homolog of NCBI NO: 40741607 NR Description: hypothetical protein AN4755.2 [Aspergillus
  misc_feature (1)..(91): Homolog of NCBI NO: 23509031 NR Description: hypothetical protein, conserved [Plasmodium
  misc_feature (1)..(96): Homolog of NCBI NO: 15242455 NR Description: expressed protein [Arabidopsis thaliana]
  misc_feature (1)..(96): Homolog of NCBI NO: 15237688 NR Description: expressed protein [Arabidopsis thaliana]
  misc_feature (1)..(95): Homolog of NCBI NO: 13174237 NR Description: unknown protein [Oryza sativa]
MSGIGSTIAQGMAFGTGSAMAHRAVDAVMGPRTIQHETVVGEAAASMTPMDNAADDKCGNPSKAFQDCINHYGSDISKCQFYLDMLNECRRGGATL

SEQ ID NO: 61820 - DNA, 534 bp, Triticum aestivum
  misc_feature (1)..(534): Ceres Seq. ID no. 15173382
acagctaccaccactctatcagtctatcccgttggttctacttggcgtcagcacggcacctgccttccaagttcatccaccatgggcgactcatcctcggcttcctacatcagaatggtgcaccatctgatagagaagtgcatttgcttcaacctcaacaaggaggggtgcatggaggccctggagaagcatgccaagatcaacccggtcgtcactgccactgtgtggaaagagctggagaaggagaacaaggagttcttcgagtcttacaacagggaccgcgtggagcggaacatcgaggcggcgacgatggagcggatccagaagatgctctccgacgcggctgcctccaagacctccgacgacgatgagggctagaaggctgctgcttatgtccaagctcatgcgcatgcatcacctctagctaattaattgtatgaatagcatgtcttccgttaattggatccattatgtctaggaggatcgaatttattaattgcacctatctcataacagaccagtagcttgaaaccg

SEQ ID NO: 61821 - protein, 125 aa, Triticum aestivum
  peptide (1)..(125): Ceres Seq. ID no. 15173383
  misc_feature (24)..(90): Homolog of NCBI NO: 6056200 NR Description: unknown protein [Arabidopsis thaliana]
  misc_feature (24)..(90): Homolog of NCBI NO: 18398808 NR Description: expressed protein [Arabidopsis thaliana]
  misc_feature (24)..(90): Homolog of NCBI NO: 15237627 NR Description: hypothetical protein [Arabidopsis thaliana]
  misc_feature (28)..(74): Homolog of NCBI NO: 30679685 NR Description: expressed protein [Arabidopsis thaliana]
  misc_feature (52)..(112): Homolog of NCBI NO: 11358211 NR Description: hypothetical protein T22P11.170 - Arabidopsis
  misc_feature (28)..(112): Homolog of NCBI NO: 15228557 NR Description: hypothetical protein [Arabidopsis thaliana]
  misc_feature (28)..(112): Homolog of NCBI NO: 21553770 NR Description: unknown [Arabidopsis thaliana]
  misc_feature (28)..(112): Homolog of NCBI NO: 29028782 NR Description: At5g02580 [Arabidopsis thaliana]
  misc_feature (29)..(123): Homolog of NCBI NO: 34908092 NR Description: P0031D11.2 [Oryza sativa (japonica
  misc_feature (28)..(122): Homolog of NCBI NO: 15233218 NR Description: expressed protein [Arabidopsis thaliana]
TATTTLSVYPVGSTWRQHGTCLPSSSTMGDSSSASYIRMVHHLIEKCICFNLNKEGCMEALEKHAKINPVVTATVWKELEKENKEFFESYNRDRVERNIEAATMERIQKMLSDAAASKTSDDDEG

SEQ ID NO: 61822 - protein, 122 aa, Triticum aestivum
  peptide (1)..(122): Ceres Seq. ID no. 15173384
SYHHSISLSRWFYLASARHLPSKFIHHGRLILGFLHQNGAPSDREVHLLQPQQGGVHGGPGEACQDQPGRHCHCVERAGEGEQGVLRVLQQGPRGAEHRGGDDGADPEDALRRGCLQDLRRR

SEQ ID NO: 61823 - protein, 98 aa, Triticum aestivum
  peptide (1)..(98): Ceres Seq. ID no. 15173385
  misc_feature (1)..(63): Homolog of NCBI NO: 6056200 NR Description: unknown protein [Arabidopsis thaliana]
  misc_feature (1)..(63): Homolog of NCBI NO: 18398808 NR Description: expressed protein [Arabidopsis thaliana]
  misc_feature (1)..(63): Homolog of NCBI NO: 15237627 NR Description: hypothetical protein [Arabidopsis thaliana]
  misc_feature (1)..(47): Homolog of NCBI NO: 30679685 NR Description: expressed protein [Arabidopsis thaliana]
  misc_feature (25)..(85): Homolog of NCBI NO: 11358211 NR Description: hypothetical protein T22P11.170 - Arabidopsis
  misc_feature (1)..(85): Homolog of NCBI NO: 15228557 NR Description: hypothetical protein [Arabidopsis thaliana]
  misc_feature (1)..(85): Homolog of NCBI NO: 21553770 NR Description: unknown [Arabidopsis thaliana]
  misc_feature (1)..(85): Homolog of NCBI NO: 29028782 NR Description: At5g02580 [Arabidopsis thaliana]
  misc_feature (2)..(96): Homolog of NCBI NO: 34908092 NR Description: P0031D11.2 [Oryza sativa (japonica
  misc_feature (1)..(95): Homolog of NCBI NO: 15233218 NR Description: expressed protein [Arabidopsis thaliana]
MGDSSSASYIRMVHHLIEKCICFNLNKEGCMEALEKHAKINPVVTATVWKELEKENKEFFESYNRDRVERNIEAATMERIQKMLSDAAASKTSDDDEG

SEQ ID NO: 61824 - DNA, 688 bp, Triticum aestivum
  misc_feature (1)..(688): Ceres Seq. ID no. 15173348
cttgctagatactacttgaacaacttcgcagatgggacgaagcaggatgccatggatcttcttcaaggactttacatcacatctgttagtcgagacatggcacctccaacaaaagcaggatttgtagagagctatgcgtccgcccgccttgcttttgcattggtttccggagcttttatgttcatgatgatgtcactgagacatgctcggcatgatgctcgtcatttattgctgtcacttctctgggctggtctttgcatcgggatcacacactttgtgagaagcaatggccgggtattcacgaaccggccccgtgcccacaagtcgtcacacccttgatggaaagcaggcggggtgatagattatcattcgttcatcaaacaatggcagtactccacttttttctatgtagagatgtaatttgtgtccatccctttctcctgaagattgtgttctattatctatctatattctttgttcttcaagtccatatgcataatcgatctttgaccagtaaataaacagctgttgctagttgcaacaatcacattttccagtaccaggacatagttacagcttcccgcgataaaaggatatagagatacggctttccggtgtatttatgccaaagtggcgaagtgatgttgtgcagagcttttcagttatgccaattgagatttgttgttcc

SEQ ID NO: 61825 - protein, 112 aa, Triticum aestivum
  peptide (1)..(112): Ceres Seq. ID no. 15173349
  misc_feature (1)..(105): Homolog of NCBI NO: 30693541 NR Description: transmembrane protein G5p (AtG5) -related
  misc_feature (1)..(66): Homolog of NCBI NO: 15239234 NR Description: hypothetical protein [Arabidopsis thaliana]
  misc_feature (1)..(71): Homolog of NCBI NO: 11281506 NR Description: hypothetical protein F26O13.100 - Arabidopsis
  misc_feature (1)..(108): Homolog of NCBI NO: 10177117 NR Description: emb|CAB63010.1~gene_id:K2A18.9~strong similarity
  misc_feature (1)..(108): Homolog of NCBI NO: 30840665 NR Description: SAC1-like protein AtSAC1b [Arabidopsis thaliana]
  misc_feature (1)..(108): Homolog of NCBI NO: 30693470 NR Description: expressed protein [Arabidopsis thaliana]
LARYYLNNFADGTKQDAMDLLQGLYITSVSRDMAPPTKAGFVESYASARLAFALVSGAFMFMMMSLRHARHDARHLLLSLLWAGLCIGITHFVRSNGRVFTNRPRAHKSSHP

SEQ ID NO: 61826 - protein, 95 aa, Triticum aestivum
  peptide (1)..(95): Ceres Seq. ID no. 15173350
  misc_feature (1)..(88): Homolog of NCBI NO: 30693541 NR Description: transmembrane protein G5p (AtG5) -related
  misc_feature (1)..(49): Homolog of NCBI NO: 15239234 NR Description: hypothetical protein [Arabidopsis thaliana]
  misc_feature (1)..(54): Homolog of NCBI NO: 11281506 NR Description: hypothetical protein F26O13.100 - Arabidopsis
  misc_feature (1)..(91): Homolog of NCBI NO: 10177117 NR Description: emb|CAB63010.1~gene_id:K2A18.9~strong similarity
  misc_feature (1)..(91): Homolog of NCBI NO: 30840665 NR Description: SAC1-like protein AtSAC1b [Arabidopsis thaliana]
  misc_feature (1)..(91): Homolog of NCBI NO: 30693470 NR Description: expressed protein [Arabidopsis thaliana]
MDLLQGLYITSVSRDMAPPTKAGFVESYASARLAFALVSGAFMFMMMSLRHARHDARHLLLSLLWAGLCIGITHFVRSNGRVFTNRPRAHKSSHP

SEQ ID NO: 61827 - protein, 80 aa, Triticum aestivum
  peptide (1)..(80): Ceres Seq. ID no. 15173351
  misc_feature (1)..(73): Homolog of NCBI NO: 30693541 NR Description: transmembrane protein G5p (AtG5) -related
  misc_feature (1)..(34): Homolog of NCBI NO: 15239234 NR Description: hypothetical protein [Arabidopsis thaliana]
  misc_feature (1)..(39): Homolog of NCBI NO: 11281506 NR Description: hypothetical protein F26O13.100 - Arabidopsis
  misc_feature (1)..(76): Homolog of NCBI NO: 10177117 NR Description: emb|CAB63010.1~gene_id:K2A18.9~strong similarity
  misc_feature (1)..(76): Homolog of NCBI NO: 30840665 NR Description: SAC1-like protein AtSAC1b [Arabidopsis thaliana]
  misc_feature (1)..(76): Homolog of NCBI NO: 30693470 NR Description: expressed protein [Arabidopsis thaliana]
MAPPTKAGFVESYASARLAFALVSGAFMFMMMSLRHARHDARHLLLSLLWAGLCIGITHFVRSNGRVFTNRPRAHKSSHP

SEQ ID NO: 61828 - DNA, 818 bp, Triticum aestivum
  misc_feature (1)..(818): Ceres Seq. ID no. 15173284
actccgccacacgagtgagcagcatacgcgcgacagacgatcccgaacccagagagggggaacacggagccggccgcggagggggagcccagccaagccagccagagtgaacaaccgtcccaaccaccgacgggcgggcatgagggccaccgagatgttgaccgccgcggcgggggctgccgccgggacgacgccctccacggcctcggtggccggcctggccggggccagcgggggcgtccccgccgcgggcgccggcgggaacttccccctcggcgccgccctcctcgccttcgccttcgccaacctcgtcaacgtcctctccatctggttaaaggagaagaagtgggatgcaaggaagtttcttacatcttccggagttatttcatctctttctgcggccgtggcaagtttggctgtggcggttggccaacaagaaggcggagatagctctgtttttgcccttgcattggtttttgctgccgttgtaatgtatgatgcatcaggagttaggtttcacacaggccgccaagctgcgttgttaaatcaaatagtttctgatttatcaccggaacatccaattatctctaccttccggccgcttcgggaacctcttggacacagtccatttcaggtttttgccggagcccttgttggttgtacagtagcgtatttaatggggaattcttctgtatgagaaatactgtagttggcaatttgccttatactcagattacactacttttatacgaggaacattttttgtgcaaagtctactttgtatctctggccatataaagtgcccttctgttgaactg

SEQ ID NO: 61829 - protein, 231 aa, Triticum aestivum
  peptide (1)..(231): Ceres Seq. ID no. 15173285
  misc_feature (88)..(229): Pfam Name: Divergent PAP2 family Pfam Description: Divergent PAP2 family
  misc_feature (88)..(212): Homolog of NCBI NO: 26449729 NR Description: unknown protein [Arabidopsis thaliana]
  misc_feature (88)..(212): Homolog of NCBI NO: 9743358 NR Description: F21J9.1 [Arabidopsis thaliana]
  misc_feature (88)..(212): Homolog of NCBI NO: 12324675 NR Description: unknown protein [Arabidopsis thaliana]
  misc_feature (82)..(227): Homolog of NCBI NO: 29150195 NR Description: putative protein [Oryza sativa (indica
  misc_feature (88)..(223): Homolog of NCBI NO: 21555270 NR Description: unknown [Arabidopsis thaliana]
  misc_feature (88)..(223): Homolog of NCBI NO: 18395459 NR Description: expressed protein [Arabidopsis thaliana]
  misc_feature (88)..(223): Homolog of NCBI NO: 15220480 NR Description: F12A21.27 [Arabidopsis thaliana]
  misc_feature (82)..(226): Homolog of NCBI NO: 38344227 NR Description: OJ991113_30.3 [Oryza sativa (japonica
  misc_feature (66)..(213): Homolog of NCBI NO: 11994397 NR Description: gb|AAB61516.1~gene_id:MIL23.18~similar to unknown
  misc_feature (66)..(230): Homolog of NCBI NO: 30686309 NR Description: expressed protein [Arabidopsis thaliana]
LRHTSEQHTRDRRSRTQRGGTRSRPRRGSPAKPARVNNRPNHRRAGMRATEMLTAAAGAAAGTTPSTASVAGLAGASGGVPAAGAGGNFPLGAALLAFAFANLVNVLSIWLKEKKWDARKFLTSSGVISSLSAAVASLAVAVGQQEGGDSSVFALALVFAAVVMYDASGVRFHTGRQAALLNQIVSDLSPEHPIISTFRPLREPLGHSPFQVFAGALVGCTVAYLMGNSSV

SEQ ID NO: 61830 - protein, 185 aa, Triticum aestivum
  peptide (1)..(185): Ceres Seq. ID no. 15173286
  misc_feature (42)..(183): Pfam Name: Divergent PAP2 family Pfam Description: Divergent PAP2 family
  misc_feature (42)..(166): Homolog of NCBI NO: 26449729 NR Description: unknown protein [Arabidopsis thaliana]
  misc_feature (42)..(166): Homolog of NCBI NO: 9743358 NR Description: F21J9.1 [Arabidopsis thaliana]
  misc_feature (42)..(166): Homolog of NCBI NO: 12324675 NR Description: unknown protein [Arabidopsis thaliana]
  misc_feature (36)..(181): Homolog of NCBI NO: 29150195 NR Description: putative protein [Oryza sativa (indica
  misc_feature (42)..(177): Homolog of NCBI NO: 21555270 NR Description: unknown [Arabidopsis thaliana]
  misc_feature (42)..(177): Homolog of NCBI NO: 18395459 NR Description: expressed protein [Arabidopsis thaliana]
  misc_feature (42)..(177): Homolog of NCBI NO: 15220480 NR Description: F12A21.27 [Arabidopsis thaliana]
  misc_feature (36)..(180): Homolog of NCBI NO: 38344227 NR Description: OJ991113_30.3 [Oryza sativa (japonica
  misc_feature (20)..(167): Homolog of NCBI NO: 11994397 NR Description: gb|AAB61516.1~gene_id:MIL23.18~similar to unknown
  misc_feature (20)..(184): Homolog of NCBI NO: 30686309 NR Description: expressed protein [Arabidopsis thaliana]
MRATEMLTAAAGAAAGTTPSTASVAGLAGASGGVPAAGAGGNFPLGAALLAFAFANLVNVLSIWLKEKKWDARKFLTSSGVISSLSAAVASLAVAVGQQEGGDSSVFALALVFAAVVMYDASGVRFHTGRQAALLNQIVSDLSPEHPIISTFRPLREPLGHSPFQVFAGALVGCTVAYLMGNSSV

SEQ ID NO: 61831 - protein, 180 aa, Triticum aestivum
  peptide (1)..(180): Ceres Seq. ID no. 15173287
  misc_feature (37)..(178): Pfam Name: Divergent PAP2 family Pfam Description: Divergent PAP2 family
  misc_feature (37)..(161): Homolog of NCBI NO: 26449729 NR Description: unknown protein [Arabidopsis thaliana]
  misc_feature (37)..(161): Homolog of NCBI NO: 9743358 NR Description: F21J9.1 [Arabidopsis thaliana]
  misc_feature (37)..(161): Homolog of NCBI NO: 12324675 NR Description: unknown protein [Arabidopsis thaliana]
  misc_feature (31)..(176): Homolog of NCBI NO: 29150195 NR Description: putative protein [Oryza sativa (indica
  misc_feature (37)..(172): Homolog of NCBI NO: 21555270 NR Description: unknown [Arabidopsis thaliana]
  misc_feature (37)..(172): Homolog of NCBI NO: 18395459 NR Description: expressed protein [Arabidopsis thaliana]
  misc_feature (37)..(172): Homolog of NCBI NO: 15220480 NR Description: F12A21.27 [Arabidopsis thaliana]
  misc_feature (31)..(175): Homolog of NCBI NO: 38344227 NR Description: OJ991113_30.3 [Oryza sativa (japonica
  misc_feature (15)..(162): Homolog of NCBI NO: 11994397 NR Description: gb|AAB61516.1~gene_id:MIL23.18~similar to unknown
  misc_feature (15)..(179): Homolog of NCBI NO: 30686309 NR Description: expressed protein [Arabidopsis thaliana]
MLTAAAGAAAGTTPSTASVAGLAGASGGVPAAGAGGNFPLGAALLAFAFANLVNVLSIWLKEKKWDARKFLTSSGVISSLSAAVASLAVAVGQQEGGDSSVFALALVFAAVVMYDASGVRFHTGRQAALLNQIVSDLSPEHPIISTFRPLREPLGHSPFQVFAGALVGCTVAYLMGNSSV

SEQ ID NO: 61832 - DNA, 733 bp, Triticum aestivum
  misc_feature (1)..(733): Ceres Seq. ID no. 15173921
caggtgtcaactgtaagataggagtggatataaatacaacatcagctgattcagagaaaactatgccctttttcatgtcaaaaggctggagagagaccctgtgtaaatgtggaacatgcaccaacttctatgcacaacgaggcattgcacatcttactgataaggaggactctattgaggaatatgagaagatagctaagcagaaaagggagaagaagttggagcagcaggaaggagctgaagctaacttcatcaattcacttaaccatgtccagaagatagagattctgagtggcatcaatgacatgaaaaatgagtttcaatcctttatggaatcctttgatccatcaaaaccagttacatctgatgatgtaaaatctattttcgagaatcttgctaggaagaagcagaggttatcctgagcttcagttgcttcaggccttgcttgagcgggtgagcctaatgccctgctgcttctacgccaaaatttccaactgttatctggccaccactgtcttggtgggtactgttaacttatgctgtggccaccatggcgtgtttatctactgtactgtaatgctagcttcgtcgtagttctgctagatgtttcaaagtcagctcgtgatagtgatccgagcgaccagtggagtgaacagcatgtttgttcctttggatcaaaactttgtggtgattcccattacccaaaaatgtgttctccattgcgctgcccttg

SEQ ID NO: 61833 - protein, 139 aa, Triticum aestivum
  peptide (1)..(139): Ceres Seq. ID no. 15173922
  misc_feature (29)..(137): Homolog of NCBI NO: 29789154 NR Description: RIKEN cDNA 5730410I19 [Mus musculus]
  misc_feature (24)..(131): Homolog of NCBI NO: 19921458 NR Description: CG15141-PA [Drosophila melanogaster]
  misc_feature (29)..(137): Homolog of NCBI NO: 37590093 NR Description: Unknown (protein for IMAGE:6812098) [Mus musculus]
  misc_feature (29)..(137): Homolog of NCBI NO: 30388577 NR Description: 5730410I19Rik protein [Mus musculus]
  misc_feature (6)..(139): Homolog of NCBI NO: 31202469 NR Description: ENSANGP00000011180 [Anopheles gambiae]
  misc_feature (4)..(138): Homolog of NCBI NO: 28175400 NR Description: Similar to RIKEN cDNA 5730410I19 gene [Xenopus
  misc_feature (24)..(137): Homolog of NCBI NO: 27882071 NR Description: Unknown (protein for MGC:55404) [Danio rerio]
  misc_feature (4)..(110): Homolog of NCBI NO: 7487590 NR Description: hypothetical protein T32A16.30 - Arabidopsis
  misc_feature (4)..(138): Homolog of NCBI NO: 22328893 NR Description: expressed protein [Arabidopsis thaliana]
  misc_feature (4)..(138): Homolog of NCBI NO: 17064724 NR Description: putative protein [Arabidopsis thaliana]
GVNCKIGVDINTTSADSEKTMPFFMSKGWRETLCKCGTCTNFYAQRGIAHLTDKEDSIEEYEKIAKQKREKKLEQQEGAEANFINSLNHVQKIEILSGINDMKNEFQSFMESFDPSKPVTSDDVKSIFENLARKKQRLS

SEQ ID NO: 61834 - protein, 119 aa, Triticum aestivum
  peptide (1)..(119): Ceres Seq. ID no. 15173923
  misc_feature (9)..(117): Homolog of NCBI NO: 29789154 NR Description: RIKEN cDNA 5730410I19 [Mus musculus]
  misc_feature (4)..(111): Homolog of NCBI NO: 19921458 NR Description: CG15141-PA [Drosophila melanogaster]
  misc_feature (9)..(117): Homolog of NCBI NO: 37590093 NR Description: Unknown (protein for IMAGE:6812098) [Mus musculus]
  misc_feature (9)..(117): Homolog of NCBI NO: 30388577 NR Description: 5730410I19Rik protein [Mus musculus]
  misc_feature (1)..(119): Homolog of NCBI NO: 31202469 NR Description: ENSANGP00000011180 [Anopheles gambiae]
  misc_feature (1)..(118): Homolog of NCBI NO: 28175400 NR Description: Similar to RIKEN cDNA 5730410I19 gene [Xenopus
  misc_feature (4)..(117): Homolog of NCBI NO: 27882071 NR Description: Unknown (protein for MGC:55404) [Danio rerio]
  misc_feature (1)..(90): Homolog of NCBI NO: 7487590 NR Description: hypothetical protein T32A16.30 - Arabidopsis
  misc_feature (1)..(118): Homolog of NCBI NO: 22328893 NR Description: expressed protein [Arabidopsis thaliana]
  misc_feature (1)..(118): Homolog of NCBI NO: 17064724 NR Description: putative protein [Arabidopsis thaliana]
MPFFMSKGWRETLCKCGTCTNFYAQRGIAHLTDKEDSIEEYEKIAKQKREKKLEQQEGAEANFINSLNHVQKIEILSGINDMKNEFQSFMESFDPSKPVTSDDVKSIFENLARKKQRLS

SEQ ID NO: 61835 - protein, 115 aa, Triticum aestivum
  peptide (1)..(115): Ceres Seq. ID no. 15173924
  misc_feature (5)..(113): Homolog of NCBI NO: 29789154 NR Description: RIKEN cDNA 5730410I19 [Mus musculus]
  misc_feature (1)..(107): Homolog of NCBI NO: 19921458 NR Description: CG15141-PA [Drosophila melanogaster]
  misc_feature (5)..(113): Homolog of NCBI NO: 37590093 NR Description: Unknown (protein for IMAGE:6812098) [Mus musculus]
  misc_feature (5)..(113): Homolog of NCBI NO: 30388577 NR Description: 5730410I19Rik protein [Mus musculus]
  misc_feature (1)..(115): Homolog of NCBI NO: 31202469 NR Description: ENSANGP00000011180 [Anopheles gambiae]
  misc_feature (1)..(114): Homolog of NCBI NO: 28175400 NR Description: Similar to RIKEN cDNA 5730410I19 gene [Xenopus
  misc_feature (1)..(113): Homolog of NCBI NO: 27882071 NR Description: Unknown (protein for MGC:55404) [Danio rerio]
  misc_feature (1)..(86): Homolog of NCBI NO: 7487590 NR Description: hypothetical protein T32A16.30 - Arabidopsis
  misc_feature (1)..(114): Homolog of NCBI NO: 22328893 NR Description: expressed protein [Arabidopsis thaliana]
  misc_feature (1)..(114): Homolog of NCBI NO: 17064724 NR Description: putative protein [Arabidopsis thaliana]
MSKGWRETLCKCGTCTNFYAQRGIAHLTDKEDSIEEYEKIAKQKREKKLEQQEGAEANFINSLNHVQKIEILSGINDMKNEFQSFMESFDPSKPVTSDDVKSIFENLARKKQRLS

SEQ ID NO: 61836 - DNA, 969 bp, Triticum aestivum
  misc_feature (1)..(969): Ceres Seq. ID no. 15173146
tcgcaggaaatactcttccgtcccccatctttgaaccttcctcctcctccgcgctgacctacccctcaccctcccctcccctcccctccccggcaacaaaccaggcccctcctacatagaggcaatccgttccggcctctcagcccgcagcagcaccccggccggagctcccgcgacgccgagccggacggacgggaggagccaccgccccgcagcacgcgcgcgctggtagggcgagggaggggaggggatcgatggcgaagctgtacgtgcaggcggtgcccccgccggatctgaacaagaacaccgagtggttcatgtacccgggggtctggaccacctacatcttcatcctcttcgtctcctggctcctcatcctctccatcttcggctgcacccccggcatggcctggacgctcgtcaacctcggccacttcgcgattacataccacttcttccactggaagaagggaactccatttgctgatgaccaggggatgtataatagattgacttggtgggagcaaatggacaacggcaagcagcttactcgcaacagaaaatttcttgttgtggttcctgtagtcctgtacttgatcgcttcgcacaccacagactatcaacatcctatgctctttttgaacaccattgcagtcacagtactggttgttgcgaaactaccgaacatgcacaaggtccggatttttggaatcaatgcgggtaactaagcggcagcgtcccagggtagacagcactcaatatcatgtttcatttgaatggctggatggtgttgcacctagttctgaattcgctcctcagagtaccagtgtgtagtgtttgagagctgttagtagatgacatgtgatcattgtacagagaaacgctaaaaggcctggaaaatgatgctgttttgcaactttgcccgacacacgttctgtagactctttatgctgctatatgttttgttgc

SEQ ID NO: 61837 - protein, 157 aa, Triticum aestivum
  peptide (1)..(157): Ceres Seq. ID no. 15173147
  misc_feature (14)..(154): Pfam Name: ORMDL family Pfam Description: ORMDL family
  misc_feature (15)..(150): Homolog of NCBI NO: 6321475 NR Description: Product of gene unknown; Orm1p [Saccharomyces
  misc_feature (12)..(146): Homolog of NCBI NO: 40745942 NR Description: hypothetical protein AN1933.2 [Aspergillus
  misc_feature (15)..(150): Homolog of NCBI NO: 6323382 NR Description: Homologous to ORM1.; Orm2p [Saccharomyces
  misc_feature (5)..(147): Homolog of NCBI NO: 34901370 NR Description: OSJNBb0062P14.15 [Oryza sativa (japonica
  misc_feature (1)..(147): Homolog of NCBI NO: 25513580 NR Description: F6F3.4 protein - Arabidopsis thaliana
  misc_feature (4)..(154): Homolog of NCBI NO: 15238262 NR Description: expressed protein [Arabidopsis thaliana]
  misc_feature (5)..(155): Homolog of NCBI NO: 34394897 NR Description: putative ORMDL2 [Oryza sativa (japonica
  misc_feature (1)..(154): Homolog of NCBI NO: 18378814 NR Description: expressed protein [Arabidopsis thaliana]
  misc_feature (1)..(157): Homolog of NCBI NO: 38344271 NR Description: OSJNBa0005N02.9 [Oryza sativa (japonica
MAKLYVQAVPPPDLNKNTEWFMYPGVWTTYIFILFVSWLLILSIFGCTPGMAWTLVNLGHFAITYHFFHWKKGTPFADDQGMYNRLTWWEQMDNGKQLTRNRKFLVVVPVVLYLIASHTTDYQHPMLFLNTIAVTVLVVAKLPNMHKVRIFGINAGN

SEQ ID NO: 61838 - protein, 136 aa, Triticum aestivum
  peptide (1)..(136): Ceres Seq. ID no. 15173148
  misc_feature (1)..(133): Pfam Name: ORMDL family Pfam Description: ORMDL family
  misc_feature (1)..(129): Homolog of NCBI NO: 6321475 NR Description: Product of gene unknown; Orm1p [Saccharomyces
  misc_feature (1)..(125): Homolog of NCBI NO: 40745942 NR Description: hypothetical protein AN1933.2 [Aspergillus
  misc_feature (1)..(129): Homolog of NCBI NO: 6323382 NR Description: Homologous to ORM1.; Orm2p [Saccharomyces
  misc_feature (1)..(126): Homolog of NCBI NO: 34901370 NR Description: OSJNBb0062P14.15 [Oryza sativa (japonica
  misc_feature (1)..(126): Homolog of NCBI NO: 25513580 NR Description: F6F3.4 protein - Arabidopsis thaliana
  misc_feature (1)..(133): Homolog of NCBI NO: 15238262 NR Description: expressed protein [Arabidopsis thaliana]
  misc_feature (1)..(134): Homolog of NCBI NO: 34394897 NR Description: putative ORMDL2 [Oryza sativa (japonica
  misc_feature (1)..(133): Homolog of NCBI NO: 18378814 NR Description: expressed protein [Arabidopsis thaliana]
  misc_feature (1)..(136): Homolog of NCBI NO: 38344271 NR Description: OSJNBa0005N02.9 [Oryza sativa (japonica
MYPGVWTTYIFILFVSWLLILSIFGCTPGMAWTLVNLGHFAITYHFFHWKKGTPFADDQGMYNRLTWWEQMDNGKQLTRNRKFLVVVPVVLYLIASHTTDYQHPMLFLNTIAVTVLVVAKLPNMHKVRIFGINAGN

SEQ ID NO: 61839 - protein, 107 aa, Triticum aestivum
  peptide (1)..(107): Ceres Seq. ID no. 15173149
  misc_feature (1)..(104): Pfam Name: ORMDL family Pfam Description: ORMDL family
  misc_feature (1)..(100): Homolog of NCBI NO: 6321475 NR Description: Product of gene unknown; Orm1p [Saccharomyces
  misc_feature (1)..(96): Homolog of NCBI NO: 40745942 NR Description: hypothetical protein AN1933.2 [Aspergillus
  misc_feature (1)..(100): Homolog of NCBI NO: 6323382 NR Description: Homologous to ORM1.; Orm2p [Saccharomyces
  misc_feature (1)..(97): Homolog of NCBI NO: 34901370 NR Description: OSJNBb0062P14.15 [Oryza sativa (japonica
  misc_feature (1)..(97): Homolog of NCBI NO: 25513580 NR Description: F6F3.4 protein - Arabidopsis thaliana
  misc_feature (1)..(104): Homolog of NCBI NO: 15238262 NR Description: expressed protein [Arabidopsis thaliana]
  misc_feature (1)..(105): Homolog of NCBI NO: 34394897 NR Description: putative ORMDL2 [Oryza sativa (japonica
  misc_feature (1)..(104): Homolog of NCBI NO: 18378814 NR Description: expressed protein [Arabidopsis thaliana]
  misc_feature (1)..(107): Homolog of NCBI NO: 38344271 NR Description: OSJNBa0005N02.9 [Oryza sativa (japonica
MAWTLVNLGHFAITYHFFHWKKGTPFADDQGMYNRLTWWEQMDNGKQLTRNRKFLVVVPVVLYLIASHTTDYQHPMLFLNTIAVTVLVVAKLPNMHKVRIFGINAGN

SEQ ID NO: 61840 - DNA, 975 bp, Triticum aestivum
  misc_feature (1)..(975): Ceres Seq. ID no. 15173365
ctcaggtagcgagtcagtgacgcacgctctccgtgccacaccacgaccgcaccgttctacccgcttagctacccaagagaccggcgtccggcaatggagtcgcgggtgaagcccgggttcagcggcgcgggcagcctgtccggcagccggaggagctacatgggggcggcggcgcctagcaagccggcggtggacgggtgcggcgtggcactgcgcgtgttcatcctggcggcgacgctggtcgccgccgtggtgatgggcctggaccggcagacggccaccgtgcaggtcaccatcgccgacacgctgccgccgctgcaggtccccgtcacggccaagtggtcctactcctccgccttcgtgtacttcgtggtggcgaacgcgatggcgtgcgtcttctcggcggtggcgctggcggcgtgccgcagccggagcgcggtggtgccgctgatggtcggcgacctggtggtgcaggcgctcctgttctcggcggtgggcgcgtcggcggagttcggcatcctgggcgagcgcggcaactcccacgtgcgctggggcaaggtgtgccacgtctacagcagcttttgcgagcgcgccatggccgccgtcatcgtctccctcatcgccgccttcgccaacctcgtgcacctcatgttcgccatcctagacgtccacaaaaactcctcctactactagtaactagctcagccgctgctgatccatcgtgcacgcatcggagatgcccgatcgatgcatgcagatggtatacctgatttccgtgtgaactaacggtctcggctttagacgcgttggtttgatttaacggcttattgttgtgtcgatgcattttggcactgtaatgttagctattgatacaaatgtatggaggattttacttgttatgtactaatatcgacgtattggtcatcttttcagctgatttggcatgaactaatatggatggattggtaacttttg

SEQ ID NO: 61841 - protein, 199 aa, Triticum aestivum
  peptide (1)..(199): Ceres Seq. ID no. 15173366
  misc_feature (31)..(180): Pfam Name: Domain of unknown function (DUF588) Pfam Description: Domain of unknown function (DUF588)
  misc_feature (40)..(198): Homolog of NCBI NO: 38637029 NR Description: hypothetical protein [Oryza sativa (japonica
  misc_feature (38)..(189): Homolog of NCBI NO: 15237068 NR Description: expressed integral membrane protein common family
  misc_feature (16)..(187): Homolog of NCBI NO: 34394242 NR Description: integral membrane protein-like
  misc_feature (23)..(189): Homolog of NCBI NO: 21553953 NR Description: unknown [Arabidopsis thaliana]
  misc_feature (8)..(194): Homolog of NCBI NO: 18414489 NR Description: expressed integral membrane protein common family
  misc_feature (35)..(194): Homolog of NCBI NO: 15234654 NR Description: expressed protein [Arabidopsis thaliana]
  misc_feature (35)..(194): Homolog of NCBI NO: 18414493 NR Description: expressed integral membrane protein common family
  misc_feature (35)..(194): Homolog of NCBI NO: 21617994 NR Description: unknown [Arabidopsis thaliana]
  misc_feature (1)..(199): Homolog of NCBI NO: 34915110 NR Description: P0503E05.4 [Oryza sativa (japonica
MESRVKPGFSGAGSLSGSRRSYMGAAAPSKPAVDGCGVALRVFILAATLVAAVVMGLDRQTATVQVTIADTLPPLQVPVTAKWSYSSAFVYFVVANAMACVFSAVALAACRSRSAVVPLMVGDLVVQALLFSAVGASAEFGILGERGNSHVRWGKVCHVYSSFCERAMAAVIVSLIAAFANLVHLMFAILDVHKNSSYY

SEQ ID NO: 61842 - protein, 177 aa, Triticum aestivum
  peptide (1)..(177): Ceres Seq. ID no. 15173367
  misc_feature (9)..(158): Pfam Name: Domain of unknown function (DUF588) Pfam Description: Domain of unknown function (DUF588)
  misc_feature (18)..(176): Homolog of NCBI NO: 38637029 NR Description: hypothetical protein [Oryza sativa (japonica
  misc_feature (16)..(167): Homolog of NCBI NO: 15237068 NR Description: expressed integral membrane protein common family
  misc_feature (1)..(165): Homolog of NCBI NO: 34394242 NR Description: integral membrane protein-like
  misc_feature (1)..(167): Homolog of NCBI NO: 21553953 NR Description: unknown [Arabidopsis thaliana]
  misc_feature (1)..(172): Homolog of NCBI NO: 18414489 NR Description: expressed integral membrane protein common family
  misc_feature (13)..(172): Homolog of NCBI NO: 15234654 NR Description: expressed protein [Arabidopsis thaliana]
  misc_feature (13)..(172): Homolog of NCBI NO: 18414493 NR Description: expressed integral membrane protein common family
  misc_feature (13)..(172): Homolog of NCBI NO: 21617994 NR Description: unknown [Arabidopsis thaliana]
  misc_feature (1)..(177): Homolog of NCBI NO: 34915110 NR Description: P0503E05.4 [Oryza sativa (japonica
MGAAAPSKPAVDGCGVALRVFILAATLVAAVVMGLDRQTATVQVTIADTLPPLQVPVTAKWSYSSAFVYFVVANAMACVFSAVALAACRSRSAVVPLMVGDLVVQALLFSAVGASAEFGILGERGNSHVRWGKVCHVYSSFCERAMAAVIVSLIAAFANLVHLMFAILDVHKNSSYY

SEQ ID NO: 61843 - protein, 145 aa, Triticum aestivum
  peptide (1)..(145): Ceres Seq. ID no. 15173368
  misc_feature (1)..(126): Pfam Name: Domain of unknown function (DUF588) Pfam Description: Domain of unknown function (DUF588)
  misc_feature (1)..(144): Homolog of NCBI NO: 38637029 NR Description: hypothetical protein [Oryza sativa (japonica
  misc_feature (1)..(135): Homolog of NCBI NO: 15237068 NR Description: expressed integral membrane protein common family
  misc_feature (1)..(133): Homolog of NCBI NO: 34394242 NR Description: integral membrane protein-like
  misc_feature (1)..(135): Homolog of NCBI NO: 21553953 NR Description: unknown [Arabidopsis thaliana]
  misc_feature (1)..(140): Homolog of NCBI NO: 18414489 NR Description: expressed integral membrane protein common family
  misc_feature (1)..(140): Homolog of NCBI NO: 15234654 NR Description: expressed protein [Arabidopsis thaliana]
  misc_feature (1)..(140): Homolog of NCBI NO: 18414493 NR Description: expressed integral membrane protein common family
  misc_feature (1)..(140): Homolog of NCBI NO: 21617994 NR Description: unknown [Arabidopsis thaliana]
  misc_feature (1)..(145): Homolog of NCBI NO: 34915110 NR Description: P0503E05.4 [Oryza sativa (japonica
MGLDRQTATVQVTIADTLPPLQVPVTAKWSYSSAFVYFVVANAMACVFSAVALAACRSRSAVVPLMVGDLVVQALLFSAVGASAEFGILGERGNSHVRWGKVCHVYSSFCERAMAAVIVSLIAAFANLVHLMFAILDVHKNSSYY

SEQ ID NO: 61844 - DNA, 728 bp, Triticum aestivum
  misc_feature (1)..(728): Ceres Seq. ID no. 15173355
aagaaagcattgtaagatggttgtgaccaatgctttgtttggacaaaagctggtgaatgctagacgactaggatttgtgtttcggcgaaagcagatattgaaaggagctgcccaggaggagcacgattgtattccggatgaacactatgtgcagacattattttctatcaaaggactggaagatgaacttgaaaggagaactttgacctatacatcatggaaccagtcaactttagatcctaaagataaaatgacttggcatccaacgacatttgaatatgacgcagcaagttctgagcagatcaatgctataaagagtatcgatcatgtgaactatgaggtggaacacaggactgagtggtgccaatccaacggcacatccgtcccatgtttcttatttgccagaaagttctcatatggcgccgcgatgcatctgttggaggatggcgcttttggtctgctaaaatctgctcaactactggttaacttttaacaaattctcttgtatacgagcaatcatttttcgtgtgggtggatcaattcatagccaggtccagcttcgttgtttgcagtagcatttgcagctgaagctactcagcgatggagtatcatagtttactgctaggatttagattgtgtatagatcatcggatcggagcagagtaggttattattgtacagagcatcattgaagtacgggaatagcatcaggatgcaatctccaactt

SEQ ID NO: 61845 - protein, 163 aa, Triticum aestivum
  peptide (1)..(163): Ceres Seq. ID no. 15173356
  misc_feature (1)..(111): Homolog of NCBI NO: 30684956 NR Description: expressed protein [Arabidopsis thaliana]
  misc_feature (53)..(152): Homolog of NCBI NO: 25402693 NR Description: hypothetical protein [imported] - Arabidopsis
  misc_feature (1)..(148): Homolog of NCBI NO: 15241437 NR Description: expressed protein [Arabidopsis thaliana]
  misc_feature (38)..(152): Homolog of NCBI NO: 30682534 NR Description: expressed protein [Arabidopsis thaliana]
  misc_feature (1)..(105): Homolog of NCBI NO: 34911442 NR Description: P0431H09.21 [Oryza sativa (japonica
RKHCKMVVTNALFGQKLVNARRLGFVFRRKQILKGAAQEEHDCIPDEHYVQTLFSIKGLEDELERRTLTYTSWNQSTLDPKDKMTWHPTTFEYDAASSEQINAIKSIDHVNYEVEHRTEWCQSNGTSVPCFLFARKFSYGAAMHLLEDGAFGLLKSAQLLVNF

SEQ ID NO: 61846 - protein, 158 aa, Triticum aestivum
  peptide (1)..(158): Ceres Seq. ID no. 15173357
  misc_feature (1)..(106): Homolog of NCBI NO: 30684956 NR Description: expressed protein [Arabidopsis thaliana]
  misc_feature (48)..(147): Homolog of NCBI NO: 25402693 NR Description: hypothetical protein [imported] - Arabidopsis
  misc_feature (1)..(143): Homolog of NCBI NO: 15241437 NR Description: expressed protein [Arabidopsis thaliana]
  misc_feature (33)..(147): Homolog of NCBI NO: 30682534 NR Description: expressed protein [Arabidopsis thaliana]
  misc_feature (1)..(100): Homolog of NCBI NO: 34911442 NR Description: P0431H09.21 [Oryza sativa (japonica
MVVTNALFGQKLVNARRLGFVFRRKQILKGAAQEEHDCIPDEHYVQTLFSIKGLEDELERRTLTYTSWNQSTLDPKDKMTWHPTTFEYDAASSEQINAIKSIDHVNYEVEHRTEWCQSNGTSVPCFLFARKFSYGAAMHLLEDGAFGLLKSAQLLVNF

SEQ ID NO: 61847 - DNA, 690 bp, Triticum aestivum
  misc_feature (1)..(690): Ceres Seq. ID no. 15173156
ccccacggcagcctctcctcctcctctcctccctcgccgtcgccgtcgccttcgtctccgcctccaaccggcggccgcgccaccagctcgtctcctccgatggcgactgtgccagttaaccccaagccgttcttgcaaaacctaacagggaagatggtcatcgtcaagctgaaatggggcatggagtacaaaggatatcttgtttcagtggactcctacatgaatctgcagctaagtggtactgaggaatacattgatgggcaatgctctggaaatttgggagacatactgataagatgcaacaatgtgatgtatctccgaggtgttccagaggaggacacggacattccagatgcggcctgaagagcacatggactgttcctggttgatgcttgctgttcactgctgaaaaagaacttcctagttcgtctccatttgcgcctactggactgtattacgtacaggcgttgaactcatgttaactctagttctgcatcctggatgaatgaatgattaacttgcatgtttgaaacggatgattgcttattgctgattggtcctgatcctgccgttggatatgtatggtttgctgtctgaattgcaatgatcgtatttgtgcaatttgaaccatatttgctgagttcctgagcatggactcaacatacccagcatgaagggatatttccgcac

SEQ ID NO: 61848 - protein, 120 aa, Triticum aestivum
  peptide (1)..(120): Ceres Seq. ID no. 15173157
  misc_feature (43)..(108): Pfam Name: LSM domain Pfam Description: LSM domain
  misc_feature (35)..(108): Homolog of NCBI NO: 39589637 NR Description: Hypothetical protein CBG12250 [Caenorhabditis
  misc_feature (35)..(115): Homolog of NCBI NO: 22024001 NR Description: Developmental embryonic B CG16792-PA [Drosophila
  misc_feature (35)..(115): Homolog of NCBI NO: 495021 NR Description: membrane-associated protein
  misc_feature (34)..(115): Homolog of NCBI NO: 31212897 NR Description: ENSANGP00000002801 [Anopheles gambiae]
  misc_feature (36)..(115): Homolog of NCBI NO: 33876795 NR Description: SNRPF protein [Homo sapiens]
  misc_feature (36)..(115): Homolog of NCBI NO: 34864945 NR Description: similar to Small nuclear ribonucleoprotein F
  misc_feature (36)..(115): Homolog of NCBI NO: 4507131 NR Description: small nuclear ribonucleoprotein polypeptide F
  misc_feature (36)..(115): Homolog of NCBI NO: 39645845 NR Description: Unknown (protein for IMAGE:5176590) [Homo sapiens]
  misc_feature (3)..(115): Homolog of NCBI NO: 38079111 NR Description: similar to SNRPF protein [Mus musculus]
  misc_feature (34)..(119): Homolog of NCBI NO: 15234669 NR Description: snRNP Sm protein F - like [Arabidopsis thaliana]
PHGSLSSSSPPSPSPSPSSPPPTGGRATSSSPPMATVPVNPKPFLQNLTGKMVIVKLKWGMEYKGYLVSVDSYMNLQLSGTEEYIDGQCSGNLGDILIRCNNVMYLRGVPEEDTDIPDAA

SEQ ID NO: 61849 - protein, 87 aa, Triticum aestivum
  peptide (1)..(87): Ceres Seq. ID no. 15173158
  misc_feature (10)..(75): Pfam Name: LSM domain Pfam Description: LSM domain
  misc_feature (2)..(75): Homolog of NCBI NO: 39589637 NR Description: Hypothetical protein CBG12250 [Caenorhabditis
  misc_feature (2)..(82): Homolog of NCBI NO: 22024001 NR Description: Developmental embryonic B CG16792-PA [Drosophila
  misc_feature (2)..(82): Homolog of NCBI NO: 495021 NR Description: membrane-associated protein
  misc_feature (1)..(82): Homolog of NCBI NO: 31212897 NR Description: ENSANGP00000002801 [Anopheles gambiae]
  misc_feature (3)..(82): Homolog of NCBI NO: 33876795 NR Description: SNRPF protein [Homo sapiens]
  misc_feature (3)..(82): Homolog of NCBI NO: 34864945 NR Description: similar to Small nuclear ribonucleoprotein F
  misc_feature (3)..(82): Homolog of NCBI NO: 4507131 NR Description: small nuclear ribonucleoprotein polypeptide F
  misc_feature (3)..(82): Homolog of NCBI NO: 39645845 NR Description: Unknown (protein for IMAGE:5176590) [Homo sapiens]
  misc_feature (1)..(82): Homolog of NCBI NO: 38079111 NR Description: similar to SNRPF protein [Mus musculus]
  misc_feature (1)..(86): Homolog of NCBI NO: 15234669 NR Description: snRNP Sm protein F - like [Arabidopsis thaliana]
MATVPVNPKPFLQNLTGKMVIVKLKWGMEYKGYLVSVDSYMNLQLSGTEEYIDGQCSGNLGDILIRCNNVMYLRGVPEEDTDIPDAA

SEQ ID NO: 61850 - protein, 69 aa, Triticum aestivum
  peptide (1)..(69): Ceres Seq. ID no. 15173159
  misc_feature (1)..(57): Pfam Name: LSM domain Pfam Description: LSM domain
  misc_feature (1)..(57): Homolog of NCBI NO: 39589637 NR Description: Hypothetical protein CBG12250 [Caenorhabditis
  misc_feature (1)..(64): Homolog of NCBI NO: 22024001 NR Description: Developmental embryonic B CG16792-PA [Drosophila
  misc_feature (1)..(64): Homolog of NCBI NO: 495021 NR Description: membrane-associated protein
  misc_feature (1)..(64): Homolog of NCBI NO: 31212897 NR Description: ENSANGP00000002801 [Anopheles gambiae]
  misc_feature (1)..(64): Homolog of NCBI NO: 34864945 NR Description: similar to Small nuclear ribonucleoprotein F
  misc_feature (1)..(64): Homolog of NCBI NO: 33876795 NR Description: SNRPF protein [Homo sapiens]
  misc_feature (1)..(64): Homolog of NCBI NO: 4507131 NR Description: small nuclear ribonucleoprotein polypeptide F
  misc_feature (1)..(64): Homolog of NCBI NO: 39645845 NR Description: Unknown (protein for IMAGE:5176590) [Homo sapiens]
  misc_feature (1)..(64): Homolog of NCBI NO: 38079111 NR Description: similar to SNRPF protein [Mus musculus]
  misc_feature (1)..(68): Homolog of NCBI NO: 15234669 NR Description: snRNP Sm protein F - like [Arabidopsis thaliana]
MVIVKLKWGMEYKGYLVSVDSYMNLQLSGTEEYIDGQCSGNLGDILIRCNNVMYLRGVPEEDTDIPDAA

SEQ ID NO: 61851 - DNA, 748 bp, Triticum aestivum
  misc_feature (1)..(748): Ceres Seq. ID no. 15173531
aaatagcctcccagccctctctgcctcccgaaaaaacaaacaaacagagatcgcgcttccaatctagctctgcggctgtcgcgaggctccacatttccctccccgcagcgccgaagtaagcatgtgtcccggcggcaggtacgcgggccttgacctccccgccggcgccggcgcgggggacctgcggccggcgttcgacgtgctggacgcggaccacgacggccgcatcagccgcgacgacctcaagaccttctacgccaacgcgggcgccaccgacgagcgcttcgacgacgacgacatcgaggccatgatcaccgccgccgacgccgacctcgacggcttcgtgcagtaccacgagttcgagggcctccttggccgcgcagctaaggcgggggcggacagcggctgccgctcggcgatggaggacgccttccggctaatggaccgcgacggggacggcaaggtcgggttcgaggacctcaaggcctacctcgggtgggccgggatgccggtcgccgacgacgagatccgcgccatgataagtatggctggtgacggcgacagcggcgtggggctcgaggcgctcgccagaatactcgccgtggactttgatgccatcgtctgaagaatctaaaataatcctactgtaaagcactagacttgattttttgggactttttccccctaaaatttggttggtggggagagcaggctggcgtgagattgattgttgtgagtggttctcgtt

SEQ ID NO: 61852 - protein, 167 aa, Triticum aestivum
  peptide (1)..(167): Ceres Seq. ID no. 15173532
  misc_feature (20)..(46): Pfam Name: EF hand Pfam Description: EF hand
  misc_feature (22)..(167): Homolog of NCBI NO: 32413509 NR Description: hypothetical protein [Neurospora crassa]
  misc_feature (20)..(159): Homolog of NCBI NO: 7441481 NR Description: probable calmodulin - rice
  misc_feature (20)..(159): Homolog of NCBI NO: 4959162 NR Description: calmodulin mutant SYNCAM57A [synthetic construct]
  misc_feature (20)..(159): Homolog of NCBI NO: 4959626 NR Description: calmodulin mutant SYNCAM14 [synthetic construct]
  misc_feature (20)..(159): Homolog of NCBI NO: 1168797 NR Description: CALTRACTIN (CENTRIN)
  misc_feature (20)..(159): Homolog of NCBI NO: 4959637 NR Description: calmodulin mutant SYNCAM37 [synthetic construct]
  misc_feature (19)..(159): Homolog of NCBI NO: 34909152 NR Description: putative calmodulin [Oryza sativa (japonica
  misc_feature (1)..(156): Homolog of NCBI NO: 2352828 NR Description: NaCl-inducible Ca2+-binding protein [Arabidopsis
  misc_feature (1)..(158): Homolog of NCBI NO: 15239904 NR Description: sodium-inducible calcium-binding protein
  misc_feature (1)..(162): Homolog of NCBI NO: 5702231 NR Description: hypersensitive reaction associated Ca2+-binding
MCPGGRYAGLDLPAGAGAGDLRPAFDVLDADHDGRISRDDLKTFYANAGATDERFDDDDIEAMITAADADLDGFVQYHEFEGLLGRAAKAGADSGCRSAMEDAFRLMDRDGDGKVGFEDLKAYLGWAGMPVADDEIRAMISMAGDGDSGVGLEALARILAVDFDAIV

SEQ ID NO: 61853 - protein, 105 aa, Triticum aestivum
  peptide (1)..(105): Ceres Seq. ID no. 15173533
  misc_feature (1)..(105): Homolog of NCBI NO: 32413509 NR Description: hypothetical protein [Neurospora crassa]
  misc_feature (1)..(97): Homolog of NCBI NO: 7441481 NR Description: probable calmodulin - rice
  misc_feature (1)..(97): Homolog of NCBI NO: 4959626 NR Description: calmodulin mutant SYNCAM14 [synthetic construct]
  misc_feature (1)..(97): Homolog of NCBI NO: 4959162 NR Description: calmodulin mutant SYNCAM57A [synthetic construct]
  misc_feature (1)..(97): Homolog of NCBI NO: 1168797 NR Description: CALTRACTIN (CENTRIN)
  misc_feature (1)..(97): Homolog of NCBI NO: 4959637 NR Description: calmodulin mutant SYNCAM37 [synthetic construct]
  misc_feature (1)..(97): Homolog of NCBI NO: 34909152 NR Description: putative calmodulin [Oryza sativa (japonica
  misc_feature (1)..(94): Homolog of NCBI NO: 2352828 NR Description: NaCl-inducible Ca2+-binding protein [Arabidopsis
  misc_feature (1)..(96): Homolog of NCBI NO: 15239904 NR Description: sodium-inducible calcium-binding protein
  misc_feature (1)..(100): Homolog of NCBI NO: 5702231 NR Description: hypersensitive reaction associated Ca2+-binding
MITAADADLDGFVQYHEFEGLLGRAAKAGADSGCRSAMEDAFRLMDRDGDGKVGFEDLKAYLGWAGMPVADDEIRAMISMAGDGDSGVGLEALARILAVDFDAIV

SEQ ID NO: 61854 - DNA, 644 bp, Triticum aestivum
  misc_feature (1)..(644): Ceres Seq. ID no. 15173519
tactaacagtccaaaactcgtataacttgctgtgtcgcaattttgatgctggattggcagaatgctgccatcacgagagaatcagtttgctggcgtacagcccaatggcaatgggtatactttcagggaagtatcactcatctgatgacagcggaccgccagatgcaaggatgaatcttttcatggggagatactccgagggtgaatccagatacaatctgaagaaccccaaactggaatcggcagtgaaggaatatagaagaattggcgtcaagtatggcatttcgccatcaatcctagcagttgcatttgtactcagacacccccttgtgggttcagctgttttcggtgttactaaattatggcagctcgaggaggttcttcaggccacaggggtccatctctgtgaagaaatattggcggagatcaatgatgtacatgcaagatttcccaatccttgtccataataatgttccaaaatacgatatttttctttgtccattgcgatatccagatatgataaataggcggtagcaatttgtgcatgtcatccttgtgaatcttctttgtaccgttccaattttatcagttcatgtctgcgaagggacaatagagagtagcaattttgcaacgctgagttagtc

SEQ ID NO: 61855 - protein, 154 aa, Triticum aestivum
  peptide (1)..(154): Ceres Seq. ID no. 15173520
  misc_feature (1)..(154): Homolog of NCBI NO: 26988049 NR Description: oxidoreductase, aldo/keto reductase family
  misc_feature (2)..(154): Homolog of NCBI NO: 40062540 NR Description: oxidoreductase,aldo/keto reductase family
  misc_feature (1)..(154): Homolog of NCBI NO: 23102470 NR Description: hypothetical protein [Azotobacter vinelandii]
  misc_feature (1)..(154): Homolog of NCBI NO: 23124929 NR Description: hypothetical protein [Nostoc punctiforme]
  misc_feature (1)..(154): Homolog of NCBI NO: 32039650 NR Description: hypothetical protein [Pseudomonas aeruginosa
  misc_feature (1)..(154): Homolog of NCBI NO: 15599630 NR Description: probable oxidoreductase [Pseudomonas aeruginosa
  misc_feature (1)..(154): Homolog of NCBI NO: 28869684 NR Description: oxidoreductase, aldo/keto reductase family
  misc_feature (1)..(154): Homolog of NCBI NO: 23468633 NR Description: hypothetical protein [Pseudomonas syringae pv.
  misc_feature (2)..(154): Homolog of NCBI NO: 33596300 NR Description: probable oxidoreductase [Bordetella
  misc_feature (2)..(154): Homolog of NCBI NO: 33592130 NR Description: probable oxidoreductase [Bordetella pertussis]
LTVQNSYNLLCRNFDAGLAECCHHERISLLAYSPMAMGILSGKYHSSDDSGPPDARMNLFMGRYSEGESRYNLKNPKLESAVKEYRRIGVKYGISPSILAVAFVLRHPLVGSAVFGVTKLWQLEEVLQATGVHLCEEILAEINDVHARFPNPCP

SEQ ID NO: 61856 - protein, 120 aa, Triticum aestivum
  peptide (1)..(120): Ceres Seq. ID no. 15173521
  misc_feature (1)..(120): Homolog of NCBI NO: 26988049 NR Description: oxidoreductase, aldo/keto reductase family
  misc_feature (1)..(120): Homolog of NCBI NO: 40062540 NR Description: oxidoreductase,aldo/keto reductase family
  misc_feature (1)..(120): Homolog of NCBI NO: 23102470 NR Description: hypothetical protein [Azotobacter vinelandii]
  misc_feature (1)..(120): Homolog of NCBI NO: 23124929 NR Description: hypothetical protein [Nostoc punctiforme]
  misc_feature (1)..(120): Homolog of NCBI NO: 32039650 NR Description: hypothetical protein [Pseudomonas aeruginosa
  misc_feature (1)..(120): Homolog of NCBI NO: 15599630 NR Description: probable oxidoreductase [Pseudomonas aeruginosa
  misc_feature (1)..(120): Homolog of NCBI NO: 28869684 NR Description: oxidoreductase, aldo/keto reductase family
  misc_feature (1)..(120): Homolog of NCBI NO: 23468633 NR Description: hypothetical protein [Pseudomonas syringae pv.
  misc_feature (1)..(120): Homolog of NCBI NO: 33596300 NR Description: probable oxidoreductase [Bordetella
  misc_feature (1)..(120): Homolog of NCBI NO: 33592130 NR Description: probable oxidoreductase [Bordetella pertussis]
MAMGILSGKYHSSDDSGPPDARMNLFMGRYSEGESRYNLKNPKLESAVKEYRRIGVKYGISPSILAVAFVLRHPLVGSAVFGVTKLWQLEEVLQATGVHLCEEILAEINDVHARFPNPCP

SEQ ID NO: 61857 - protein, 118 aa, Triticum aestivum
  peptide (1)..(118): Ceres Seq. ID no. 15173522
  misc_feature (1)..(118): Homolog of NCBI NO: 26988049 NR Description: oxidoreductase, aldo/keto reductase family
  misc_feature (1)..(118): Homolog of NCBI NO: 40062540 NR Description: oxidoreductase,aldo/keto reductase family
  misc_feature (1)..(118): Homolog of NCBI NO: 23102470 NR Description: hypothetical protein [Azotobacter vinelandii]
  misc_feature (1)..(118): Homolog of NCBI NO: 23124929 NR Description: hypothetical protein [Nostoc punctiforme]
  misc_feature (1)..(118): Homolog of NCBI NO: 32039650 NR Description: hypothetical protein [Pseudomonas aeruginosa
  misc_feature (1)..(118): Homolog of NCBI NO: 15599630 NR Description: probable oxidoreductase [Pseudomonas aeruginosa
  misc_feature (1)..(118): Homolog of NCBI NO: 28869684 NR Description: oxidoreductase, aldo/keto reductase family
  misc_feature (1)..(118): Homolog of NCBI NO: 23468633 NR Description: hypothetical protein [Pseudomonas syringae pv.
  misc_feature (1)..(118): Homolog of NCBI NO: 33596300 NR Description: probable oxidoreductase [Bordetella
  misc_feature (1)..(118): Homolog of NCBI NO: 33592130 NR Description: probable oxidoreductase [Bordetella pertussis]
MGILSGKYHSSDDSGPPDARMNLFMGRYSEGESRYNLKNPKLESAVKEYRRIGVKYGISPSILAVAFVLRHPLVGSAVFGVTKLWQLEEVLQATGVHLCEEILAEINDVHARFPNPCP

SEQ ID NO: 61858 - DNA, 917 bp, Triticum aestivum
  misc_feature (1)..(917): Ceres Seq. ID no. 15174100
ctctctcctctctacactgtgttgcgtagcccggaccgacatgaccggcggcgtgaacggcaacggcggaggcggtgggggcggcggcggggcgtgcgcggtgtgcaagcaccagcggcgcaagtgcgagcccaactgcgagctggccgcctacttcccggccaacaggatgaacgacttccgcgcgctgcacctcgtcttcggggtggccaacctcaccaagctcatcaaggccaacgccaccgaggcggcgcgccgccgcgccgccgagacgctgacgtgggaggcgcggtggcgcgagcgcgacccctccgaggggtgctaccgcgaggtctcctgcctccgccgcgagaacgccgtgctgcgcgccgagaacgccgcgctcaggcgccgggccgaccagtgcgcgtgctgtgtcaccacgttgcagcagcagcagcagcagatattgctcgtctcggcttacaacaacggcgcccggccccccggcggcgtgctgcacggggccagcgccggagtcgtgcccggcggcttctacgccggcgcgccgaggcccggggcagctggtcaggcggagcccagggagaagagcagcgcgaggtgtgacgctcagcgcacagctagctagcagtgggctatgggagaagatgaaggcagaaattcaaccgtttcatatgaaattcatgtcctgagtaggaaaaagccctaagtgttggttttggaataaaaagtactccctccgtcccataatataatagtgtcaaaaacgttcttatattatgggacgaagggaatactagctttactcttttttttcttcttctgcttgagcaggacatctaaagttcaaagtgtaaaaactcagctttgtataactggtgattcatttaattagaagccangaagatgattcatac

SEQ ID NO: 61859 - protein, 208 aa, Triticum aestivum
  peptide (1)..(208): Ceres Seq. ID no. 15174101
  misc_feature (31)..(110): Pfam Name: Protein of unknown function DUF260 Pfam Description: Protein of unknown function DUF260
  misc_feature (23)..(183): Homolog of NCBI NO: 34907878 NR Description: P0031D02.27 [Oryza sativa (japonica
  misc_feature (31)..(161): Homolog of NCBI NO: 34914280 NR Description: B1151A10.6 [Oryza sativa (japonica
  misc_feature (31)..(150): Homolog of NCBI NO: 15231388 NR Description: lateral organ boundaries (LOB) domain family
  misc_feature (16)..(124): Homolog of NCBI NO: 37531318 NR Description: unknown protein [Oryza sativa (japonica
  misc_feature (16)..(128): Homolog of NCBI NO: 25354729 NR Description: hypothetical protein At2g45420 [imported] -
  misc_feature (16)..(129): Homolog of NCBI NO: 30690020 NR Description: lateral organ boundaries (LOB) domain protein 18
  misc_feature (26)..(149): Homolog of NCBI NO: 15219335 NR Description: lateral organ boundaries (LOB) domain protein -
  misc_feature (12)..(110): Homolog of NCBI NO: 29428013 NR Description: Putative LOB domain protein 2
  misc_feature (12)..(110): Homolog of NCBI NO: 15221448 NR Description: lateral organ boundaries (LOB) domain protein -
  misc_feature (16)..(171): Homolog of NCBI NO: 37572992 NR Description: putative lateral organ boundaries (LOB) domain
SLLSTLCCVARTDMTGGVNGNGGGGGGGGGACAVCKHQRRKCEPNCELAAYFPANRMNDFRALHLVFGVANLTKLIKANATEAARRRAAETLTWEARWRERDPSEGCYREVSCLRRENAVLRAENAALRRRADQCACCVTTLQQQQQQILLVSAYNNGARPPGGVLHGASAGVVPGGFYAGAPRPGAAGQAEPREKSSARCDAQRTAS

SEQ ID NO: 61860 - protein, 201 aa, Triticum aestivum
  peptide (1)..(201): Ceres Seq. ID no. 15174102
LSPLYTVLRSPDRHDRRRERQRRRRWGRRRGVRGVQAPAAQVRAQLRAGRLLPGQQDERLPRAAPRLRGGQPHQAHQGQRHRGGAPPRRRDADVGGAVARARPLRGVLPRGLLPPPRERRAARRERRAQAPGRPVRVLCHHVAAAAAADIARLGLQQRRPAPRRRAARGQRRSRARRLLRRRAEARGSWSGGAQGEEQREV

SEQ ID NO: 61861 - protein, 195 aa, Triticum aestivum
  peptide (1)..(195): Ceres Seq. ID no. 15174103
  misc_feature (18)..(97): Pfam Name: Protein of unknown function DUF260 Pfam Description: Protein of unknown function DUF260
  misc_feature (10)..(170): Homolog of NCBI NO: 34907878 NR Description: P0031D02.27 [Oryza sativa (japonica
  misc_feature (18)..(148): Homolog of NCBI NO: 34914280 NR Description: B1151A10.6 [Oryza sativa (japonica
  misc_feature (18)..(137): Homolog of NCBI NO: 15231388 NR Description: lateral organ boundaries (LOB) domain family
  misc_feature (3)..(111): Homolog of NCBI NO: 37531318 NR Description: unknown protein [Oryza sativa (japonica
  misc_feature (3)..(115): Homolog of NCBI NO: 25354729 NR Description: hypothetical protein At2g45420 [imported] -
  misc_feature (3)..(116): Homolog of NCBI NO: 30690020 NR Description: lateral organ boundaries (LOB) domain protein 18
  misc_feature (13)..(136): Homolog of NCBI NO: 15219335 NR Description: lateral organ boundaries (LOB) domain protein -
  misc_feature (1)..(97): Homolog of NCBI NO: 29428013 NR Description: Putative LOB domain protein 2
  misc_feature (1)..(97): Homolog of NCBI NO: 15221448 NR Description: lateral organ boundaries (LOB) domain protein -
  misc_feature (3)..(158): Homolog of NCBI NO: 37572992 NR Description: putative lateral organ boundaries (LOB) domain
MTGGVNGNGGGGGGGGGACAVCKHQRRKCEPNCELAAYFPANRMNDFRALHLVFGVANLTKLIKANATEAARRRAAETLTWEARWRERDPSEGCYREVSCLRRENAVLRAENAALRRRADQCACCVTTLQQQQQQILLVSAYNNGARPPGGVLHGASAGVVPGGFYAGAPRPGAAGQAEPREKSSARCDAQRTAS

SEQ ID NO: 61862 - DNA, 966 bp, Triticum aestivum
  misc_feature (1)..(966): Ceres Seq. ID no. 15174225
actcgaccctgcctccagtccatagccatacaccaccaccttcctcccaagtcccaagcgaacaaacactcgatcgcttcgatggcgactctgcggcggtgctccgggctgttgctcgcggcggtggcgctggcgctggcggcggggatggcggcggcgcaggggccggccggcgcgccggcgccggcggccgggatcagctcggagtgcatgaccgcggtgctcaacatgtccgactgcctgccgtacgtggagagcgggagcaagacgcggcacccggacaaggcctgctgcccggagctggacggcctgctgcagtccaaccccgtctgcctctgccagctgctcgccggcggcgccgactcctacggaatcagcgtcgactacaagcgcgccatggcgctgcccggcgtctgccgcctcaacgcgccgcccctcagcgcctgcgcagcttttggagtccccgtggggccttcttcggcgccattaacaggagtgccctctccatccgctacaggaccactgatgcctgagaacccgccatccgcaacgccgtccaagtcgaagtcccacgccccgggccgcctcaacggccgcggcctcgtcgccctcgccgcgctgccgctggcgatcacggccgccgccatgttctagggcagcaagagttcgcggacgtgtggcattgtgccggtctcacacgcttggcccgatgagatcacattcttctccattcttgcctcacattctcattgctgtacacgagagattatttttctggttgatccatttccttgtcgcaattcccttacctgtgtgtaatctgctagagatggttgacagtctgtgtattacgtagatttgcattgctgctactaaattaattctttcgttatgtgtctcttcctcttatatataatactagcaagatgcccgtgcattgcacggaacattaagatgtattttttt

SEQ ID NO: 61863 - protein, 217 aa, Triticum aestivum
  peptide (1)..(217): Ceres Seq. ID no. 15174226
  misc_feature (70)..(149): Pfam Name: Protease inhibitor/seed storage/LTP family Pfam Description: Protease inhibitor/seed storage/LTP family
  misc_feature (38)..(217): Homolog of NCBI NO: 28269454 NR Description: putative protease inhibitor
  misc_feature (41)..(161): Homolog of NCBI NO: 18401329 NR Description: protease inhibitor/seed storage/lipid transfer
  misc_feature (39)..(161): Homolog of NCBI NO: 21618293 NR Description: unknown [Arabidopsis thaliana]
  misc_feature (31)..(209): Homolog of NCBI NO: 33146785 NR Description: unknown protein [Oryza sativa (japonica
  misc_feature (63)..(208): Homolog of NCBI NO: 25553596 NR Description: OJ1656_E11.27 [Oryza sativa (japonica
  misc_feature (37)..(210): Homolog of NCBI NO: 15229756 NR Description: protease inhibitor/seed storage/lipid transfer
  misc_feature (37)..(210): Homolog of NCBI NO: 21617892 NR Description: lipid-transfer protein-like protein [Arabidopsis
  misc_feature (36)..(197): Homolog of NCBI NO: 28269449 NR Description: putative protease inhibitor
  misc_feature (28)..(210): Homolog of NCBI NO: 25553588 NR Description: OJ1656_E11.14 [Oryza sativa (japonica
  misc_feature (30)..(216): Homolog of NCBI NO: 34909226 NR Description: P0432B10.23 [Oryza sativa (japonica
TRPCLQSIAIHHHLPPKSQANKHSIASMATLRRCSGLLLAAVALALAAGMAAAQGPAGAPAPAAGISSECMTAVLNMSDCLPYVESGSKTRHPDKACCPELDGLLQSNPVCLCQLLAGGADSYGISVDYKRAMALPGVCRLNAPPLSACAAFGVPVGPSSAPLTGVPSPSATGPLMPENPPSATPSKSKSHAPGRLNGRGLVALAALPLAITAAAMF

SEQ ID NO: 61864 - protein, 190 aa, Triticum aestivum
  peptide (1)..(190): Ceres Seq. ID no. 15174227
  misc_feature (43)..(122): Pfam Name: Protease inhibitor/seed storage/LTP family Pfam Description: Protease inhibitor/seed storage/LTP family
  misc_feature (11)..(190): Homolog of NCBI NO: 28269454 NR Description: putative protease inhibitor
  misc_feature (14)..(134): Homolog of NCBI NO: 18401329 NR Description: protease inhibitor/seed storage/lipid transfer
  misc_feature (12)..(134): Homolog of NCBI NO: 21618293 NR Description: unknown [Arabidopsis thaliana]
  misc_feature (4)..(182): Homolog of NCBI NO: 33146785 NR Description: unknown protein [Oryza sativa (japonica
  misc_feature (36)..(181): Homolog of NCBI NO: 25553596 NR Description: OJ1656_E11.27 [Oryza sativa (japonica
  misc_feature (10)..(183): Homolog of NCBI NO: 15229756 NR Description: protease inhibitor/seed storage/lipid transfer
  misc_feature (10)..(183): Homolog of NCBI NO: 21617892 NR Description: lipid-transfer protein-like protein [Arabidopsis
  misc_feature (9)..(170): Homolog of NCBI NO: 28269449 NR Description: putative protease inhibitor
  misc_feature (1)..(183): Homolog of NCBI NO: 25553588 NR Description: OJ1656_E11.14 [Oryza sativa (japonica
  misc_feature (3)..(189): Homolog of NCBI NO: 34909226 NR Description: P0432B10.23 [Oryza sativa (japonica
MATLRRCSGLLLAAVALALAAGMAAAQGPAGAPAPAAGISSECMTAVLNMSDCLPYVESGSKTRHPDKACCPELDGLLQSNPVCLCQLLAGGADSYGISVDYKRAMALPGVCRLNAPPLSACAAFGVPVGPSSAPLTGVPSPSATGPLMPENPPSATPSKSKSHAPGRLNGRGLVALAALPLAITAAAMF

SEQ ID NO: 61865 - protein, 176 aa, Triticum aestivum
  peptide (1)..(176): Ceres Seq. ID no. 15174228
STLPPVHSHTPPPSSQVPSEQTLDRFDGDSAAVLRAVARGGGAGAGGGDGGGAGAGRRAGAGGRDQLGVHDRGAQHVRLPAVRGEREQDAAPGQGLLPGAGRPAAVQPRLPLPAARRRRRLLRNQRRLQARHGAARRLPPQRAAPQRLRSFWSPRGAFFGAINRSALSIRYRTTDA

SEQ ID NO: 61866 - DNA, 780 bp, Triticum aestivum
  misc_feature (1)..(780): Ceres Seq. ID no. 15174240
gacattgcccgaccaaccaaagctcccaatccacgccgccgccgccgccgctgccgacgaaacaggtcataattctcggcgaccggcgaacgagggcaagatgcagatcttcgtgaagacgctgacggggaagacgatcacgctggaggtggagtcgtcggacacgatcgacaacgtcaaggccaagatccaggacaaggaggggatcccgccggaccagcagcggctcatcttcgccgggaagcagctggaggacgggcgcacgctggccgactacaacatccagaaggagtcgacgctgcacctggtcctccgcctgcgcggcggcgccaagaagcgcaagaagaagacctactcgacgcccaagaaggtcaagcacgagcgcgagaagaccccgctcgccgtgctcggctactacagggtggacgacgccacgggcaaggtggagaggctgcgcaaggagtgccccaacccggactgcggcgccggcaccttcatggcggcgcacgccgaccgccacgcctgcggcaagtgcggcctcacctacgcctacgcagaggcccagagcccagagatcgacagtgattgatcaggtggtctgattcgatgacggagttgattagcgccatgaattccgtgtacgtctggtaatgattttttcaatggatatttgtggttagaacaattattctggatatttttctcaattagtcatcagtaagcatgttttggtctgaattggaatgtgctttggcatgcaatcgtgacttgattggcgac

SEQ ID NO: 61867 - protein, 195 aa, Triticum aestivum
  peptide (1)..(195): Ceres Seq. ID no. 15174241
  misc_feature (34)..(107): Pfam Name: Ubiquitin family Pfam Description: Ubiquitin family
  misc_feature (34)..(191): Homolog of NCBI NO: 18407264 NR Description: ubiquitin extension protein (UBQ6)/40S ribosomal
  misc_feature (34)..(189): Homolog of NCBI NO: 541953 NR Description: ubiquitin/ribosomal protein S27a fusion protein -
  misc_feature (34)..(187): Homolog of NCBI NO: 34581769 NR Description: ubiquitin extension protein [Cucumis sativus]
  misc_feature (34)..(187): Homolog of NCBI NO: 25294256 NR Description: ubiquitin extension protein [imported] - common
  misc_feature (34)..(187): Homolog of NCBI NO: 25294255 NR Description: ubiquitin extension protein [imported] - potato
  misc_feature (34)..(184): Homolog of NCBI NO: 34894792 NR Description: ubiquitin / ribosomal protein S27a
  misc_feature (34)..(184): Homolog of NCBI NO: 82733 NR Description: ubiquitin / ribosomal protein S27a - maize
  misc_feature (34)..(187): Homolog of NCBI NO: 279636 NR Description: ubiquitin / ribosomal protein S27a - tomato
  misc_feature (34)..(184): Homolog of NCBI NO: 100599 NR Description: ubiquitin / ribosomal protein S27a.2 - barley
  misc_feature (34)..(184): Homolog of NCBI NO: 100598 NR Description: ubiquitin / ribosomal protein S27a.1 - barley
TLPDQPKLPIHAAAAAAADETGHNSRRPANEGKMQIFVKTLTGKTITLEVESSDTIDNVKAKIQDKEGIPPDQQRLIFAGKQLEDGRTLADYNIQKESTLHLVLRLRGGAKKRKKKTYSTPKKVKHEREKTPLAVLGYYRVDDATGKVERLRKECPNPDCGAGTFMAAHADRHACGKCGLTYAYAEAQSPEIDSD

SEQ ID NO: 61868 - protein, 162 aa, Triticum aestivum
  peptide (1)..(162): Ceres Seq. ID no. 15174242
  misc_feature (1)..(74): Pfam Name: Ubiquitin family Pfam Description: Ubiquitin family
  misc_feature (1)..(158): Homolog of NCBI NO: 18407264 NR Description: ubiquitin extension protein (UBQ6)/40S ribosomal
  misc_feature (1)..(156): Homolog of NCBI NO: 541953 NR Description: ubiquitin/ribosomal protein S27a fusion protein -
  misc_feature (1)..(154): Homolog of NCBI NO: 34581769 NR Description: ubiquitin extension protein [Cucumis sativus]
  misc_feature (1)..(154): Homolog of NCBI NO: 25294256 NR Description: ubiquitin extension protein [imported] - common
  misc_feature (1)..(154): Homolog of NCBI NO: 25294255 NR Description: ubiquitin extension protein [imported] - potato
  misc_feature (1)..(151): Homolog of NCBI NO: 34894792 NR Description: ubiquitin / ribosomal protein S27a
  misc_feature (1)..(151): Homolog of NCBI NO: 82733 NR Description: ubiquitin / ribosomal protein S27a - maize
  misc_feature (1)..(154): Homolog of NCBI NO: 279636 NR Description: ubiquitin / ribosomal protein S27a - tomato
  misc_feature (1)..(151): Homolog of NCBI NO: 100599 NR Description: ubiquitin / ribosomal protein S27a.2 - barley
  misc_feature (1)..(151): Homolog of NCBI NO: 100598 NR Description: ubiquitin / ribosomal protein S27a.1 - barley
MQIFVKTLTGKTITLEVESSDTIDNVKAKIQDKEGIPPDQQRLIFAGKQLEDGRTLADYNIQKESTLHLVLRLRGGAKKRKKKTYSTPKKVKHEREKTPLAVLGYYRVDDATGKVERLRKECPNPDCGAGTFMAAHADRHACGKCGLTYAYAEAQSPEIDSD

SEQ ID NO: 61869 - DNA, 981 bp, Triticum aestivum
  misc_feature (1)..(981): Ceres Seq. ID no. 15174247
atacatccatcgaggagccactccacacaggcaagcaagggtagtgagactcagaggttcaggcatggcagctccaagagcactcgccctcgccgtcctgctggcgatcgctgtcaccaacgccgaggccgcttccgtggtcgtcggcctggccaagtgcgccgactgcaccaggaggaacatcaaggccgaggaagctttcaagggtcttcaggtggcgatcaagtgcaagaacgtccacggcgactacgagagcaaggcagtgggtaccctcgaccgcaccggcgctttcagcgtgcccctggccgccgacctccacggcgccgactgcgtcgcgcagctccacagcgccgcctccagcgccccgtgccctggccaggagccgtctaagatcgtgccggtgtcggagggcaccaccttcggcgtcgtcgccggcgacaacattaccacaccttctgcagcagcgtcgccggagtgcgcgtccatgaccctgtgcgggccgatcaagaagcacatcatcgagcacttccatcacaagaagcccgtgccgcccaagccggagcccaagccccagccccaccctgactacggccccgtgcccaagcccgagcccaagccgcagccccacccggactaccaccccgtccctcccacgcccacctacggcggcggcggtggataccacggacaccactgagtccgatctaccaccgtcctgcccagcgctgaaatctcatcaccgggttcatgggcatgaactcatgatcggcgttgctatttatgatcggtttgcatgtgtgggtatcgttaggtcttctgccattcgctgcagagttgagagttcagaataacagatgtatgtgtgtcactgtgtcaaccgagtgtgaaggtgtgttgctttatcaagattttgtaatttcggtgcgtttaccgaagttattatgaatcaagtaatgtatttaaacaagtcgatttgtcaat

SEQ ID NO: 61870 - protein, 231 aa, Triticum aestivum
  peptide (1)..(231): Ceres Seq. ID no. 15174248
  misc_feature (167)..(220): Pfam Name: Extensin-like region Pfam Description: Extensin-like region
  misc_feature (28)..(221): Homolog of NCBI NO: 7620015 NR Description: proline-rich protein 4 [Arabidopsis thaliana]
  misc_feature (28)..(221): Homolog of NCBI NO: 6782442 NR Description: proline-rich protein [Arabidopsis thaliana]
  misc_feature (28)..(219): Homolog of NCBI NO: 7489265 NR Description: proline-rich protein GPP1 - potato
  misc_feature (29)..(226): Homolog of NCBI NO: 37531064 NR Description: putative proline-rich protein
  misc_feature (24)..(210): Homolog of NCBI NO: 37531090 NR Description: putative proline-rich protein
  misc_feature (24)..(219): Homolog of NCBI NO: 18676394 NR Description: proline-rich protein [Oryza sativa]
  misc_feature (24)..(219): Homolog of NCBI NO: 37531094 NR Description: putative proline-rich protein
  misc_feature (24)..(219): Homolog of NCBI NO: 37531092 NR Description: putative proline-rich protein
  misc_feature (24)..(219): Homolog of NCBI NO: 37531088 NR Description: putative proline-rich protein
  misc_feature (31)..(228): Homolog of NCBI NO: 6689616 NR Description: proline-rich protein [Zea mays]
YIHRGATPHRQARVVRLRGSGMAAPRALALAVLLAIAVTNAEAASVVVGLAKCADCTRRNIKAEEAFKGLQVAIKCKNVHGDYESKAVGTLDRTGAFSVPLAADLHGADCVAQLHSAASSAPCPGQEPSKIVPVSEGTTFGVVAGDNITTPSAAASPECASMTLCGPIKKHIIEHFHHKKPVPPKPEPKPQPHPDYGPVPKPEPKPQPHPDYHPVPPTPTYGGGGGYHGHH

SEQ ID NO: 61871 - protein, 210 aa, Triticum aestivum
  peptide (1)..(210): Ceres Seq. ID no. 15174249
  misc_feature (146)..(199): Pfam Name: Extensin-like region Pfam Description: Extensin-like region
  misc_feature (7)..(200): Homolog of NCBI NO: 7620015 NR Description: proline-rich protein 4 [Arabidopsis thaliana]
  misc_feature (7)..(200): Homolog of NCBI NO: 6782442 NR Description: proline-rich protein [Arabidopsis thaliana]
  misc_feature (7)..(198): Homolog of NCBI NO: 7489265 NR Description: proline-rich protein GPP1 - potato
  misc_feature (8)..(205): Homolog of NCBI NO: 37531064 NR Description: putative proline-rich protein
  misc_feature (3)..(189): Homolog of NCBI NO: 37531090 NR Description: putative proline-rich protein
  misc_feature (3)..(198): Homolog of NCBI NO: 18676394 NR Description: proline-rich protein [Oryza sativa]
  misc_feature (3)..(198): Homolog of NCBI NO: 37531094 NR Description: putative proline-rich protein
  misc_feature (3)..(198): Homolog of NCBI NO: 37531092 NR Description: putative proline-rich protein
  misc_feature (3)..(198): Homolog of NCBI NO: 37531088 NR Description: putative proline-rich protein
  misc_feature (10)..(207): Homolog of NCBI NO: 6689616 NR Description: proline-rich protein [Zea mays]
MAAPRALALAVLLAIAVTNAEAASVVVGLAKCADCTRRNIKAEEAFKGLQVAIKCKNVHGDYESKAVGTLDRTGAFSVPLAADLHGADCVAQLHSAASSAPCPGQEPSKIVPVSEGTTFGVVAGDNITTPSAAASPECASMTLCGPIKKHIIEHFHHKKPVPPKPEPKPQPHPDYGPVPKPEPKPQPHPDYHPVPPTPTYGGGGGYHGHH

SEQ ID NO: 61872 - protein, 129 aa, Triticum aestivum
  peptide (1)..(129): Ceres Seq. ID no. 15174250
  misc_feature (62)..(129): Pfam Name: Sperm histone P2 Pfam Description: Sperm histone P2
IHPSRSHSTQASKGSETQRFRHGSSKSTRPRRPAGDRCHQRRGRFRGRRPGQVRRLHQEEHQGRGSFQGSSGGDQVQERPRRLREQGSGYPRPHRRFQRAPGRRPPRRRLRRAAPQRRLQRPVPWPGAV

SEQ ID NO: 61873 - DNA, 1156 bp, Triticum aestivum
  misc_feature (1)..(1156): Ceres Seq. ID no. 15174281
gacgattagaaaacatcgggaaaccccctccccgtgctccaactaccccaagcgccgccactcccaccgtaccgcggcaatgccgacgccacgaaaccggaaggtccctgcccctgccccgccgcgccggcggcctccccgcctggagtaccgcgcaaaggacggcgcgtggtacggcgcgcgcatggcgctgcagggcgactcgctgcgcgtcatgttcgaggaattccgcgaggagttcgacgagtggcacgacccaaacacggccgacctcgcctccccgggcgacgtgaccgcgctccgcaccaggttccgcccggcgagcccgcccctcgaggacgcccgctgcggcgacctccgccgcggccagctgctctgcgtcctccgcgccatgtccaacggcgagcgcaagtactacgacgccatccttgattccgtgaaaagagcggctcacgtcaccgtgggcggcgaggagcggtgcgcgtgccgcttcacagtgcggtggacggacgggccgctccgcggcggcctggacgaggtcggcgtcgacgaggtctgctgcgtgcgggactcgccggtcaacgacccggtgctgagcgagttcctggaccgcgtgacgaggtcgttcggcttcggcgacggcgaggagaacgcgaaggcggtgcaggactcgccggtccaggagccgcggctaaacgagttcctggaccgcgtgacgaaatcgttcggctactgcaacggcgaggagaaaccgaaggcggcgcctcaggggaccggggccacgttgcccccgggcggcgagcagagcgcgacggcggcccctcaggcgaccggggccacgtcgctctgcggcggcgagggggagactgccttcataatcatcgactaggtcgcggcctgcactgcattcctgcgcttctgtttcgatgtatccatgtgcctgccctgctcgacgattggtgagggtatttcgtgccttcgcgttgtttcattcagttactgtctttgtcttccttgtttcgtgtctatgtctaatcttgttcggccccgaaatggacgccatcgttggtagtagtacttggtagtcggtgcgattatgtatctctgttcctgttgccatctttccctggaacctgaaagccatattatgcattgg

SEQ ID NO: 61874 - protein, 295 aa, Triticum aestivum
  peptide (1)..(295): Ceres Seq. ID no. 15174282
  misc_feature (46)..(207): Homolog of NCBI NO: 30686844 NR Description: expressed protein [Arabidopsis thaliana]
  misc_feature (46)..(207): Homolog of NCBI NO: 7486059 NR Description: hypothetical protein F24A6.170 - Arabidopsis
TIRKHRETPSPCSNYPKRRHSHRTAAMPTPRNRKVPAPAPPRRRPPRLEYRAKDGAWYGARMALQGDSLRVMFEEFREEFDEWHDPNTADLASPGDVTALRTRFRPASPPLEDARCGDLRRGQLLCVLRAMSNGERKYYDAILDSVKRAAHVTVGGEERCACRFTVRWTDGPLRGGLDEVGVDEVCCVRDSPVNDPVLSEFLDRVTRSFGFGDGEENAKAVQDSPVQEPRLNEFLDRVTKSFGYCNGEEKPKAAPQGTGATLPPGGEQSATAAPQATGATSLCGGEGETAFIIID

SEQ ID NO: 61875 - protein, 269 aa, Triticum aestivum
  peptide (1)..(269): Ceres Seq. ID no. 15174283
  misc_feature (20)..(181): Homolog of NCBI NO: 30686844 NR Description: expressed protein [Arabidopsis thaliana]
  misc_feature (20)..(181): Homolog of NCBI NO: 7486059 NR Description: hypothetical protein F24A6.170 - Arabidopsis
MPTPRNRKVPAPAPPRRRPPRLEYRAKDGAWYGARMALQGDSLRVMFEEFREEFDEWHDPNTADLASPGDVTALRTRFRPASPPLEDARCGDLRRGQLLCVLRAMSNGERKYYDAILDSVKRAAHVTVGGEERCACRFTVRWTDGPLRGGLDEVGVDEVCCVRDSPVNDPVLSEFLDRVTRSFGFGDGEENAKAVQDSPVQEPRLNEFLDRVTKSFGYCNGEEKPKAAPQGTGATLPPGGEQSATAAPQATGATSLCGGEGETAFIIID

SEQ ID NO: 61876 - protein, 234 aa, Triticum aestivum
  peptide (1)..(234): Ceres Seq. ID no. 15174284
  misc_feature (1)..(146): Homolog of NCBI NO: 30686844 NR Description: expressed protein [Arabidopsis thaliana]
  misc_feature (1)..(146): Homolog of NCBI NO: 7486059 NR Description: hypothetical protein F24A6.170 - Arabidopsis
MALQGDSLRVMFEEFREEFDEWHDPNTADLASPGDVTALRTRFRPASPPLEDARCGDLRRGQLLCVLRAMSNGERKYYDAILDSVKRAAHVTVGGEERCACRFTVRWTDGPLRGGLDEVGVDEVCCVRDSPVNDPVLSEFLDRVTRSFGFGDGEENAKAVQDSPVQEPRLNEFLDRVTKSFGYCNGEEKPKAAPQGTGATLPPGGEQSATAAPQATGATSLCGGEGETAFIIID

SEQ ID NO: 61877 - DNA, 772 bp, Triticum aestivum
  misc_feature (1)..(772): Ceres Seq. ID no. 15174264
acacaccatctcagcccccatctcccctgcctctctccagcaaactcacgccccccaccaccgaagctcccaaccccacccgaagcggcagccatggcccccaaggcagacaagaagccggcggccgagagcaaggtggagaaggcggccgagaagacccccgcgggcaagaagcccaaggccgagaagcggctgccggcgggcaagacggcgtccaaggaggccggcggtgagggcaagacccggggccgcaagaagggcagcaaggcgaagaagggcgtggagacgtacaagatctacatcttcaaagtgctgaagcaggtgcaccccgacatcggcatctcctccaaggccatgtccatcatgaactccttcatcaacgacatcttcgagaagctcgccggggagtcggccaagctcgcccgctacaacaagaagcccaccatcacgtcccgggagatccagacctccgtccgcctcgtcctccccggggagctcgccaagcacgccgtctccgagggcaccaaggccgtcaccaagttcacctcctcctagactgacgacgcgccgcttgttgtgacagatgtggccgtctgctgtatctgtagtcgctgttgactctgcttatctccatctgcaagtagtggtagctgtagtgcgcgtgctgggtgatgattgccaacgctttgttggctggttggatgtaagaactgaacgtgttgcttttgcaaactgatgaaatctatctagaaaatgtcgcagttgtggtacc

SEQ ID NO: 61878 - protein, 184 aa, Triticum aestivum
  peptide (1)..(184): Ceres Seq. ID no. 15174265
  misc_feature (50)..(184): Pfam Name: Core histone H2A/H2B/H3/H4 Pfam Description: Core histone H2A/H2B/H3/H4
  misc_feature (29)..(184): Homolog of NCBI NO: 37550648 NR Description: similar to Histone H2B.n (H2B/n) (H2B.2) [Homo
  misc_feature (57)..(184): Homolog of NCBI NO: 34876364 NR Description: similar to CG31613-PA [Rattus norvegicus]
  misc_feature (59)..(184): Homolog of NCBI NO: 34876159 NR Description: similar to Histone H2B 291B [Rattus norvegicus]
  misc_feature (32)..(184): Homolog of NCBI NO: 34895896 NR Description: putative histone H2B [Oryza sativa (japonica
  misc_feature (32)..(184): Homolog of NCBI NO: 34895838 NR Description: putative histone H2B [Oryza sativa (japonica
  misc_feature (32)..(184): Homolog of NCBI NO: 34895900 NR Description: putative histone H2B [Oryza sativa (japonica
  misc_feature (32)..(184): Homolog of NCBI NO: 122022 NR Description: Histone H2B
  misc_feature (32)..(184): Homolog of NCBI NO: 3913804 NR Description: Histone H2B.3
  misc_feature (32)..(184): Homolog of NCBI NO: 399854 NR Description: Histone H2B.2
  misc_feature (37)..(184): Homolog of NCBI NO: 122033 NR Description: HISTONE H2B.2
THHLSPHLPCLSPANSRPPPPKLPTPPEAAAMAPKADKKPAAESKVEKAAEKTPAGKKPKAEKRLPAGKTASKEAGGEGKTRGRKKGSKAKKGVETYKIYIFKVLKQVHPDIGISSKAMSIMNSFINDIFEKLAGESAKLARYNKKPTITSREIQTSVRLVLPGELAKHAVSEGTKAVTKFTSS

SEQ ID NO: 61879 - protein, 153 aa, Triticum aestivum
  peptide (1)..(153): Ceres Seq. ID no. 15174266
  misc_feature (19)..(153): Pfam Name: Core histone H2A/H2B/H3/H4 Pfam Description: Core histone H2A/H2B/H3/H4
  misc_feature (1)..(153): Homolog of NCBI NO: 37550648 NR Description: similar to Histone H2B.n (H2B/n) (H2B.2) [Homo
  misc_feature (26)..(153): Homolog of NCBI NO: 34876364 NR Description: similar to CG31613-PA [Rattus norvegicus]
  misc_feature (28)..(153): Homolog of NCBI NO: 34876159 NR Description: similar to Histone H2B 291B [Rattus norvegicus]
  misc_feature (1)..(153): Homolog of NCBI NO: 34895896 NR Description: putative histone H2B [Oryza sativa (japonica
  misc_feature (1)..(153): Homolog of NCBI NO: 34895838 NR Description: putative histone H2B [Oryza sativa (japonica
  misc_feature (1)..(153): Homolog of NCBI NO: 34895900 NR Description: putative histone H2B [Oryza sativa (japonica
  misc_feature (1)..(153): Homolog of NCBI NO: 122022 NR Description: Histone H2B
  misc_feature (1)..(153): Homolog of NCBI NO: 3913804 NR Description: Histone H2B.3
  misc_feature (1)..(153): Homolog of NCBI NO: 399854 NR Description: Histone H2B.2
  misc_feature (6)..(153): Homolog of NCBI NO: 122033 NR Description: HISTONE H2B.2
MAPKADKKPAAESKVEKAAEKTPAGKKPKAEKRLPAGKTASKEAGGEGKTRGRKKGSKAKKGVETYKIYIFKVLKQVHPDIGISSKAMSIMNSFINDIFEKLAGESAKLARYNKKPTITSREIQTSVRLVLPGELAKHAVSEGTKAVTKFTSS

SEQ ID NO: 61880 - protein, 104 aa, Triticum aestivum
  peptide (1)..(104): Ceres Seq. ID no. 15174267
  misc_feature (9)..(59): Pfam Name: Extensin-like region Pfam Description: Extensin-like region
  misc_feature (42)..(104): Homolog of NCBI NO: 31227421 NR Description: ENSANGP00000004917 [Anopheles gambiae]
  misc_feature (11)..(104): Homolog of NCBI NO: 5821143 NR Description: RNA binding protein [Homo sapiens]
  misc_feature (8)..(104): Homolog of NCBI NO: 2429362 NR Description: proline rich protein [Santalum album]
  misc_feature (13)..(104): Homolog of NCBI NO: 23274133 NR Description: Similar to serine/arginine repetitive matrix 1
  misc_feature (13)..(104): Homolog of NCBI NO: 5032119 NR Description: Ser/Arg-related nuclear matrix protein (plenty of
  misc_feature (11)..(104): Homolog of NCBI NO: 5821145 NR Description: RNA binding protein [Homo sapiens]
  misc_feature (8)..(104): Homolog of NCBI NO: 25143299 NR Description: pre-mRNA splicing SR protein related (68.2 kD)
  misc_feature (35)..(104): Homolog of NCBI NO: 29250446 NR Description: GLP_39_87477_88058 [Giardia lamblia ATCC 50803]
  misc_feature (13)..(104): Homolog of NCBI NO: 23103422 NR Description: hypothetical protein [Azotobacter vinelandii]
  misc_feature (17)..(104): Homolog of NCBI NO: 25143299 NR Description: pre-mRNA splicing SR protein related (68.2 kD)
HTISAPISPASLQQTHAPHHRSSQPHPKRQPWPPRQTRSRRPRARWRRRPRRPPRARSPRPRSGCRRARRRPRRPAVRARPGAARRAARRRRAWRRTRSTSSKC

SEQ ID NO: 61881 - DNA, 825 bp, Triticum aestivum
  misc_feature (1)..(825): Ceres Seq. ID no. 15174260
aatatggctaaagttgtcgagggtcatcgcaggttcatgggtttcaagaagacaatcttgctagatcgaaaactcatcgtcgacctagcagaccagtacaacaacggctcgttgcgatgggatgagttctctttgctgatcaaggctgcccacgcagggcggatgggatcagcctcaaagcggacagtgattcccgacagacccaaggaggaggactacttctacgcgaacccccaggagtgcctgcaagaccccgaccgcctacgcacgtcatgataaccgccgccacccctgtcaatatttccacccaccttataccattcttttcacagacgcagcagccgaaccagaggccaggttcgtcgttacttcgaagaaaccaaccgaaagaggggcggctcggctcgccataggtgtaaaactcggggagggggtgggcgtgggtgttgtatatcttggatgtagctgcctagctggtaaatactctacacgttatagaaatggagggcggtttattcgttcgttccacggaaaataatgaggagtcatactgaagatactcttgtatagaagatggtgatgatagagtctactaccacgaagaggaaaggtaaatttgagtgaggggagagatggctggacccacatgtctgtctctggctggtcttcttttggttgtgtaaaacatactagcagttgttcttctccgtagcctcccccgtgctccctccccgtcagtcaggcagggcttatttttttgtcaatcaaagttgctgagagttgtatactacagtgtttatattggatcgatgtggttacctgtgc

SEQ ID NO: 61882 - protein, 91 aa, Triticum aestivum
  peptide (1)..(91): Ceres Seq. ID no. 15174261
  misc_feature (1)..(82): Homolog of NCBI NO: 19071634 NR Description: putative auxin independent growth-related protein
  misc_feature (1)..(82): Homolog of NCBI NO: 34902158 NR Description: Putative growth regulator protein
  misc_feature (1)..(82): Homolog of NCBI NO: 15223028 NR Description: growth regulator protein -related [Arabidopsis
  misc_feature (1)..(82): Homolog of NCBI NO: 8778398 NR Description: F16A14.24 [Arabidopsis thaliana]
  misc_feature (1)..(82): Homolog of NCBI NO: 27754419 NR Description: putative axi 1 protein [Arabidopsis thaliana]
  misc_feature (1)..(82): Homolog of NCBI NO: 15227586 NR Description: axi 1 protein from Nicotiana tabacum -related
  misc_feature (1)..(83): Homolog of NCBI NO: 30678517 NR Description: auxin-independent growth promoter -related
  misc_feature (1)..(83): Homolog of NCBI NO: 21618304 NR Description: unknown [Arabidopsis thaliana]
  misc_feature (1)..(83): Homolog of NCBI NO: 6041793 NR Description: putative auxin-independent growth promoter
  misc_feature (1)..(83): Homolog of NCBI NO: 15242375 NR Description: expressed protein [Arabidopsis thaliana]
NMAKVVEGHRRFMGFKKTILLDRKLIVDLADQYNNGSLRWDEFSLLIKAAHAGRMGSASKRTVIPDRPKEEDYFYANPQECLQDPDRLRTS

SEQ ID NO: 61883 - protein, 90 aa, Triticum aestivum
  peptide (1)..(90): Ceres Seq. ID no. 15174262
  misc_feature (1)..(81): Homolog of NCBI NO: 19071634 NR Description: putative auxin independent growth-related protein
  misc_feature (1)..(81): Homolog of NCBI NO: 34902158 NR Description: Putative growth regulator protein
  misc_feature (1)..(81): Homolog of NCBI NO: 15223028 NR Description: growth regulator protein -related [Arabidopsis
  misc_feature (1)..(81): Homolog of NCBI NO: 8778398 NR Description: F16A14.24 [Arabidopsis thaliana]
  misc_feature (1)..(81): Homolog of NCBI NO: 27754419 NR Description: putative axi 1 protein [Arabidopsis thaliana]
  misc_feature (1)..(81): Homolog of NCBI NO: 15227586 NR Description: axi 1 protein from Nicotiana tabacum -related
  misc_feature (1)..(82): Homolog of NCBI NO: 30678517 NR Description: auxin-independent growth promoter -related
  misc_feature (1)..(82): Homolog of NCBI NO: 21618304 NR Description: unknown [Arabidopsis thaliana]
  misc_feature (1)..(82): Homolog of NCBI NO: 6041793 NR Description: putative auxin-independent growth promoter
  misc_feature (1)..(82): Homolog of NCBI NO: 15242375 NR Description: expressed protein [Arabidopsis thaliana]
MAKVVEGHRRFMGFKKTILLDRKLIVDLADQYNNGSLRWDEFSLLIKAAHAGRMGSASKRTVIPDRPKEEDYFYANPQECLQDPDRLRTS

SEQ ID NO: 61884 - protein, 79 aa, Triticum aestivum
  peptide (1)..(79): Ceres Seq. ID no. 15174263
  misc_feature (1)..(70): Homolog of NCBI NO: 19071634 NR Description: putative auxin independent growth-related protein
  misc_feature (1)..(70): Homolog of NCBI NO: 34902158 NR Description: Putative growth regulator protein
  misc_feature (1)..(70): Homolog of NCBI NO: 15223028 NR Description: growth regulator protein -related [Arabidopsis
  misc_feature (1)..(70): Homolog of NCBI NO: 8778398 NR Description: F16A14.24 [Arabidopsis thaliana]
  misc_feature (1)..(70): Homolog of NCBI NO: 27754419 NR Description: putative axi 1 protein [Arabidopsis thaliana]
  misc_feature (1)..(70): Homolog of NCBI NO: 15227586 NR Description: axi 1 protein from Nicotiana tabacum -related
  misc_feature (1)..(71): Homolog of NCBI NO: 30678517 NR Description: auxin-independent growth promoter -related
  misc_feature (1)..(71): Homolog of NCBI NO: 21618304 NR Description: unknown [Arabidopsis thaliana]
  misc_feature (1)..(71): Homolog of NCBI NO: 6041793 NR Description: putative auxin-independent growth promoter
  misc_feature (1)..(71): Homolog of NCBI NO: 15242375 NR Description: expressed protein [Arabidopsis thaliana]
MGFKKTILLDRKLIVDLADQYNNGSLRWDEFSLLIKAAHAGRMGSASKRTVIPDRPKEEDYFYANPQECLQDPDRLRTS

SEQ ID NO: 61885 - DNA, 705 bp, Triticum aestivum
  misc_feature (1)..(705): Ceres Seq. ID no. 15174197
attggagagtttgcttttgttcttcttagccgtgcttcaagcatccatctgattgagggcaagctgtatctacttcttcttggaaccacagcgcttagcttggtaacaacacccctgctattcaaaatgatcccagccgtggtccaccttggtgttcttttgagatggttttccgtcgatagcaatcaggtggagttgggcctaaaaggcgaagtcctccgcaatgatagcggcaagcgcataaatttgataatccaaggcccacacgactcatgacacacttggcacaccgcaagctacttttagtatggctttaagttaacgagctctgtaaagtgtttccgcatgtaacgaagagtttatagcgcgtatgcacggccgggcgggagttggaagcagaagaaatcagatctcgttcaaagtgtgtgagatcgacccttccccgcagcgacgactggaaatgcaaggggaggatttcgccagccttgtgagcagtggatgaagcgggcagtgagtgcactgctcgcggtgtgatccctctaatgagggttttctgtagtataagaatgtaatctgattgattgattgattggattagcgtgataggatttaggcttgaccggtataccactgtattaattccacaaaatgtgcagaacgccacctgatcatgaattttgctgtgcagtgagtttgccattgtcg

SEQ ID NO: 61886 - protein, 91 aa, Triticum aestivum
  peptide (1)..(91): Ceres Seq. ID no. 15174198
  misc_feature (20)..(69): Homolog of NCBI NO: 34902264 NR Description: Putative potassium/proton antiporter-like protein
  misc_feature (1)..(62): Homolog of NCBI NO: 18423310 NR Description: K+ efflux antiporter, putative (KEA5)
  misc_feature (1)..(62): Homolog of NCBI NO: 10177870 NR Description: potassium/proton antiporter-like protein
  misc_feature (1)..(91): Homolog of NCBI NO: 15239787 NR Description: K+ efflux antiporter, putative (KEA6)
  misc_feature (1)..(91): Homolog of NCBI NO: 30680729 NR Description: K+ efflux antiporter, putative (KEA4)
  misc_feature (1)..(91): Homolog of NCBI NO: 25411916 NR Description: probable potassium/proton antiporter
IGEFAFVLLSRASSIHLIEGKLYLLLLGTTALSLVTTPLLFKMIPAVVHLGVLLRWFSVDSNQVELGLKGEVLRNDSGKRINLIIQGPHDS

SEQ ID NO: 61887 - protein, 49 aa, Triticum aestivum
  peptide (1)..(49): Ceres Seq. ID no. 15174199
  misc_feature (1)..(27): Homolog of NCBI NO: 34902264 NR Description: Putative potassium/proton antiporter-like protein
  misc_feature (1)..(20): Homolog of NCBI NO: 18423310 NR Description: K+ efflux antiporter, putative (KEA5)
  misc_feature (1)..(20): Homolog of NCBI NO: 10177870 NR Description: potassium/proton antiporter-like protein
  misc_feature (1)..(49): Homolog of NCBI NO: 15239787 NR Description: K+ efflux antiporter, putative (KEA6)
  misc_feature (1)..(49): Homolog of NCBI NO: 30680729 NR Description: K+ efflux antiporter, putative (KEA4)
  misc_feature (1)..(49): Homolog of NCBI NO: 25411916 NR Description: probable potassium/proton antiporter
MIPAVVHLGVLLRWFSVDSNQVELGLKGEVLRNDSGKRINLIIQGPHDS

SEQ ID NO: 61888 - DNA, 756 bp, Triticum aestivum
  misc_feature (1)..(756): Ceres Seq. ID no. 15174168
ccagcaaacactcggcgacacacgacaaacagcaagtactagcaatcatctagccgattcttcccttgctgcagcatctgtagcttccttctcgccttcgttcaccttccgcggctgattaatggcaaccatgatgaccatgagctccttcgccggtgccgccgtcctgccgcgtggctcggccggccacttcggtgcccagtctctgccagcactgggccgacgcgccctcatcgtcagggcacaaaccgaaggcccgagtgcaccaccgccaaacacacccaaggcgagcacctcgatctgggacgcgctggcgttcgccggacccgcgccggagcgcatcaacgggcggctggccatggtgggtttcgtgactgcgcttgccgtggaagcaggccgtggagacgggctcctctcgcagctcggcagcggcaccgggcaggcgtggttcgcctactccgtggcggtgctgtctgtggcgtcgctggtgccactgctccagggcgagagcgctgagggcagagccggtgccatcatgaacgccaacgcggagctctggaacggccgcttcgccatgctcggcctcgccgcgctcgccgccaccgagatcatcaccggcgcgcccttcatcaacgtgtaaaactagctttgtcgtggaccggataacacaacctgtacctaggacatgtaaatgatgagaattgatcatcctcatattctttgtagtgcttatactaattaaagacagttcatacc

SEQ ID NO: 61889 - protein, 172 aa, Triticum aestivum
  peptide (1)..(172): Ceres Seq. ID no. 15174169
  misc_feature (49)..(163): Pfam Name: Chlorophyll A-B binding protein Pfam Description: Chlorophyll A-B binding protein
  misc_feature (43)..(166): Homolog of NCBI NO: 28194659 NR Description: putative early light induced protein [Arachis
  misc_feature (44)..(170): Homolog of NCBI NO: 15228866 NR Description: early light-induced protein [Arabidopsis
  misc_feature (46)..(172): Homolog of NCBI NO: 119284 NR Description: High molecular mass early light-inducible protein
  misc_feature (43)..(172): Homolog of NCBI NO: 34904610 NR Description: putative early light-inducible protein
  misc_feature (43)..(172): Homolog of NCBI NO: 28971958 NR Description: putative low molecular mass early light-induced
  misc_feature (1)..(172): Homolog of NCBI NO: 14029814 NR Description: early light-inducible protein ELIP [Zea mays]
  misc_feature (43)..(172): Homolog of NCBI NO: 28971959 NR Description: putative low molecular mass early light-induced
  misc_feature (1)..(172): Homolog of NCBI NO: 119285 NR Description: Low molecular mass early light-inducible protein
  misc_feature (1)..(172): Homolog of NCBI NO: 4521272 NR Description: early light-inducible protein [Triticum aestivum]
  misc_feature (1)..(172): Homolog of NCBI NO: 119286 NR Description: Low molecular mass early light-inducible protein
MATMMTMSSFAGAAVLPRGSAGHFGAQSLPALGRRALIVRAQTEGPSAPPPNTPKASTSIWDALAFAGPAPERINGRLAMVGFVTALAVEAGRGDGLLSQLGSGTGQAWFAYSVAVLSVASLVPLLQGESAEGRAGAIMNANAELWNGRFAMLGLAALAATEIITGAPFINV

SEQ ID NO: 61890 - protein, 169 aa, Triticum aestivum
  peptide (1)..(169): Ceres Seq. ID no. 15174170
  misc_feature (46)..(160): Pfam Name: Chlorophyll A-B binding protein Pfam Description: Chlorophyll A-B binding protein
  misc_feature (40)..(163): Homolog of NCBI NO: 28194659 NR Description: putative early light induced protein [Arachis
  misc_feature (41)..(167): Homolog of NCBI NO: 15228866 NR Description: early light-induced protein [Arabidopsis
  misc_feature (43)..(169): Homolog of NCBI NO: 119284 NR Description: High molecular mass early light-inducible protein
  misc_feature (40)..(169): Homolog of NCBI NO: 34904610 NR Description: putative early light-inducible protein
  misc_feature (40)..(169): Homolog of NCBI NO: 28971958 NR Description: putative low molecular mass early light-induced
  misc_feature (1)..(169): Homolog of NCBI NO: 14029814 NR Description: early light-inducible protein ELIP [Zea mays]
  misc_feature (40)..(169): Homolog of NCBI NO: 28971959 NR Description: putative low molecular mass early light-induced
  misc_feature (1)..(169): Homolog of NCBI NO: 119285 NR Description: Low molecular mass early light-inducible protein
  misc_feature (1)..(169): Homolog of NCBI NO: 4521272 NR Description: early light-inducible protein [Triticum aestivum]
  misc_feature (1)..(169): Homolog of NCBI NO: 119286 NR Description: Low molecular mass early light-inducible protein
MMTMSSFAGAAVLPRGSAGHFGAQSLPALGRRALIVRAQTEGPSAPPPNTPKASTSIWDALAFAGPAPERINGRLAMVGFVTALAVEAGRGDGLLSQLGSGTGQAWFAYSVAVLSVASLVPLLQGESAEGRAGAIMNANAELWNGRFAMLGLAALAATEIITGAPFINV

SEQ ID NO: 61891 - protein, 168 aa, Triticum aestivum
  peptide (1)..(168): Ceres Seq. ID no. 15174171
  misc_feature (45)..(159): Pfam Name: Chlorophyll A-B binding protein Pfam Description: Chlorophyll A-B binding protein
  misc_feature (39)..(162): Homolog of NCBI NO: 28194659 NR Description: putative early light induced protein [Arachis
  misc_feature (40)..(166): Homolog of NCBI NO: 15228866 NR Description: early light-induced protein [Arabidopsis
  misc_feature (42)..(168): Homolog of NCBI NO: 119284 NR Description: High molecular mass early light-inducible protein
  misc_feature (39)..(168): Homolog of NCBI NO: 34904610 NR Description: putative early light-inducible protein
  misc_feature (39)..(168): Homolog of NCBI NO: 28971958 NR Description: putative low molecular mass early light-induced
  misc_feature (1)..(168): Homolog of NCBI NO: 14029814 NR Description: early light-inducible protein ELIP [Zea mays]
  misc_feature (39)..(168): Homolog of NCBI NO: 28971959 NR Description: putative low molecular mass early light-induced
  misc_feature (1)..(168): Homolog of NCBI NO: 119285 NR Description: Low molecular mass early light-inducible protein
  misc_feature (1)..(168): Homolog of NCBI NO: 4521272 NR Description: early light-inducible protein [Triticum aestivum]
  misc_feature (1)..(168): Homolog of NCBI NO: 119286 NR Description: Low molecular mass early light-inducible protein
MTMSSFAGAAVLPRGSAGHFGAQSLPALGRRALIVRAQTEGPSAPPPNTPKASTSIWDALAFAGPAPERINGRLAMVGFVTALAVEAGRGDGLLSQLGSGTGQAWFAYSVAVLSVASLVPLLQGESAEGRAGAIMNANAELWNGRFAMLGLAALAATEIITGAPFINV

SEQ ID NO: 61892 - DNA, 1020 bp, Triticum aestivum
  misc_feature (1)..(1020): Ceres Seq. ID no. 15174048
cccggttttgcccctgccaagtcaattgaccaggagagggacgcgttcgtgttccctgctcttcgtcgacgccgacggggggtctccacggcgacataccggcggacggcggcggatccctcccggtgaaggcgacgttgttacatttgcaaatgtcaaattctgtcatgaataccactcagaaagttgatccaacggaaccagctgctaagattgctcagcaagcctcacagttcaaacgatggggacgcaagcatccatttgttcgatatggccttccgctcatttctttgacagtgtttggtgcggttggtctagctcatctcatacagggaagcaaagaagtaacaaaggaaaaggaggacatggaatgggaggtcgtagagaaaacaaaagctctgagccgaacaggaccagtggaaggggcttataagcctaagaagctctcgctagaggacgaactgaaggctttgcagcaaaaggtggacataaacagctacgactacaagagaattcccaaacaaaatgaaaacaagtgaagtaaagcactgtttatcatgctaaggggtgggggattttcttaaaatccttgaagtagtttcttggtcctgtttcttcatgagttccttgggatgttgtccaagtgtcaaaatgagattgcggagacattatcatcagaactctgtgcttcgtcagccattagcagtagagagttagtcgaggatccttgtgaaggcttgaaccgtaggaataatctttgtagccatggccgatgggagataggcattttcacggtccaccaagtgagtctttttttagttgatcgaatactgccttctttaccatggggccaataaattgtaggtaacacagtactctgacgtgcgagcaatcaaattttgtatgccatttcttggaagctaattagctgtgtcacgatcactaaacaaaggggaggaaacaggaaagttcatatttcatatgtatattttgagactccgaagctcgtattcggctgac

SEQ ID NO: 61893 - protein, 128 aa, Triticum aestivum
  peptide (1)..(128): Ceres Seq. ID no. 15174049
  misc_feature (9)..(62): Homolog of NCBI NO: 26453208 NR Description: putative kinesin [Arabidopsis thaliana]
  misc_feature (9)..(128): Homolog of NCBI NO: 7428718 NR Description: probable kinesin - Arabidopsis thaliana
  misc_feature (9)..(128): Homolog of NCBI NO: 22328612 NR Description: kinesin like protein {Arabidopsis -related
MSNSVMNTTQKVDPTEPAAKIAQQASQFKRWGRKHPFVRYGLPLISLTVFGAVGLAHLIQGSKEVTKEKEDMEWEVVEKTKALSRTGPVEGAYKPKKLSLEDELKALQQKVDINSYDYKRIPKQNENK

SEQ ID NO: 61894 - protein, 123 aa, Triticum aestivum
  peptide (1)..(123): Ceres Seq. ID no. 15174050
  misc_feature (4)..(57): Homolog of NCBI NO: 26453208 NR Description: putative kinesin [Arabidopsis thaliana]
  misc_feature (4)..(123): Homolog of NCBI NO: 7428718 NR Description: probable kinesin - Arabidopsis thaliana
  misc_feature (4)..(123): Homolog of NCBI NO: 22328612 NR Description: kinesin like protein {Arabidopsis -related
MNTTQKVDPTEPAAKIAQQASQFKRWGRKHPFVRYGLPLISLTVFGAVGLAHLIQGSKEVTKEKEDMEWEVVEKTKALSRTGPVEGAYKPKKLSLEDELKALQQKVDINSYDYKRIPKQNENK

SEQ ID NO: 61895 - protein, 74 aa, Triticum aestivum
  peptide (1)..(74): Ceres Seq. ID no. 15174051
MLSKCQNEIAETLSSELCASSAISSRELVEDPCEGLNRRNNLCSHGRWEIGIFTVHQVSLFLVDRILPSLPWGQ

SEQ ID NO: 61896 - DNA, 1009 bp, Triticum aestivum
  misc_feature (1)..(1009): Ceres Seq. ID no. 15174082
attcttagcgacaacattccgtctcatcctccccagctcggtttttgggccattctaagccaccatgcctgcctccatcgccttcggtcggttcgatgactccttcagcttggcctctttcaaggcctacatcgccgagttcatctccaccctcatcttcgtcttcgccggcgtcggctctgccatcgcctactccaaggtgagcggcggcgcgccgcttgacccatccgggctgatcgccgtggccatctgccacgggttcgggctgttcgtcgcggtcgccgtcggcgccaacatctccggcggccatgtgaaccctgccgtcaccttcggcctcgccctcggcggccagatcaccatcctcaccggcatcttctactgggttgcccagctcctcggcgccatcgtcggcgccttcctcgtccagttctgcaccggcgtggcgacccctacacacgggctttccggcgtgggcgccttcgagggcgtcgtgatggagatcatcgtcaccttcgggctcgtctacaccgtgtacgccaccgccgccgaccccaagaaggggtccctcggcaccatcgctccaatcgccatcggcttcatcgtcggcgccaacatcctcgtcgccggccccttctccggcgggtccatgaaccctgcacgctccttcggccccgccgttgccagcggcgacttcaccaacatctggatctactgggccggcccgctcatcggcggtggcctcgccggcgtcgtctaccggtacctgtacatgtgcgacgaccacaccgccgtcgccggcaacgactactaagccagccatgggaagatcattcggtctttggtttccataatgtcttcggcaacataagaagtgcgtacgtggtggcactctcaggattgtctggatgatgtgaggaacgtcatgttgtttggttccgatcgaaagcccgcgaggctgtggcacttggatgatgcatgtttctgtatctgtactgtgatggatgttgtg

SEQ ID NO: 61897 - protein, 248 aa, Triticum aestivum
  peptide (1)..(248): Ceres Seq. ID no. 15174083
  misc_feature (12)..(231): Pfam Name: Major intrinsic protein Pfam Description: Major intrinsic protein
  misc_feature (4)..(248): Homolog of NCBI NO: 5911732 NR Description: delta tonoplast intrinsic protein [Spinacia
  misc_feature (3)..(248): Homolog of NCBI NO: 11276919 NR Description: water channel protein MipK [imported] - common
  misc_feature (1)..(248): Homolog of NCBI NO: 7441271 NR Description: aquaporin TIP18 - common sunflower
  misc_feature (3)..(248): Homolog of NCBI NO: 17473872 NR Description: delta tonoplast intrinsic protein [Arabidopsis
  misc_feature (3)..(248): Homolog of NCBI NO: 15233320 NR Description: delta tonoplast integral protein (delta-TIP)
  misc_feature (3)..(244): Homolog of NCBI NO: 7441258 NR Description: probable water channel protein delta-VM23 -
  misc_feature (1)..(246): Homolog of NCBI NO: 12006841 NR Description: putative delta TIP [Nicotiana glauca]
  misc_feature (3)..(248): Homolog of NCBI NO: 7441289 NR Description: tonoplast intrinsic protein, delta type - upland
  misc_feature (3)..(248): Homolog of NCBI NO: 11276920 NR Description: aquaporin [imported] - Vernicia fordii
  misc_feature (1)..(248): Homolog of NCBI NO: 4099408 NR Description: delta-type tonoplast intrinsic protein [Triticum
MPASIAFGRFDDSFSLASFKAYIAEFISTLIFVFAGVGSAIAYSKVSGGAPLDPSGLIAVAICHGFGLFVAVAVGANISGGHVNPAVTFGLALGGQITILTGIFYWVAQLLGAIVGAFLVQFCTGVATPTHGLSGVGAFEGVVMEIIVTFGLVYTVYATAADPKKGSLGTIAPIAIGFIVGANILVAGPFSGGSMNPARSFGPAVASGDFTNIWIYWAGPLIGGGLAGVVYRYLYMCDDHTAVAGNDY

SEQ ID NO: 61898 - DNA, 975 bp, Triticum aestivum
  misc_feature (1)..(975): Ceres Seq. ID no. 15174194
acaccagtcacactcacacgggttcagacacatcgcctcgcctcggcccgctgttcgccgccaccagctagctagtccagcgccaccgccaggcagcccacggccgcagcaatggcgcgtctcgccaccatcctcagcttcggggaccacgccgaggagggcgccggcgccttcacggagccgcaggaggactaccagcaagaacacgacgacgacgacgacgcggcgtcggacgccagcggcgacagcttcgagttcgcgttcgcgcggccgctggcgccggcgggcggggaggcgctggccgacgacctcttcgcgcacggccgcatcctcccggcctacccggtcttccaccgccgccaggcccacgacgacgacgcctcggcctcggccacctccgcgacggcgccgccctcgccggacacgtactgcgcgtgggcgccgcggtccgcgccggggtcgcccgcgcgcgaaccggccgccttccccaagagcgcgtccacgggcacgggcgaggccgcgcgccgcttccgcctgcgcgacatcctcggctccggcggccgctcccacagcgacggcaaggagaagttcctcttcctccagccgactcccgccaaacccaagtccaagacgagcgcattatccgccgcgtcggctccggccaacaagaagacttcgcagcagaagcagggcaagaagaagggcgcggccgccgctccgacggagatggacatggccaccgcgcacaggctcttctacagcaagcccggagccgcggccggccccggcggcgagaggacgacgacgacgacgaaaaagtcgtacctgccctaccggccggccatcgtcggcttcttcgccaccgcgcacgcgctgcgccccaagcaccacccctactagccatcacatcccatcccctgctccgctgctgccacgataaatctcatcaaattaaattagttcgttaattcgttc

SEQ ID NO: 61899 - protein, 312 aa, Triticum aestivum
  peptide (1)..(312): Ceres Seq. ID no. 15174195
  misc_feature (16)..(289): Pfam Name: APC basic domain Pfam Description: APC basic domain
  misc_feature (19)..(300): Homolog of NCBI NO: 6649242 NR Description: splicing coactivator subunit SRm300 [Homo sapiens]
  misc_feature (16)..(308): Homolog of NCBI NO: 6649242 NR Description: splicing coactivator subunit SRm300 [Homo sapiens]
  misc_feature (19)..(300): Homolog of NCBI NO: 7512967 NR Description: hypothetical protein KIAA0324 - human (fragment)
  misc_feature (19)..(300): Homolog of NCBI NO: 6634015 NR Description: KIAA0324 protein [Homo sapiens]
  misc_feature (16)..(312): Homolog of NCBI NO: 19923466 NR Description: splicing coactivator subunit SRm300
  misc_feature (13)..(268): Homolog of NCBI NO: 25143299 NR Description: pre-mRNA splicing SR protein related (68.2 kD)
  misc_feature (19)..(300): Homolog of NCBI NO: 5821151 NR Description: RNA binding protein [Homo sapiens]
  misc_feature (16)..(312): Homolog of NCBI NO: 7512967 NR Description: hypothetical protein KIAA0324 - human (fragment)
  misc_feature (16)..(312): Homolog of NCBI NO: 6634015 NR Description: KIAA0324 protein [Homo sapiens]
  misc_feature (16)..(312): Homolog of NCBI NO: 5821151 NR Description: RNA binding protein [Homo sapiens]
HQSHSHGFRHIASPRPAVRRHQLASPAPPPGSPRPQQWRVSPPSSASGTTPRRAPAPSRSRRRTTSKNTTTTTTRRRTPAATASSSRSRGRWRRRAGRRWPTTSSRTAASSRPTRSSTAARPTTTTPRPRPPPRRRRPRRTRTARGRRGPRRGRPRANRPPSPRARPRARARPRAASACATSSAPAAAPTATARRSSSSSSRLPPNPSPRRAHYPPRRLRPTRRLRSRSRARRRARPPLRRRWTWPPRTGSSTASPEPRPAPAARGRRRRRKSRTCPTGRPSSASSPPRTRCAPSTTPTSHHIPSPAPLLPR

SEQ ID NO: 61900 - protein, 262 aa, Triticum aestivum
  peptide (1)..(262): Ceres Seq. ID no. 15174196
MARLATILSFGDHAEEGAGAFTEPQEDYQQEHDDDDDAASDASGDSFEFAFARPLAPAGGEALADDLFAHGRILPAYPVFHRRQAHDDDASASATSATAPPSPDTYCAWAPRSAPGSPAREPAAFPKSASTGTGEAARRFRLRDILGSGGRSHSDGKEKFLFLQPTPAKPKSKTSALSAASAPANKKTSQQKQGKKKGAAAAPTEMDMATAHRLFYSKPGAAAGPGGERTTTTTKKSYLPYRPAIVGFFATAHALRPKHHPY

SEQ ID NO: 61901 - DNA, 968 bp, Triticum aestivum
  misc_feature (1)..(968): Ceres Seq. ID no. 15173586
ctcttgagtttaccttattgcttctgttcttttgatgtttacgcaggagcagcggctcgtgcatggacagctaacacctgtacgcttctgaatatgagccagtaaaataccccggaaagaaataaaagttgtgcagctcccaagatcaatgagcagtaccaatcccccttccgcgaccagccatgttgccctcacacgccatccgctggagcatggatgcgggctctctgaatggcggtccagatgcagaggaactgactccacgagtttaaaaaacgggcttcttcaggcatcagctccatccatccccttgtgctgcctctgcccgatgtcgacgacggtgcaggagccgccgcacgtcctggccgtggacgacagcctcgtcgaccgcgtcgtcatctccaggctcctccgcagctccaagtacagagtgacgacggtggacagcgggaagaaggcgctggaggtgctgagcctgggccacgagagcgtgcagctgatcatcacggactactgcatgccggagatgaccggctacgacctgctgaagcgggtcaaggagtcggcagagctgcgcggcatcccggtggtgatcatgtcgtcggagaactcgccgtccaggatccgccggtgcctcgacgagggcgcggaggagttcctcatcaagccggtgcgcccctccgacgtctcccgcctctgcaaccgggccatcgccgccatgcccatgcggtagcaacggccggtcggtgccgtgctgctgatcggtgctagcctgctagcttgctaatccaatcctccctccctcctctgctgagttctcactgacgagatatccccatgtacatgcgtctgctgcagggttgcatcccatggtgaaatcaaaactgaatgaattccatgacaacccacggaatgtatgtattccttacttgccaatgtatgaaatccaccactaactgtgaaacagt

SEQ ID NO: 61902 - protein, 194 aa, Triticum aestivum
  peptide (1)..(194): Ceres Seq. ID no. 15173587
  misc_feature (69)..(179): Pfam Name: Response regulator receiver domain Pfam Description: Response regulator receiver domain
  misc_feature (70)..(110): Homolog of NCBI NO: 12060384 NR Description: response regulator 4 [Zea mays]
  misc_feature (115)..(183): Homolog of NCBI NO: 12060384 NR Description: response regulator 4 [Zea mays]
  misc_feature (68)..(188): Homolog of NCBI NO: 34901288 NR Description: similar to response regulator
  misc_feature (105)..(183): Homolog of NCBI NO: 12060388 NR Description: response regulator 6 [Zea mays]
  misc_feature (36)..(113): Homolog of NCBI NO: 12060388 NR Description: response regulator 6 [Zea mays]
  misc_feature (70)..(186): Homolog of NCBI NO: 11358973 NR Description: response regulator Cip1 [imported] - maize
  misc_feature (69)..(188): Homolog of NCBI NO: 32489852 NR Description: OSJNBb0065J09.12 [Oryza sativa (japonica
  misc_feature (69)..(188): Homolog of NCBI NO: 11041692 NR Description: response regulator [Zea mays]
  misc_feature (36)..(186): Homolog of NCBI NO: 11358972 NR Description: repsonse regulator ZmRR2 [imported] - maize
  misc_feature (53)..(186): Homolog of NCBI NO: 32488053 NR Description: OSJNBa0018M05.2 [Oryza sativa (japonica
MSSTNPPSATSHVALTRHPLEHGCGLSEWRSRCRGTDSTSLKNGLLQASAPSIPLCCLCPMSTTVQEPPHVLAVDDSLVDRVVISRLLRSSKYRVTTVDSGKKALEVLSLGHESVQLIITDYCMPEMTGYDLLKRVKESAELRGIPVVIMSSENSPSRIRRCLDEGAEEFLIKPVRPSDVSRLCNRAIAAMPMR

SEQ ID NO: 61903 - protein, 134 aa, Triticum aestivum
  peptide (1)..(134): Ceres Seq. ID no. 15173588
  misc_feature (9)..(119): Pfam Name: Response regulator receiver domain Pfam Description: Response regulator receiver domain
  misc_feature (10)..(50): Homolog of NCBI NO: 12060384 NR Description: response regulator 4 [Zea mays]
  misc_feature (55)..(123): Homolog of NCBI NO: 12060384 NR Description: response regulator 4 [Zea mays]
  misc_feature (8)..(128): Homolog of NCBI NO: 34901288 NR Description: similar to response regulator
  misc_feature (45)..(123): Homolog of NCBI NO: 12060388 NR Description: response regulator 6 [Zea mays]
  misc_feature (1)..(53): Homolog of NCBI NO: 12060388 NR Description: response regulator 6 [Zea mays]
  misc_feature (10)..(126): Homolog of NCBI NO: 11358973 NR Description: response regulator Cip1 [imported] - maize
  misc_feature (9)..(128): Homolog of NCBI NO: 32489852 NR Description: OSJNBb0065J09.12 [Oryza sativa (japonica
  misc_feature (9)..(128): Homolog of NCBI NO: 11041692 NR Description: response regulator [Zea mays]
  misc_feature (1)..(126): Homolog of NCBI NO: 11358972 NR Description: repsonse regulator ZmRR2 [imported] - maize
  misc_feature (1)..(126): Homolog of NCBI NO: 32488053 NR Description: OSJNBa0018M05.2 [Oryza sativa (japonica
MSTTVQEPPHVLAVDDSLVDRVVISRLLRSSKYRVTTVDSGKKALEVLSLGHESVQLIITDYCMPEMTGYDLLKRVKESAELRGIPVVIMSSENSPSRIRRCLDEGAEEFLIKPVRPSDVSRLCNRAIAAMPMR

SEQ ID NO: 61904 - DNA, 776 bp, Triticum aestivum
  misc_feature (1)..(776): Ceres Seq. ID no. 15174176
atcctacccagtgcaattgatcaccattaactacctctaattagttcttccttttacgtacgattcgagcagctttgagcgctaccaagtcgaccatctcgtccaacacgagcgccatcagctgcctgcagcagcacgaccagagcaaggcggcggcggcgaggccgatgacactcacgctcggagagccgcgggagaaggacggccgccaccagcagctcaacagcgccatgcagctccaccaccaccatcaggagcagcagcacttcatcacctcgctgctgcaccagaacaacaacggcaacggcaacaacaacatcctgtcgtgctcgtcggcgtgtgctccagcgggttgccgtctgccggggcggccaacggcgaggtctccgaccagaacaacaacagcaaccacggcggcggcaacaacaacaataacatgcatctctttgaggtggacttcatgtagacgaccgatcgacgcaggtgagcttggagatccctacatggagtcatggagtggtgaccagcctaagcctagcactgtaccaacagtgtcctttaattaatttgtgtgtaggtaaaaaaaaggagagcaaaaagaccttaagggtatagtccatagtctcaaagtgctgagatcagctagcaaaggctgtgcaacctagcatgcttgtgcttggctcaagcatgcgtatgcctttctttcaactttcttccctgcggtgctcctcctatagtgctgcaagcaagcatgcctttctgccattttctgttac

SEQ ID NO: 61905 - protein, 132 aa, Triticum aestivum
  peptide (1)..(132): Ceres Seq. ID no. 15174177
  misc_feature (1)..(61): Homolog of NCBI NO: 5931782 NR Description: SBP-domain protein 3 [Zea mays]
  misc_feature (1)..(71): Homolog of NCBI NO: 5931784 NR Description: SBP-domain protein 4 [Zea mays]
MTLTLGEPREKDGRHQQLNSAMQLHHHHQEQQHFITSLLHQNNNGNGNNNILSCSSACAPAGCRLPGRPTARSPTRTTTATTAAATTTITCISLRWTSCRRPIDAGELGDPYMESWSGDQPKPSTVPTVSFN

SEQ ID NO: 61906 - protein, 111 aa, Triticum aestivum
  peptide (1)..(111): Ceres Seq. ID no. 15174178
  misc_feature (1)..(40): Homolog of NCBI NO: 5931782 NR Description: SBP-domain protein 3 [Zea mays]
  misc_feature (1)..(50): Homolog of NCBI NO: 5931784 NR Description: SBP-domain protein 4 [Zea mays]
MQLHHHHQEQQHFITSLLHQNNNGNGNNNILSCSSACAPAGCRLPGRPTARSPTRTTTATTAAATTTITCISLRWTSCRRPIDAGELGDPYMESWSGDQPKPSTVPTVSFN

SEQ ID NO: 61907 - DNA, 933 bp, Triticum aestivum
  misc_feature (1)..(933): Ceres Seq. ID no. 15173668
atagcttggctagccagcactgtccatggccatggcatttcgcctcattatactcgcactagtaccgctgctggcgaccgtgctcgctgctccttcccttcctagcagcaatgacactgacctcgacgcgctgcttgcgttcaaggcgcagctgtccgacccactcggcgtcctccgcaacagttgggctaccaatgtgtccttctgccgctgggtaggcgtgtcatgcggccggcgccaaagccatcgcgtcaccgccctggagttgccgggcgtgcccctccatggtcagctcgcccctcaccttggaaacctctccttcctctctgttctcaacctcaccagctccaacctcgtcggctccatccccgccgacctcggccggctgcgtcgccttaggcggctcaatcttgcacacaacaacttgtctcactccattccatcgacctttgggaaccttacaggtctccaagttcttgatgtgagcggcaacatgctgtctggtcaaatcccaacggagatgcaaggattgcgcaaccttgcctacatagctctgcatgccaactacttgagtggtcagtgttggcaataatcttgtcttaaatgttttggtgtcacgtggtaagtttagttagctaggattaggaaggccgtgtagtttttggttagtcctccatgtaataggcgtgtccctatgtgtgctaaagcgcacgtagtacgagtccggtttggattagagtttagttggcgtgtctagtataggcaatactagtatgagtccgattagaatatagggtcagattaagatagagttgaacgtgagggcttggtcctgcgtgtatatatacacaggcagggctagttattgtaccgtgagtggagaaaaaccagaaaagaaataaagagaagagaggcacaacacgtgcctttggc

SEQ ID NO: 61908 - protein, 188 aa, Triticum aestivum
  peptide (1)..(188): Ceres Seq. ID no. 15173669
  misc_feature (1)..(184): Homolog of NCBI NO: 15241369 NR Description: leucine-rich repeat transmembrane protein kinase,
  misc_feature (3)..(185): Homolog of NCBI NO: 30421165 NR Description: putative receptor kinase [Hordeum vulgare]
  misc_feature (1)..(185): Homolog of NCBI NO: 37533650 NR Description: putative Receptor-like protein kinase
  misc_feature (7)..(184): Homolog of NCBI NO: 34911422 NR Description: putative leucine rich repeat containing protein
  misc_feature (1)..(185): Homolog of NCBI NO: 34911420 NR Description: putative leucine rich repeat containing protein
  misc_feature (1)..(184): Homolog of NCBI NO: 38605794 NR Description: OSJNBb0045P24.8 [Oryza sativa (japonica
  misc_feature (1)..(184): Homolog of NCBI NO: 34904254 NR Description: Oryza sativa leucine rich repeat containing
  misc_feature (1)..(185): Homolog of NCBI NO: 6979333 NR Description: leucine rich repeat containing protein kinase
  misc_feature (8)..(184): Homolog of NCBI NO: 34899546 NR Description: putative protein kinase Xa21
  misc_feature (1)..(184): Homolog of NCBI NO: 37532306 NR Description: putative leucine rich repeat containing protein
MAMAFRLIILALVPLLATVLAAPSLPSSNDTDLDALLAFKAQLSDPLGVLRNSWATNVSFCRWVGVSCGRRQSHRVTALELPGVPLHGQLAPHLGNLSFLSVLNLTSSNLVGSIPADLGRLRRLRRLNLAHNNLSHSIPSTFGNLTGLQVLDVSGNMLSGQIPTEMQGLRNLAYIALHANYLSGQCWQ

SEQ ID NO: 61909 - protein, 186 aa, Triticum aestivum
  peptide (1)..(186): Ceres Seq. ID no. 15173670
  misc_feature (1)..(182): Homolog of NCBI NO: 15241369 NR Description: leucine-rich repeat transmembrane protein kinase,
  misc_feature (1)..(183): Homolog of NCBI NO: 30421165 NR Description: putative receptor kinase [Hordeum vulgare]
  misc_feature (1)..(183): Homolog of NCBI NO: 37533650 NR Description: putative Receptor-like protein kinase
  misc_feature (5)..(182): Homolog of NCBI NO: 34911422 NR Description: putative leucine rich repeat containing protein
  misc_feature (1)..(183): Homolog of NCBI NO: 34911420 NR Description: putative leucine rich repeat containing protein
  misc_feature (1)..(182): Homolog of NCBI NO: 38605794 NR Description: OSJNBb0045P24.8 [Oryza sativa (japonica
  misc_feature (1)..(182): Homolog of NCBI NO: 34904254 NR Description: Oryza sativa leucine rich repeat containing
  misc_feature (1)..(183): Homolog of NCBI NO: 6979333 NR Description: leucine rich repeat containing protein kinase
  misc_feature (6)..(182): Homolog of NCBI NO: 34899546 NR Description: putative protein kinase Xa21
  misc_feature (1)..(182): Homolog of NCBI NO: 37532306 NR Description: putative leucine rich repeat containing protein
MAFRLIILALVPLLATVLAAPSLPSSNDTDLDALLAFKAQLSDPLGVLRNSWATNVSFCRWVGVSCGRRQSHRVTALELPGVPLHGQLAPHLGNLSFLSVLNLTSSNLVGSIPADLGRLRRLRRLNLAHNNLSHSIPSTFGNLTGLQVLDVSGNMLSGQIPTEMQGLRNLAYIALHANYLSGQCWQ

SEQ ID NO: 61910 - DNA, 619 bp, Triticum aestivum
  misc_feature (1)..(619): Ceres Seq. ID no. 15174172
cctgctaagggatggtcagattacagaacccctgtgaaggggctgtacctctgcggcagcggtgcgcacccaggcggcggggtgatgggtgccccgggccgcaatgctgctgccgtggttttggatgatctcaaggcaagatagatgcaattaatggaagatggaaatggcagctgacactagggtagcattttcaagcacaaggctgcaaaagcagcaccagtgtgtaatctcttgtacggaaatgcaaaccttgtcgttaagccatctggtagagaccattttgtcatgcatacttacatgataaaaaagatgagacatgagaagcattttctgaatgaattgttgcagctgttctcattttggctctcttatcggagggctcaaagggattaattctcagttatgcggttacatctattttcttctgtacgaagtagtttctcaatgcagtctgccgaaccttcaatttggttaaatgtgaagaggagtagagtttgcgaagtatagttagatattaactgtgagtgctatgctcatctgtacatttgaactgccatccagtaatctgtgtcgcctagcttgtctgcagacttgaactgcgacctaggtaccttat

SEQ ID NO: 61911 - protein, 47 aa, Triticum aestivum
  peptide (1)..(47): Ceres Seq. ID no. 15174173
  misc_feature (1)..(43): Homolog of NCBI NO: 27381697 NR Description: blr6586 [Bradyrhizobium japonicum]
  misc_feature (6)..(46): Homolog of NCBI NO: 22761240 NR Description: unnamed protein product [Homo sapiens]
  misc_feature (6)..(46): Homolog of NCBI NO: 14249308 NR Description: hypothetical protein MGC13047 [Homo sapiens]
  misc_feature (1)..(43): Homolog of NCBI NO: 22965404 NR Description: hypothetical protein [Rhodopseudomonas palustris]
  misc_feature (1)..(45): Homolog of NCBI NO: 15920768 NR Description: 517aa long conserved hypothetical protein
  misc_feature (1)..(45): Homolog of NCBI NO: 15899171 NR Description: Phytoene dehydrogenase related protein
  misc_feature (1)..(44): Homolog of NCBI NO: 13473167 NR Description: phytoene dehydrogenase [Mesorhizobium loti]
  misc_feature (1)..(39): Homolog of NCBI NO: 10177621 NR Description: phytoene dehydrogenase-like [Arabidopsis thaliana]
  misc_feature (1)..(45): Homolog of NCBI NO: 18423042 NR Description: amine oxidase-related [Arabidopsis thaliana]
  misc_feature (1)..(45): Homolog of NCBI NO: 17979255 NR Description: AT5g49550/K6M13_10 [Arabidopsis thaliana]
PAKGWSDYRTPVKGLYLCGSGAHPGGGVMGAPGRNAAAVVLDDLKAR

SEQ ID NO: 61912 - protein, 47 aa, Triticum aestivum
  peptide (1)..(47): Ceres Seq. ID no. 15174174
MEMAADTRVAFSSTRLQKQHQCVISCTEMQTLSLSHLVETILSCILT

SEQ ID NO: 61913 - protein, 46 aa, Triticum aestivum
  peptide (1)..(46): Ceres Seq. ID no. 15174175
MNCCSCSHFGSLIGGLKGINSQLCGYIYFLLYEVVSQCSLPNLQFG

SEQ ID NO: 61914 - DNA, 689 bp, Triticum aestivum
  misc_feature (1)..(689): Ceres Seq. ID no. 15173785
acctcccacaaccgctccgctacctcctcttcttgattcctgccactgtccgcctctcccgcccggccctcgccatggacggcgccgacagcatgcggttccagcggcaggcctcctgctcctgcgccccctccatgtcccgcggctacgtccgcagcggcttcgacctcgacgacgacgacttcgacggcttcgccgacgggcacttcgacaaggccggcgtcgtccagcacgggagggcgccgcccaccgccgcgtcgcgcgggtgcggcacgaagctgaggggcctgtggcggaagatcgtccgggagaagaagaggatactgctctgctccaccggctgcgtgcccgtcggcggggcctcggcggcggcgcgggagccctacgacgcgtacagctacgcgcagaacttcgacgacggcgcggcctgggtggagcccgacaacctctcgcgctccttctccgcgcgcttcgccgtcccctccagggtcctgcagcgggtcgccgtgtagacacgacacgacacgacccgccgccggcggctgcgaccgcggccgaccgtcgtttctttcttttgttttcgttctttgtttcttgttcttctcatctctgtctcagttttggagtcgtcaacaactgtgaaaaaggaatgttctttgcccgcctgtaaatggtagcccctcaatccc

SEQ ID NO: 61915 - protein, 222 aa, Triticum aestivum
  peptide (1)..(222): Ceres Seq. ID no. 15173786
  misc_feature (22)..(181): Homolog of NCBI NO: 23018055 NR Description: hypothetical protein [Thermobifida fusca]
PPTTAPLPPLLDSCHCPPLPPGPRHGRRRQHAVPAAGLLLLRPLHVPRLRPQRLRPRRRRLRRLRRRALRQGRRRPAREGAAHRRVARVRHEAEGPVAEDRPGEEEDTALLHRLRARRRGLGGGAGALRRVQLRAELRRRRGLGGARQPLALLLRALRRPLQGPAAGRRVDTTRHDPPPAAATAADRRFFLLFSFFVSCSSHLCLSFGVVNNCEKGMFFARL

SEQ ID NO: 61916 - protein, 169 aa, Triticum aestivum
  peptide (1)..(169): Ceres Seq. ID no. 15173787
  misc_feature (22)..(90): Homolog of NCBI NO: 34906222 NR Description: P0666G04.17 [Oryza sativa (japonica
  misc_feature (48)..(169): Homolog of NCBI NO: 34906222 NR Description: P0666G04.17 [Oryza sativa (japonica
LPQPLRYLLFLIPATVRLSRPALAMDGADSMRFQRQASCSCAPSMSRGYVRSGFDLDDDDFDGFADGHFDKAGVVQHGRAPPTAASRGCGTKLRGLWRKIVREKKRILLCSTGCVPVGGASAAAREPYDAYSYAQNFDDGAAWVEPDNLSRSFSARFAVPSRVLQRVAV

SEQ ID NO: 61917 - protein, 145 aa, Triticum aestivum
  peptide (1)..(145): Ceres Seq. ID no. 15173788
  misc_feature (1)..(66): Homolog of NCBI NO: 34906222 NR Description: P0666G04.17 [Oryza sativa (japonica
  misc_feature (24)..(145): Homolog of NCBI NO: 34906222 NR Description: P0666G04.17 [Oryza sativa (japonica
MDGADSMRFQRQASCSCAPSMSRGYVRSGFDLDDDDFDGFADGHFDKAGVVQHGRAPPTAASRGCGTKLRGLWRKIVREKKRILLCSTGCVPVGGASAAAREPYDAYSYAQNFDDGAAWVEPDNLSRSFSARFAVPSRVLQRVAV

SEQ ID NO: 61918 - DNA, 1021 bp, Triticum aestivum
  misc_feature (1)..(1021): Ceres Seq. ID no. 15173688
catttaagcttaaacccatgtcccctaacccccccgtaggtctccgtcccgaattccccattccccatctccctccctctccatggccgccgccgccgcttccatggcccgcaggctgctctcccccaccacctcctcgccgtccaccgccatacgcctcctcatctcccgccgcatcgcctccgccccgtccatcccgcacgccccggccgcggcggcgagggagatgctgcgcccggcggccgtcgcctcctcgtcctccttcctcctccgcggcgccgggggcgccaggggaatggcgcggcggccggggggcgacgggtactcccccgcgcggggcgggggcgggggcggggccggaggggaccgcgcgcccacggagatggcgccgctgttccccgggtgcgactacaagcactggctgatcgtcatggacaagcccggcggcgagggcgcctccaagcaccagatgatcgactgctacgtccagaccctcgccaaggtcctcggaagcgaggaggaggccaagaggaagatttacaacgtctcgtgcgagcgctacttcgggttcgggtgtgagattgatgaggagacatccaacaagcttgaagggattcctggtgttctgtttgtactccccgattcctatgtggaccctgaacacaaggactatggagccgagctgtttgtgaatggggagattgtgcagagatcacccgagaggcagaggagggtggagcccgttccgcagagagcgtcggacaggccgaggtacaacgacaggacccggtacgcgcgccggagggagaaccagcagcagcagcagcagcgatgatccaccacacgaccgagctagaggcaacctgctgtgctgttttcatcccctcgacacagcaagtagctggtattgcttggttttagcaatccgtttcatgttgctactactctgttatgtgtatgtatttgacgacttggagcttgaaactaagaagcttgatagcataaaagaattttagagctg

SEQ ID NO: 61919 - protein, 250 aa, Triticum aestivum
  peptide (1)..(250): Ceres Seq. ID no. 15173689
  misc_feature (20)..(243): Homolog of NCBI NO: 18400602 NR Description: expressed protein [Arabidopsis thaliana]
  misc_feature (18)..(250): Homolog of NCBI NO: 38636775 NR Description: putative DAG protein [Oryza sativa (japonica
  misc_feature (75)..(245): Homolog of NCBI NO: 15226934 NR Description: expressed protein [Arabidopsis thaliana]
  misc_feature (17)..(245): Homolog of NCBI NO: 15223247 NR Description: plastid protein -related [Arabidopsis thaliana]
  misc_feature (78)..(243): Homolog of NCBI NO: 21617909 NR Description: plastid protein [Arabidopsis thaliana]
  misc_feature (78)..(243): Homolog of NCBI NO: 25370552 NR Description: DAG protein homolog [imported] - Arabidopsis
  misc_feature (78)..(243): Homolog of NCBI NO: 15226108 NR Description: plastid protein [Arabidopsis thaliana]
  misc_feature (78)..(243): Homolog of NCBI NO: 2440029 NR Description: DAL1 protein [Arabidopsis thaliana]
  misc_feature (32)..(248): Homolog of NCBI NO: 38344141 NR Description: OSJNBa0041A02.8 [Oryza sativa (japonica
  misc_feature (18)..(245): Homolog of NCBI NO: 34897972 NR Description: putative plastid protein [Oryza sativa (japonica
MAAAAASMARRLLSPTTSSPSTAIRLLISRRIASAPSIPHAPAAAAREMLRPAAVASSSSFLLRGAGGARGMARRPGGDGYSPARGGGGGGAGGDRAPTEMAPLFPGCDYKHWLIVMDKPGGEGASKHQMIDCYVQTLAKVLGSEEEAKRKIYNVSCERYFGFGCEIDEETSNKLEGIPGVLFVLPDSYVDPEHKDYGAELFVNGEIVQRSPERQRRVEPVPQRASDRPRYNDRTRYARRRENQQQQQQR

SEQ ID NO: 61920 - protein, 243 aa, Triticum aestivum
  peptide (1)..(243): Ceres Seq. ID no. 15173690
  misc_feature (13)..(236): Homolog of NCBI NO: 18400602 NR Description: expressed protein [Arabidopsis thaliana]
  misc_feature (11)..(243): Homolog of NCBI NO: 38636775 NR Description: putative DAG protein [Oryza sativa (japonica
  misc_feature (68)..(238): Homolog of NCBI NO: 15226934 NR Description: expressed protein [Arabidopsis thaliana]
  misc_feature (10)..(238): Homolog of NCBI NO: 15223247 NR Description: plastid protein -related [Arabidopsis thaliana]
  misc_feature (71)..(236): Homolog of NCBI NO: 21617909 NR Description: plastid protein [Arabidopsis thaliana]
  misc_feature (71)..(236): Homolog of NCBI NO: 25370552 NR Description: DAG protein homolog [imported] - Arabidopsis
  misc_feature (71)..(236): Homolog of NCBI NO: 15226108 NR Description: plastid protein [Arabidopsis thaliana]
  misc_feature (71)..(236): Homolog of NCBI NO: 2440029 NR Description: DAL1 protein [Arabidopsis thaliana]
  misc_feature (25)..(241): Homolog of NCBI NO: 38344141 NR Description: OSJNBa0041A02.8 [Oryza sativa (japonica
  misc_feature (11)..(238): Homolog of NCBI NO: 34897972 NR Description: putative plastid protein [Oryza sativa (japonica
MARRLLSPTTSSPSTAIRLLISRRIASAPSIPHAPAAAAREMLRPAAVASSSSFLLRGAGGARGMARRPGGDGYSPARGGGGGGAGGDRAPTEMAPLFPGCDYKHWLIVMDKPGGEGASKHQMIDCYVQTLAKVLGSEEEAKRKIYNVSCERYFGFGCEIDEETSNKLEGIPGVLFVLPDSYVDPEHKDYGAELFVNGEIVQRSPERQRRVEPVPQRASDRPRYNDRTRYARRRENQQQQQQR

SEQ ID NO: 61921 - protein, 202 aa, Triticum aestivum
  peptide (1)..(202): Ceres Seq. ID no. 15173691
  misc_feature (1)..(195): Homolog of NCBI NO: 18400602 NR Description: expressed protein [Arabidopsis thaliana]
  misc_feature (1)..(202): Homolog of NCBI NO: 38636775 NR Description: putative DAG protein [Oryza sativa (japonica
  misc_feature (27)..(197): Homolog of NCBI NO: 15226934 NR Description: expressed protein [Arabidopsis thaliana]
  misc_feature (1)..(197): Homolog of NCBI NO: 15223247 NR Description: plastid protein -related [Arabidopsis thaliana]
  misc_feature (30)..(195): Homolog of NCBI NO: 21617909 NR Description: plastid protein [Arabidopsis thaliana]
  misc_feature (30)..(195): Homolog of NCBI NO: 25370552 NR Description: DAG protein homolog [imported] - Arabidopsis
  misc_feature (30)..(195): Homolog of NCBI NO: 15226108 NR Description: plastid protein [Arabidopsis thaliana]
  misc_feature (30)..(195): Homolog of NCBI NO: 2440029 NR Description: DAL1 protein [Arabidopsis thaliana]
  misc_feature (1)..(200): Homolog of NCBI NO: 38344141 NR Description: OSJNBa0041A02.8 [Oryza sativa (japonica
  misc_feature (1)..(197): Homolog of NCBI NO: 34897972 NR Description: putative plastid protein [Oryza sativa (japonica
MLRPAAVASSSSFLLRGAGGARGMARRPGGDGYSPARGGGGGGAGGDRAPTEMAPLFPGCDYKHWLIVMDKPGGEGASKHQMIDCYVQTLAKVLGSEEEAKRKIYNVSCERYFGFGCEIDEETSNKLEGIPGVLFVLPDSYVDPEHKDYGAELFVNGEIVQRSPERQRRVEPVPQRASDRPRYNDRTRYARRRENQQQQQQR

SEQ ID NO: 61922 - DNA, 658 bp, Triticum aestivum
  misc_feature (1)..(658): Ceres Seq. ID no. 15173842
tctccacatcaacgccagcaagaacaaatgatgcaactgatacaacaacttcagcagagaggattgaatcgccagcagattgcgcaggcgctgcagcgacttccccatcttaatgcccaacatctgaaccagcagcaacggcaacaacagcaagcatctccaaggatgccagcatctgcagcagggaagcccgcaaacacggcaggatcgcagccggcgacaccttcctcaggcggaaccgcggcgggtgcaaatgcgccgcatcaaggagggggaaattgcagccaacttattgggaagagaaagatacatgatttggtggcgcaggtggatccacagtgcgaggttgatccagaggtggaagatttgattctggagattgccgacgacttcattaacacagcggctgattttgcgtgcaggcttgcaaagcacaggaaatcgtcggttgtggaagccaaggatgtgctactgcacctgcagaagaattgtcacctgtccgctcctggtttctcacaggagaggatgtgaatgaatctgcagagaaattcagtgtaggctttggtagaattgtggcatttactttgaaaagcgtgaattgtatttgagatagatacttataccattataggtaaatgagaactgctatacggacgac

SEQ ID NO: 61923 - protein, 176 aa, Triticum aestivum
  peptide (1)..(176): Ceres Seq. ID no. 15173843
  misc_feature (99)..(166): Pfam Name: Transcription initiation factor TFIID subunit A Pfam Description: Transcription initiation factor TFIID subunit A
  misc_feature (40)..(171): Homolog of NCBI NO: 21240668 NR Description: hypothetical protein [Dictyostelium discoideum]
  misc_feature (57)..(176): Homolog of NCBI NO: 18044302 NR Description: TAF12 RNA polymerase II, TATA box binding protein
  misc_feature (57)..(176): Homolog of NCBI NO: 12841601 NR Description: unnamed protein product [Mus musculus]
  misc_feature (58)..(176): Homolog of NCBI NO: 3024710 NR Description: Transcription initiation factor TFIID 20/15 kDa
  misc_feature (1)..(174): Homolog of NCBI NO: 18398741 NR Description: conserved hypothetical protein [Arabidopsis
  misc_feature (18)..(174): Homolog of NCBI NO: 19115201 NR Description: hypothetical protein [Schizosaccharomyces pombe]
  misc_feature (37)..(160): Homolog of NCBI NO: 34908268 NR Description: P0446B05.23 [Oryza sativa (japonica
  misc_feature (5)..(174): Homolog of NCBI NO: 8778478 NR Description: F1L3.13 [Arabidopsis thaliana]
  misc_feature (5)..(174): Homolog of NCBI NO: 18394483 NR Description: expressed protein [Arabidopsis thaliana]
  misc_feature (5)..(174): Homolog of NCBI NO: 9665128 NR Description: Unknown protein [Arabidopsis thaliana]
SPHQRQQEQMMQLIQQLQQRGLNRQQIAQALQRLPHLNAQHLNQQQRQQQQASPRMPASAAGKPANTAGSQPATPSSGGTAAGANAPHQGGGNCSQLIGKRKIHDLVAQVDPQCEVDPEVEDLILEIADDFINTAADFACRLAKHRKSSVVEAKDVLLHLQKNCHLSAPGFSQERM

SEQ ID NO: 61924 - protein, 167 aa, Triticum aestivum
  peptide (1)..(167): Ceres Seq. ID no. 15173844
  misc_feature (90)..(157): Pfam Name: Transcription initiation factor TFIID subunit A Pfam Description: Transcription initiation factor TFIID subunit A
  misc_feature (31)..(162): Homolog of NCBI NO: 21240668 NR Description: hypothetical protein [Dictyostelium discoideum]
  misc_feature (48)..(167): Homolog of NCBI NO: 18044302 NR Description: TAF12 RNA polymerase II, TATA box binding protein
  misc_feature (48)..(167): Homolog of NCBI NO: 12841601 NR Description: unnamed protein product [Mus musculus]
  misc_feature (49)..(167): Homolog of NCBI NO: 3024710 NR Description: Transcription initiation factor TFIID 20/15 kDa
  misc_feature (1)..(165): Homolog of NCBI NO: 18398741 NR Description: conserved hypothetical protein [Arabidopsis
  misc_feature (9)..(165): Homolog of NCBI NO: 19115201 NR Description: hypothetical protein [Schizosaccharomyces pombe]
  misc_feature (28)..(151): Homolog of NCBI NO: 34908268 NR Description: P0446B05.23 [Oryza sativa (japonica
  misc_feature (1)..(165): Homolog of NCBI NO: 8778478 NR Description: F1L3.13 [Arabidopsis thaliana]
  misc_feature (1)..(165): Homolog of NCBI NO: 18394483 NR Description: expressed protein [Arabidopsis thaliana]
  misc_feature (1)..(165): Homolog of NCBI NO: 9665128 NR Description: Unknown protein [Arabidopsis thaliana]
MMQLIQQLQQRGLNRQQIAQALQRLPHLNAQHLNQQQRQQQQASPRMPASAAGKPANTAGSQPATPSSGGTAAGANAPHQGGGNCSQLIGKRKIHDLVAQVDPQCEVDPEVEDLILEIADDFINTAADFACRLAKHRKSSVVEAKDVLLHLQKNCHLSAPGFSQERM

SEQ ID NO: 61925 - protein, 166 aa, Triticum aestivum
  peptide (1)..(166): Ceres Seq. ID no. 15173845
  misc_feature (89)..(156): Pfam Name: Transcription initiation factor TFIID subunit A Pfam Description: Transcription initiation factor TFIID subunit A
  misc_feature (30)..(161): Homolog of NCBI NO: 21240668 NR Description: hypothetical protein [Dictyostelium discoideum]
  misc_feature (47)..(166): Homolog of NCBI NO: 18044302 NR Description: TAF12 RNA polymerase II, TATA box binding protein
  misc_feature (47)..(166): Homolog of NCBI NO: 12841601 NR Description: unnamed protein product [Mus musculus]
  misc_feature (48)..(166): Homolog of NCBI NO: 3024710 NR Description: Transcription initiation factor TFIID 20/15 kDa
  misc_feature (1)..(164): Homolog of NCBI NO: 18398741 NR Description: conserved hypothetical protein [Arabidopsis
  misc_feature (8)..(164): Homolog of NCBI NO: 19115201 NR Description: hypothetical protein [Schizosaccharomyces pombe]
  misc_feature (27)..(150): Homolog of NCBI NO: 34908268 NR Description: P0446B05.23 [Oryza sativa (japonica
  misc_feature (1)..(164): Homolog of NCBI NO: 8778478 NR Description: F1L3.13 [Arabidopsis thaliana]
  misc_feature (1)..(164): Homolog of NCBI NO: 18394483 NR Description: expressed protein [Arabidopsis thaliana]
  misc_feature (1)..(164): Homolog of NCBI NO: 9665128 NR Description: Unknown protein [Arabidopsis thaliana]
MQLIQQLQQRGLNRQQIAQALQRLPHLNAQHLNQQQRQQQQASPRMPASAAGKPANTAGSQPATPSSGGTAAGANAPHQGGGNCSQLIGKRKIHDLVAQVDPQCEVDPEVEDLILEIADDFINTAADFACRLAKHRKSSVVEAKDVLLHLQKNCHLSAPGFSQERM

SEQ ID NO: 61926 - protein, 121 aa, Triticum aestivum
  peptide (1)..(121): Ceres Seq. ID no. 15173846
  misc_feature (44)..(111): Pfam Name: Transcription initiation factor TFIID subunit A Pfam Description: Transcription initiation factor TFIID subunit A
  misc_feature (1)..(116): Homolog of NCBI NO: 21240668 NR Description: hypothetical protein [Dictyostelium discoideum]
  misc_feature (2)..(121): Homolog of NCBI NO: 18044302 NR Description: TAF12 RNA polymerase II, TATA box binding protein
  misc_feature (2)..(121): Homolog of NCBI NO: 12841601 NR Description: unnamed protein product [Mus musculus]
  misc_feature (3)..(121): Homolog of NCBI NO: 3024710 NR Description: Transcription initiation factor TFIID 20/15 kDa
  misc_feature (1)..(119): Homolog of NCBI NO: 18398741 NR Description: conserved hypothetical protein [Arabidopsis
  misc_feature (1)..(119): Homolog of NCBI NO: 19115201 NR Description: hypothetical protein [Schizosaccharomyces pombe]
  misc_feature (1)..(105): Homolog of NCBI NO: 34908268 NR Description: P0446B05.23 [Oryza sativa (japonica
  misc_feature (1)..(119): Homolog of NCBI NO: 8778478 NR Description: F1L3.13 [Arabidopsis thaliana]
  misc_feature (1)..(119): Homolog of NCBI NO: 18394483 NR Description: expressed protein [Arabidopsis thaliana]
  misc_feature (1)..(119): Homolog of NCBI NO: 9665128 NR Description: Unknown protein [Arabidopsis thaliana]
MPASAAGKPANTAGSQPATPSSGGTAAGANAPHQGGGNCSQLIGKRKIHDLVAQVDPQCEVDPEVEDLILEIADDFINTAADFACRLAKHRKSSVVEAKDVLLHLQKNCHLSAPGFSQERM

SEQ ID NO: 61927 - DNA, 636 bp, Triticum aestivum
  misc_feature (1)..(636): Ceres Seq. ID no. 15173826
gcagcgaagcgcccgaaccgattcgagtgacactcctcttttttacctccctccctccctcccaaagtccaaaccctagccggctagacctcgcgatccaatccacatctaacccacccgtagagatttcggcggccgatgtctccgctgtcgccgccgcggtctccacgccccctcttgtactagcagtcagccagcgacctccctcacagcctaaaaatccacgccgtagcgacgactcgagggtcggacggcaggcggccatgagcagcgcgttcagcgaggagatactcgccgacaagctcgccaagctcaacaacacgcagcagtgcatcgaaacgctgtcgcattggtgcatttaccatcggaaggatgcagagctaattgtccaaacatgggccaagcagttccataattctggaaatgaacagaaggtccctttcctttatctggctaatgacatcctacagaacagtaagcgcatctacaaagttgaatcctcgatgttgattttgtatttgaactaagttcatgcccatgattcggtggatttgccatgaatttggttaagcttgcagtgatgtggcctcctgtttggaaaaattgaatattctgcctatcagtggtttcaaactc

SEQ ID NO: 61928 - protein, 174 aa, Triticum aestivum
  peptide (1)..(174): Ceres Seq. ID no. 15173827
  misc_feature (90)..(160): Homolog of NCBI NO: 14603356 NR Description: Unknown (protein for MGC:19513) [Homo sapiens]
  misc_feature (90)..(160): Homolog of NCBI NO: 33876422 NR Description: Unknown (protein for IMAGE:2967326) [Homo sapiens]
  misc_feature (90)..(160): Homolog of NCBI NO: 26375530 NR Description: unnamed protein product [Mus musculus]
  misc_feature (90)..(174): Homolog of NCBI NO: 24655915 NR Description: CG9018-PA [Drosophila melanogaster]
  misc_feature (90)..(160): Homolog of NCBI NO: 29124544 NR Description: Similar to RIKEN cDNA 2610304G08 gene [Danio
  misc_feature (90)..(174): Homolog of NCBI NO: 24655920 NR Description: CG9018-PB [Drosophila melanogaster]
  misc_feature (102)..(160): Homolog of NCBI NO: 32492177 NR Description: OSJNBb0034I13.7 [Oryza sativa (japonica
  misc_feature (88)..(160): Homolog of NCBI NO: 30688588 NR Description: expressed protein [Arabidopsis thaliana]
  misc_feature (88)..(160): Homolog of NCBI NO: 18424920 NR Description: expressed protein [Arabidopsis thaliana]
  misc_feature (88)..(160): Homolog of NCBI NO: 30682987 NR Description: conserved hypothetical protein [Arabidopsis
SEAPEPIRVTLLFFTSLPPSQSPNPSRLDLAIQSTSNPPVEISAADVSAVAAAVSTPPLVLAVSQRPPSQPKNPRRSDDSRVGRQAAMSSAFSEEILADKLAKLNNTQQCIETLSHWCIYHRKDAELIVQTWAKQFHNSGNEQKVPFLYLANDILQNSKRIYKVESSMLILYLN

SEQ ID NO: 61929 - protein, 87 aa, Triticum aestivum
  peptide (1)..(87): Ceres Seq. ID no. 15173828
  misc_feature (3)..(73): Homolog of NCBI NO: 14603356 NR Description: Unknown (protein for MGC:19513) [Homo sapiens]
  misc_feature (3)..(73): Homolog of NCBI NO: 33876422 NR Description: Unknown (protein for IMAGE:2967326) [Homo sapiens]
  misc_feature (3)..(73): Homolog of NCBI NO: 26375530 NR Description: unnamed protein product [Mus musculus]
  misc_feature (3)..(87): Homolog of NCBI NO: 24655915 NR Description: CG9018-PA [Drosophila melanogaster]
  misc_feature (3)..(73): Homolog of NCBI NO: 29124544 NR Description: Similar to RIKEN cDNA 2610304G08 gene [Danio
  misc_feature (3)..(87): Homolog of NCBI NO: 24655920 NR Description: CG9018-PB [Drosophila melanogaster]
  misc_feature (15)..(73): Homolog of NCBI NO: 32492177 NR Description: OSJNBb0034I13.7 [Oryza sativa (japonica
  misc_feature (1)..(73): Homolog of NCBI NO: 30688588 NR Description: expressed protein [Arabidopsis thaliana]
  misc_feature (1)..(73): Homolog of NCBI NO: 18424920 NR Description: expressed protein [Arabidopsis thaliana]
  misc_feature (1)..(73): Homolog of NCBI NO: 30682987 NR Description: conserved hypothetical protein [Arabidopsis
MSSAFSEEILADKLAKLNNTQQCIETLSHWCIYHRKDAELIVQTWAKQFHNSGNEQKVPFLYLANDILQNSKRIYKVESSMLILYLN

SEQ ID NO: 61930 - DNA, 920 bp, Triticum aestivum
  misc_feature (1)..(920): Ceres Seq. ID no. 15173858
aaagtaaccgtagtggaatggggtggagtagtggtggctagagtgtgccgggttcgttgcggagctcgcgaccagctctgccaaaagcgatccatgtctctttgaccccccacaccccacccccgtatactcccttcccttctcccatcacacttccattcgagacacactcacccttcgacctgtccgcctctcctatataaacgcacgtccaccgctccctgttcctcatcctcgttcccttgcactgcgccaacaaacaattaactacactctcactagctagctaggctaggccggggagggagaaggaggcgccaagatgttgaggatgcagcagcaggtggagggcgtggtgggcggcggcatcatggcggaggcggaggaggcggcggtgtacgagcgggtggctcgcatggccagcggcaacgcggtggtcgtcttcagcgccagcggctgctgcatgtgccacgtcgtcaagcgcctcctgcttggcctgggggtcggccccaccgtctacgagttggaccagatgggcggcgccgggcgagagatccaggcggcgctggcgcagctgctgccccccggacccggcgccggccaccaccagcagccgccagtgcccgtggtgttcgtcggcgggaggctcctgggcggcgtggagaaggtgatggcgtgccacatcaacggcacgctcgtcccgctcctcaaggacgccggcgcgctctggctctgagccgcgagctgcattgctttgctgtctcgccggccggccggaactgatggtggtggtgatcaacgacggcgtttactttgtgtgttggtcgtcttttcttttcttgtgccgtgcctgtggctgtggctgtgcgttgcatggtgtgttgagcttcactggctagtgagatgtagatatagttagc

SEQ ID NO: 61931 - protein, 137 aa, Triticum aestivum
  peptide (1)..(137): Ceres Seq. ID no. 15173859
  misc_feature (37)..(129): Pfam Name: Glutaredoxin Pfam Description: Glutaredoxin
  misc_feature (28)..(137): Homolog of NCBI NO: 15637350 NR Description: glutaredoxin [Tilia platyphyllos]
  misc_feature (32)..(135): Homolog of NCBI NO: 1532163 NR Description: similar to glutaredoxin encoded by GenBank
  misc_feature (27)..(137): Homolog of NCBI NO: 15234680 NR Description: glutaredoxin protein family [Arabidopsis
  misc_feature (27)..(137): Homolog of NCBI NO: 15234677 NR Description: glutaredoxin protein family [Arabidopsis
  misc_feature (27)..(137): Homolog of NCBI NO: 34914726 NR Description: P0560B06.28 [Oryza sativa (japonica
  misc_feature (32)..(137): Homolog of NCBI NO: 21537203 NR Description: glutaredoxin-like protein [Arabidopsis thaliana]
  misc_feature (14)..(137): Homolog of NCBI NO: 15232836 NR Description: glutaredoxin protein family [Arabidopsis
  misc_feature (28)..(137): Homolog of NCBI NO: 15241297 NR Description: glutaredoxin protein family [Arabidopsis
  misc_feature (16)..(137): Homolog of NCBI NO: 21740746 NR Description: OSJNBa0072K14.2 [Oryza sativa (japonica
  misc_feature (3)..(137): Homolog of NCBI NO: 33146704 NR Description: glutaredoxin-like protein [Oryza sativa (japonica
MLRMQQQVEGVVGGGIMAEAEEAAVYERVARMASGNAVVVFSASGCCMCHVVKRLLLGLGVGPTVYELDQMGGAGREIQAALAQLLPPGPGAGHHQQPPVPVVFVGGRLLGGVEKVMACHINGTLVPLLKDAGALWL

SEQ ID NO: 61932 - protein, 134 aa, Triticum aestivum
  peptide (1)..(134): Ceres Seq. ID no. 15173860
  misc_feature (34)..(126): Pfam Name: Glutaredoxin Pfam Description: Glutaredoxin
  misc_feature (25)..(134): Homolog of NCBI NO: 15637350 NR Description: glutaredoxin [Tilia platyphyllos]
  misc_feature (29)..(132): Homolog of NCBI NO: 1532163 NR Description: similar to glutaredoxin encoded by GenBank
  misc_feature (24)..(134): Homolog of NCBI NO: 15234680 NR Description: glutaredoxin protein family [Arabidopsis
  misc_feature (24)..(134): Homolog of NCBI NO: 15234677 NR Description: glutaredoxin protein family [Arabidopsis
  misc_feature (24)..(134): Homolog of NCBI NO: 34914726 NR Description: P0560B06.28 [Oryza sativa (japonica
  misc_feature (29)..(134): Homolog of NCBI NO: 21537203 NR Description: glutaredoxin-like protein [Arabidopsis thaliana]
  misc_feature (11)..(134): Homolog of NCBI NO: 15232836 NR Description: glutaredoxin protein family [Arabidopsis
  misc_feature (25)..(134): Homolog of NCBI NO: 15241297 NR Description: glutaredoxin protein family [Arabidopsis
  misc_feature (13)..(134): Homolog of NCBI NO: 21740746 NR Description: OSJNBa0072K14.2 [Oryza sativa (japonica
  misc_feature (1)..(134): Homolog of NCBI NO: 33146704 NR Description: glutaredoxin-like protein [Oryza sativa (japonica
MQQQVEGVVGGGIMAEAEEAAVYERVARMASGNAVVVFSASGCCMCHVVKRLLLGLGVGPTVYELDQMGGAGREIQAALAQLLPPGPGAGHHQQPPVPVVFVGGRLLGGVEKVMACHINGTLVPLLKDAGALWL

SEQ ID NO: 61933 - protein, 121 aa, Triticum aestivum
  peptide (1)..(121): Ceres Seq. ID no. 15173861
  misc_feature (21)..(113): Pfam Name: Glutaredoxin Pfam Description: Glutaredoxin
  misc_feature (12)..(121): Homolog of NCBI NO: 15637350 NR Description: glutaredoxin [Tilia platyphyllos]
  misc_feature (16)..(119): Homolog of NCBI NO: 1532163 NR Description: similar to glutaredoxin encoded by GenBank
  misc_feature (11)..(121): Homolog of NCBI NO: 15234680 NR Description: glutaredoxin protein family [Arabidopsis
  misc_feature (11)..(121): Homolog of NCBI NO: 15234677 NR Description: glutaredoxin protein family [Arabidopsis
  misc_feature (11)..(121): Homolog of NCBI NO: 34914726 NR Description: P0560B06.28 [Oryza sativa (japonica
  misc_feature (16)..(121): Homolog of NCBI NO: 21537203 NR Description: glutaredoxin-like protein [Arabidopsis thaliana]
  misc_feature (1)..(121): Homolog of NCBI NO: 15232836 NR Description: glutaredoxin protein family [Arabidopsis
  misc_feature (12)..(121): Homolog of NCBI NO: 15241297 NR Description: glutaredoxin protein family [Arabidopsis
  misc_feature (1)..(121): Homolog of NCBI NO: 21740746 NR Description: OSJNBa0072K14.2 [Oryza sativa (japonica
  misc_feature (1)..(121): Homolog of NCBI NO: 33146704 NR Description: glutaredoxin-like protein [Oryza sativa (japonica
MAEAEEAAVYERVARMASGNAVVVFSASGCCMCHVVKRLLLGLGVGPTVYELDQMGGAGREIQAALAQLLPPGPGAGHHQQPPVPVVFVGGRLLGGVEKVMACHINGTLVPLLKDAGALWL

SEQ ID NO: 61934 - DNA, 738 bp, Triticum aestivum
  misc_feature (1)..(738): Ceres Seq. ID no. 15173940
ggccaaggccgtttgcaccttatttcgccttacacctcaccatcgacttacatacttctgttggccggagccacacgagctagcaccaccgacaaacaataccttgctgttctgagctcgccgtcccgatggcaagcaccaacatggcgtcggccacctccagattcatgctggcggcgggcatccccagcggctccaacggcggcgtgggcagccgcgtcagcttcgtcccgtccaaccggctcggctggaagctcgtggcccgcgccgaggaggagccgactgccgccgcaccggcggaaccagcaccggccgcggaggagaaaccggaagccgccgtggccaccaaagagcccgccaaagccaagccgccgccaaggggacccaagaggggaaccaaggtgaagattctgaggagggagtcctactggtacaacgggaccggatccgtcgtcacggttgatcaggatcccaacacccgttacccggtggtggtgcgtttcgccaaggtgaactacgccggcgtgtcgaccaacaactacgccctggacgagatcaaggaggttgctgcttaagcgaacgaggctagctgccatgtgctccatccaatgtttgtatcagtagctcgtcgagtgacgatgtgaatgttagcctctcacaaaccttatgtgtaatacctctgcgattatatgtatttgcctgcttcctcatggacctaataatctccttctgttgctt

SEQ ID NO: 61935 - protein, 148 aa, Triticum aestivum; identical to SEQ ID NO: 56332
  peptide (1)..(148): Ceres Seq. ID no. 15173941
  misc_feature (86)..(147): Pfam Name: Photosystem I reaction centre subunit IV / PsaE Pfam Description: Photosystem I reaction centre subunit IV / PsaE
  misc_feature (88)..(148): Homolog of NCBI NO: 400867 NR Description: Photosystem I reaction center subunit IV
  misc_feature (31)..(148): Homolog of NCBI NO: 22091414 NR Description: putative photosystem I subunit PSI-E [Arabidopsis
  misc_feature (1)..(146): Homolog of NCBI NO: 2499966 NR Description: Photosystem I reaction center subunit IV A,
  misc_feature (6)..(146): Homolog of NCBI NO: 21555308 NR Description: Photosystem I reaction center subunit IV B,
  misc_feature (6)..(146): Homolog of NCBI NO: 15225331 NR Description: photosystem I reaction center subunit IV -related
  misc_feature (6)..(148): Homolog of NCBI NO: 30688100 NR Description: photosystem I subunit PSI-E - like protein
  misc_feature (6)..(148): Homolog of NCBI NO: 24030202 NR Description: putative photosystem I subunit PSI-E protein
  misc_feature (1)..(146): Homolog of NCBI NO: 34394725 NR Description: putative Photosystem I reaction center subunit IV
  misc_feature (1)..(148): Homolog of NCBI NO: 131176 NR Description: Photosystem I reaction center subunit IV,

SEQ ID NO: 61936 - protein, 143 aa, Triticum aestivum; identical to SEQ ID NO: 56333
  peptide (1)..(143): Ceres Seq. ID no. 15173942
  misc_feature (81)..(142): Pfam Name: Photosystem I reaction centre subunit IV / PsaE Pfam Description: Photosystem I reaction centre subunit IV / PsaE
  misc_feature (83)..(143): Homolog of NCBI NO: 400867 NR Description: Photosystem I reaction center subunit IV
  misc_feature (26)..(143): Homolog of NCBI NO: 22091414 NR Description: putative photosystem I subunit PSI-E [Arabidopsis
  misc_feature (1)..(141): Homolog of NCBI NO: 2499966 NR Description: Photosystem I reaction center subunit IV A,
  misc_feature (1)..(141): Homolog of NCBI NO: 21555308 NR Description: Photosystem I reaction center subunit IV B,
  misc_feature (1)..(141): Homolog of NCBI NO: 15225331 NR Description: photosystem I reaction center subunit IV -related
  misc_feature (1)..(143): Homolog of NCBI NO: 30688100 NR Description: photosystem I subunit PSI-E - like protein
  misc_feature (1)..(143): Homolog of NCBI NO: 24030202 NR Description: putative photosystem I subunit PSI-E protein
  misc_feature (1)..(141): Homolog of NCBI NO: 34394725 NR Description: putative Photosystem I reaction center subunit IV
  misc_feature (1)..(143): Homolog of NCBI NO: 131176 NR Description: Photosystem I reaction center subunit IV,

SEQ ID NO: 61937 - protein, 135 aa, Triticum aestivum; identical to SEQ ID NO: 56334
  peptide (1)..(135): Ceres Seq. ID no. 15173943
  misc_feature (73)..(134): Pfam Name: Photosystem I reaction centre subunit IV / PsaE Pfam Description: Photosystem I reaction centre subunit IV / PsaE
  misc_feature (75)..(135): Homolog of NCBI NO: 400867 NR Description: Photosystem I reaction center subunit IV
  misc_feature (18)..(135): Homolog of NCBI NO: 22091414 NR Description: putative photosystem I subunit PSI-E [Arabidopsis
  misc_feature (1)..(133): Homolog of NCBI NO: 2499966 NR Description: Photosystem I reaction center subunit IV A,
  misc_feature (1)..(133): Homolog of NCBI NO: 21555308 NR Description: Photosystem I reaction center subunit IV B,
  misc_feature (1)..(133): Homolog of NCBI NO: 15225331 NR Description: photosystem I reaction center subunit IV -related
  misc_feature (1)..(135): Homolog of NCBI NO: 30688100 NR Description: photosystem I subunit PSI-E - like protein
  misc_feature (1)..(135): Homolog of NCBI NO: 24030202 NR Description: putative photosystem I subunit PSI-E protein
  misc_feature (1)..(133): Homolog of NCBI NO: 34394725 NR Description: putative Photosystem I reaction center subunit IV
  misc_feature (1)..(135): Homolog of NCBI NO: 131176 NR Description: Photosystem I reaction center subunit IV,

SEQ ID NO: 61938 - DNA, 726 bp, Triticum aestivum
  misc_feature (1)..(726): Ceres Seq. ID no. 15172609
ttggatgatggaaaaaccagcaagcagcaagcgtagttagaaaagttgccgtagcgcgccctacggagttgtacaaagtcagcaaccgttttggggcgcaagcataggcaacacaggactgatgacggggtggggcgcgcagtgaactggttttctaaaaagattggaagatccggccaaagaaggtgatagccctgttcattcgttcccatggttcgatccttcccagtaaaacgcggcgtgttcgaatgatgatcgcttttacgcgagaaagggggaccaccctctaagcctaagtattcctcaatgaccgatagcgtacaagtatcgagagggataggcggaggaaggacaaccctgaagccatggaggaggacgatgttgatgaggttgctgagatcagggctgcccacttcgaggagtcgatgaagtatgcgcgccggagcgtgagcgacgccgacatccgcaagtaccaggcctttgcccagactctgcagcagtctcgtggattcggcagcgagttccgtttccctgatcagccggctgcgggcgcttcctctgccgctgcggccgacccttttgcttccgctgctgcagcagctgacgatgatgatttatatagctaaatcctttcgcgttcgtagatgttgtgctccggtacgcagtacacggaagaactatgttcttaagttaatattgtgatgcacagttaatcgttctgcccgc

SEQ ID NO: 61939 - protein, 86 aa, Triticum aestivum
  peptide (1)..(86): Ceres Seq. ID no. 15172610
  misc_feature (1)..(85): Homolog of NCBI NO: 11265337 NR Description: hypothetical protein DKFZp434K0126.1 - human
  misc_feature (1)..(86): Homolog of NCBI NO: 38455496 NR Description: cell division cycle protein 48 ['Chlorella'
  misc_feature (1)..(86): Homolog of NCBI NO: 30013699 NR Description: CDC48-like protein [Mirabilis jalapa]
  misc_feature (1)..(86): Homolog of NCBI NO: 1705678 NR Description: CELL DIVISION CYCLE PROTEIN 48 HOMOLOG (VALOSIN
  misc_feature (1)..(86): Homolog of NCBI NO: 2492504 NR Description: Cell division cycle protein 48 homolog
  misc_feature (1)..(86): Homolog of NCBI NO: 15231775 NR Description: CDC48 - like protein [Arabidopsis thaliana]
  misc_feature (1)..(86): Homolog of NCBI NO: 15232776 NR Description: transitional endoplasmic reticulum ATPase
  misc_feature (1)..(86): Homolog of NCBI NO: 11265361 NR Description: transitional endoplasmic reticulum ATPase -
  misc_feature (1)..(86): Homolog of NCBI NO: 18414193 NR Description: transitional endoplasmic reticulum ATPase
  misc_feature (1)..(86): Homolog of NCBI NO: 37534770 NR Description: putative endoplasmic reticulum membrane fusion
MEEDDVDEVAEIRAAHFEESMKYARRSVSDADIRKYQAFAQTLQQSRGFGSEFRFPDQPAAGASSAAAADPFASAAAAADDDDLYS

SEQ ID NO: 61940 - protein, 66 aa, Triticum aestivum
  peptide (1)..(66): Ceres Seq. ID no. 15172611
  misc_feature (1)..(65): Homolog of NCBI NO: 11265337 NR Description: hypothetical protein DKFZp434K0126.1 - human
  misc_feature (1)..(66): Homolog of NCBI NO: 38455496 NR Description: cell division cycle protein 48 ['Chlorella'
  misc_feature (1)..(66): Homolog of NCBI NO: 30013699 NR Description: CDC48-like protein [Mirabilis jalapa]
  misc_feature (1)..(66): Homolog of NCBI NO: 1705678 NR Description: CELL DIVISION CYCLE PROTEIN 48 HOMOLOG (VALOSIN
  misc_feature (1)..(66): Homolog of NCBI NO: 2492504 NR Description: Cell division cycle protein 48 homolog
  misc_feature (1)..(66): Homolog of NCBI NO: 15231775 NR Description: CDC48 - like protein [Arabidopsis thaliana]
  misc_feature (1)..(66): Homolog of NCBI NO: 15232776 NR Description: transitional endoplasmic reticulum ATPase
  misc_feature (1)..(66): Homolog of NCBI NO: 11265361 NR Description: transitional endoplasmic reticulum ATPase -
  misc_feature (1)..(66): Homolog of NCBI NO: 18414193 NR Description: transitional endoplasmic reticulum ATPase
  misc_feature (1)..(66): Homolog of NCBI NO: 37534770 NR Description: putative endoplasmic reticulum membrane fusion
MKYARRSVSDADIRKYQAFAQTLQQSRGFGSEFRFPDQPAAGASSAAAADPFASAAAAADDDDLYS

SEQ ID NO: 61941 - DNA, 603 bp, Triticum aestivum
  misc_feature (1)..(603): Ceres Seq. ID no. 15172643
atcgatatctctccccgctccgctccccatcacgaacagctggtctatcaatggcggaggagaccgagaccgagaagccgctcttctctccgacagatgtctcgctccacgcatccacgaaggactgctgggtcgtcatccatggcaaggtgtacgatgtgaccaagttcttggaggaccaccccggcggagaggatgtcctgctccatgcatctgcctctggggatgctacggaggcttttgaagatgtgggacacagcacatcagccatcagcatgatgagcagctacctgatcggaagcatcgaggactatgtgcctcccagtgcaacgaaggacgccacagctattggcagtgatgtgctgccagattccagaacaatgcagaggaacaaaggctctcccgctccaaacacatttctggacttcgtgctccctttatgtatgcttggcatggcctttgcagcttggtactacctaacattcgtggccgagagctagtgaattcggacaagattcatatcattgcacatttttacgttaatagtgttgctgcatcgatacattgagggaacataaacttggtcacagaaccatttgcttt

SEQ ID NO: 61942 - protein, 165 aa, Triticum aestivum
  peptide (1)..(165): Ceres Seq. ID no. 15172644
  misc_feature (27)..(102): Pfam Name: Cytochrome b5-like Heme/Steroid binding domain Pfam Description: Cytochrome b5-like Heme/Steroid binding domain
  misc_feature (27)..(158): Homolog of NCBI NO: 2647949 NR Description: cytochrome b5 [Olea europaea]
  misc_feature (25)..(158): Homolog of NCBI NO: 14719320 NR Description: cytochrome B5 [Oryza sativa]
  misc_feature (24)..(158): Homolog of NCBI NO: 37536104 NR Description: putative cytochrome [Oryza sativa (japonica
  misc_feature (24)..(158): Homolog of NCBI NO: 15225731 NR Description: cytochrome b5, putative [Arabidopsis thaliana]
  misc_feature (24)..(158): Homolog of NCBI NO: 1345925 NR Description: Cytochrome b5, seed isoform
  misc_feature (23)..(158): Homolog of NCBI NO: 25044825 NR Description: cytochrome b5 [Ananas comosus]
  misc_feature (27)..(165): Homolog of NCBI NO: 15239718 NR Description: cytochrome b5, putative [Arabidopsis thaliana]
  misc_feature (24)..(158): Homolog of NCBI NO: 1345882 NR Description: CYTOCHROME B5
  misc_feature (24)..(158): Homolog of NCBI NO: 1076621 NR Description: cytochrome b5 - common tobacco
  misc_feature (17)..(148): Homolog of NCBI NO: 40644254 NR Description: cytochrome b5 [Oryza sativa (japonica
RYLSPLRSPSRTAGLSMAEETETEKPLFSPTDVSLHASTKDCWVVIHGKVYDVTKFLEDHPGGEDVLLHASASGDATEAFEDVGHSTSAISMMSSYLIGSIEDYVPPSATKDATAIGSDVLPDSRTMQRNKGSPAPNTFLDFVLPLCMLGMAFAAWYYLTFVAES

SEQ ID NO: 61943 - protein, 149 aa, Triticum aestivum
  peptide (1)..(149): Ceres Seq. ID no. 15172645
  misc_feature (11)..(86): Pfam Name: Cytochrome b5-like Heme/Steroid binding domain Pfam Description: Cytochrome b5-like Heme/Steroid binding domain
  misc_feature (11)..(142): Homolog of NCBI NO: 2647949 NR Description: cytochrome b5 [Olea europaea]
  misc_feature (9)..(142): Homolog of NCBI NO: 14719320 NR Description: cytochrome B5 [Oryza sativa]
  misc_feature (8)..(142): Homolog of NCBI NO: 37536104 NR Description: putative cytochrome [Oryza sativa (japonica
  misc_feature (8)..(142): Homolog of NCBI NO: 15225731 NR Description: cytochrome b5, putative [Arabidopsis thaliana]
  misc_feature (8)..(142): Homolog of NCBI NO: 1345925 NR Description: Cytochrome b5, seed isoform
  misc_feature (7)..(142): Homolog of NCBI NO: 25044825 NR Description: cytochrome b5 [Ananas comosus]
  misc_feature (11)..(149): Homolog of NCBI NO: 15239718 NR Description: cytochrome b5, putative [Arabidopsis thaliana]
  misc_feature (8)..(142): Homolog of NCBI NO: 1345882 NR Description: CYTOCHROME B5
  misc_feature (8)..(142): Homolog of NCBI NO: 1076621 NR Description: cytochrome b5 - common tobacco
  misc_feature (1)..(132): Homolog of NCBI NO: 40644254 NR Description: cytochrome b5 [Oryza sativa (japonica
MAEETETEKPLFSPTDVSLHASTKDCWVVIHGKVYDVTKFLEDHPGGEDVLLHASASGDATEAFEDVGHSTSAISMMSSYLIGSIEDYVPPSATKDATAIGSDVLPDSRTMQRNKGSPAPNTFLDFVLPLCMLGMAFAAWYYLTFVAES

SEQ ID NO: 61944 - DNA, 982 bp, Triticum aestivum
  misc_feature (1)..(982): Ceres Seq. ID no. 15172622
acgggcaatccacgccgcggattgggaaacggtgaccgacgaccccatccggccatcttattagtagcacctacggcacaaggcaacaacgcacgcctctcccagcgcccaaacactccgctcggctgctagctgcgcgtccatacaaacgcagttacgcgcacaagtacagaaccgccccctcctcttccgggaggccggccggccggccagcccgctcctcccctcccatccacctctgtccttagcatggtgagggacaccggcggcgccctgcagctgctggcggtgcttctcctcgtcctggcgtccgagctcgccaccttcagctgcggccacaggatccccagggcggacgtcgccgcctggaagcgcggggcgacgccgacgggacgcacggcgtccaccacgacgacgacgacggccactcgtgccggcggcgcggcggcggcggcgctcggcgactccaagaggctggtgccgcaggggccgaacccgctgcacaactagcgccgcgcaggttcttcctcgctcccatttttctcgcgcggaagaacgccggctatctagcgagcgactgagtagtgtgtggacgatacaatcacatatgcagtgatgtaactgtaattagctagcccattagatcgagctccggagattgcatccaaagaaatagtgtaaattacatgtacgatgtatcttcttcttcctccatgattttcactacttctttggagcaaagatctgaaacagcaggacaattattgattgactgattgattgattgggagcttgctgcagccctgtccctgcgagagcttggagcggtcaatggctgtcctcagtgtttaatttcggagggcgtttagggtcatttcgcgttggccaaggcgtggcaagcggacaagggcgccacgacaagcgggtgctttgtcacgccatggctaaaatatgattgatcctcactagcctttttgtttgc

SEQ ID NO: 61945 - protein, 86 aa, Triticum aestivum
  peptide (1)..(86): Ceres Seq. ID no. 15172623
  misc_feature (2)..(75): Homolog of NCBI NO: 38346763 NR Description: OSJNBa0081C01.14 [Oryza sativa (japonica
MVRDTGGALQLLAVLLLVLASELATFSCGHRIPRADVAAWKRGATPTGRTASTTTTTTATRAGGAAAAALGDSKRLVPQGPNPLHN

SEQ ID NO: 61946 - protein, 43 aa, Triticum aestivum
  peptide (1)..(43): Ceres Seq. ID no. 15172624
TGNPRRGLGNGDRRPHPAILLVAPTAQGNNARLSQRPNTPLGC

SEQ ID NO: 61947 - DNA, 863 bp, Triticum aestivum
  misc_feature (1)..(863): Ceres Seq. ID no. 12624376
aaagatcggtcttttcaacagtcagtgagtggtgaaagaaaacaaaagaggtttaactatggtgatggtgacgactcatcttcgtttcactcttcttctcgccgtcatcgggatcttcttctcctcttctcaggttcgcgcagccattgtcaggatcaaaccattctcctcgcctttcgctaccaatcttgcaacgctgcaatctcaaattggctacaacttcaccaacatcaacctccttcgccgtgccatgactcatgcttccttctctcgagagaacaacaaagccctcagtatctttgggttccatctcattgaaacctctgtttcccttcagcttctctccaaagatatcgatacctcctccaaagccttgacccgtttgatagcagaggtttcaaatgtggaatcctcgtgtgctcttgatgggaaccggttgggtttggagagggttatcagggtttctcccaagactgatgcgtccaactcggggatcgtttgtggtgggttcagggcaatctttggagctgttgctactgattctggaacggttgatgaggctattaaggttttctggaaagtacatggagctggagctgcaagacttgtgtctgtgctgtaaattagtgtatggtagtagtttgcttccgatggtaaaagttccaagagactcgtctttaaggcttatatctgtctctctttttttttctctcgtgttgtgtgatgagtcagtcactcagagtgaccgatgaccaaacataataatattggttgatgttatggaccaattgataaggtaccactgattgtttcaattttcaactaaagaggctgagagttagtaggttttgtgttgagaagct

SEQ ID NO: 61948 - protein, 187 aa, Triticum aestivum
  peptide (1)..(187): Ceres Seq. ID no. 12624377
  misc_feature (13)..(181): Homolog of NCBI NO: 29126353 NR Description: hypothetical protein [Oryza sativa (japonica
  misc_feature (8)..(187): Homolog of NCBI NO: 15221749 NR Description: putative ribonuclease III
MVMVTTHLRFTLLLAVIGIFFSSSQVRAAIVRIKPFSSPFATNLATLQSQIGYNFTNINLLRRAMTHASFSRENNKALSIFGFHLIETSVSLQLLSKDIDTSSKALTRLIAEVSNVESSCALDGNRLGLERVIRVSPKTDASNSGIVCGGFRAIFGAVATDSGTVDEAIKVFWKVHGAGAARLVSVL

SEQ ID NO: 61949 - protein, 185 aa, Triticum aestivum
  peptide (1)..(185): Ceres Seq. ID no. 12624378
  misc_feature (11)..(179): Homolog of NCBI NO: 29126353 NR Description: hypothetical protein [Oryza sativa (japonica
  misc_feature (6)..(185): Homolog of NCBI NO: 15221749 NR Description: putative ribonuclease III
MVTTHLRFTLLLAVIGIFFSSSQVRAAIVRIKPFSSPFATNLATLQSQIGYNFTNINLLRRAMTHASFSRENNKALSIFGFHLIETSVSLQLLSKDIDTSSKALTRLIAEVSNVESSCALDGNRLGLERVIRVSPKTDASNSGIVCGGFRAIFGAVATDSGTVDEAIKVFWKVHGAGAARLVSVL

SEQ ID NO: 61950 - protein, 123 aa, Triticum aestivum
  peptide (1)..(123): Ceres Seq. ID no. 12624379
  misc_feature (1)..(117): Homolog of NCBI NO: 29126353 NR Description: hypothetical protein [Oryza sativa (japonica
  misc_feature (1)..(123): Homolog of NCBI NO: 15221749 NR Description: putative ribonuclease III
MTHASFSRENNKALSIFGFHLIETSVSLQLLSKDIDTSSKALTRLIAEVSNVESSCALDGNRLGLERVIRVSPKTDASNSGIVCGGFRAIFGAVATDSGTVDEAIKVFWKVHGAGAARLVSVL

SEQ ID NO: 61951 - DNA, 1001 bp, Triticum aestivum
  misc_feature (1)..(1001): Ceres Seq. ID no. 13662009
acatttgaggtctgagaagaatctcaggaacagaacctattgtgtgtgtttcttgtttctctctctctctacaatggctgcttttgcgtgcactactcgtccgccgatttctctccggtcagagatgaggatcgcatcctcaacgaaagtttcactctccactcgacaaatgttctccgtgggaggattgaggactcgcgtctctctatcatcggtctccaagaattctagcgcttctcgattacgacgacgaggagggttcatcatctgtgaagctcaggacactgctacagggattccaatggtgaacgattcaacgtgggagtcactagtactcaaggctgatgagcctgttgttgtggacttttgggcaccatggtgtggaccctgcaaaatgattgatcccattgtcaacgaactagcacagcagtacactgggaagatcaagttcttcaaactaaacactgacgattctccggcgaccccgggaaagtacggtgtgagaagcataccaaccatcatgatcttcgttaagggagagaagaaggatacaatcatcggtgcagtgcctaaaaccacattagcaacaagcattgataaattcttgcagtgaagcatgtggatggatcactctcttttatttctctatagtcctgttcgtttaacgaacgctgcgttcgatatctgcgtctgaaatttgttcataagttgattaaatgaaatgaaaacaagagacgcagcgtcaaaaaaacgaagctttccggtgttgccgctgacgtcaaaaaaagtagcgaccattgttcctcatttctctctcctctctgcgactgaaatcagaaacgcggcgtcacctgttcttctctctttctctttggatacccttttttctctatgtgtatttggacttaacttatctactactccttctcatttagacatgtataatgataataatataatgttgggtttaagaaatcgtgtttatgatggtgactttatct

SEQ ID NO: 61952 - protein, 203 aa, Triticum aestivum
  peptide (1)..(203): Ceres Seq. ID no. 13662010
  misc_feature (48)..(202): Homolog of NCBI NO: 1388088 NR Description: thioredoxin m
  misc_feature (48)..(202): Homolog of NCBI NO: 1351239 NR Description: Thioredoxin M-type, chloroplast precursor (TRX-M)
  misc_feature (37)..(202): Homolog of NCBI NO: 15232567 NR Description: thioredoxin M-type 4, chloroplast precursor
  misc_feature (37)..(202): Homolog of NCBI NO: 6539614 NR Description: thioredoxin m4 [Arabidopsis thaliana]
  misc_feature (62)..(202): Homolog of NCBI NO: 15594012 NR Description: putative thioredoxin m2 [Pisum sativum]
  misc_feature (25)..(202): Homolog of NCBI NO: 21618235 NR Description: putative M-type thioredoxin [Arabidopsis thaliana]
  misc_feature (25)..(202): Homolog of NCBI NO: 6539610 NR Description: thioredoxin m2 [Arabidopsis thaliana]
  misc_feature (25)..(202): Homolog of NCBI NO: 15236327 NR Description: thioredoxin M-type 2, chloroplast precursor
  misc_feature (25)..(202): Homolog of NCBI NO: 30678634 NR Description: thioredoxin M-type 1, chloroplast precursor
  misc_feature (25)..(203): Homolog of NCBI NO: 11135407 NR Description: Thioredoxin M-type, chloroplast precursor (TRX-M)
HLRSEKNLRNRTYCVCFLFLSLSTMAAFACTTRPPISLRSEMRIASSTKVSLSTRQMFSVGGLRTRVSLSSVSKNSSASRLRRRGGFIICEAQDTATGIPMVNDSTWESLVLKADEPVVVDFWAPWCGPCKMIDPIVNELAQQYTGKIKFFKLNTDDSPATPGKYGVRSIPTIMIFVKGEKKDTIIGAVPKTTLATSIDKFLQ

SEQ ID NO: 61953 - protein, 179 aa, Triticum aestivum
  peptide (1)..(179): Ceres Seq. ID no. 13662011
  misc_feature (24)..(178): Homolog of NCBI NO: 1388088 NR Description: thioredoxin m
  misc_feature (24)..(178): Homolog of NCBI NO: 1351239 NR Description: Thioredoxin M-type, chloroplast precursor (TRX-M)
  misc_feature (13)..(178): Homolog of NCBI NO: 15232567 NR Description: thioredoxin M-type 4, chloroplast precursor
  misc_feature (13)..(178): Homolog of NCBI NO: 6539614 NR Description: thioredoxin m4 [Arabidopsis thaliana]
  misc_feature (38)..(178): Homolog of NCBI NO: 15594012 NR Description: putative thioredoxin m2 [Pisum sativum]
  misc_feature (1)..(178): Homolog of NCBI NO: 21618235 NR Description: putative M-type thioredoxin [Arabidopsis thaliana]
  misc_feature (1)..(178): Homolog of NCBI NO: 6539610 NR Description: thioredoxin m2 [Arabidopsis thaliana]
  misc_feature (1)..(178): Homolog of NCBI NO: 15236327 NR Description: thioredoxin M-type 2, chloroplast precursor
  misc_feature (1)..(178): Homolog of NCBI NO: 30678634 NR Description: thioredoxin M-type 1, chloroplast precursor
  misc_feature (1)..(179): Homolog of NCBI NO: 11135407 NR Description: Thioredoxin M-type, chloroplast precursor (TRX-M)
MAAFACTTRPPISLRSEMRIASSTKVSLSTRQMFSVGGLRTRVSLSSVSKNSSASRLRRRGGFIICEAQDTATGIPMVNDSTWESLVLKADEPVVVDFWAPWCGPCKMIDPIVNELAQQYTGKIKFFKLNTDDSPATPGKYGVRSIPTIMIFVKGEKKDTIIGAVPKTTLATSIDKFLQ

SEQ ID NO: 61954 - protein, 162 aa, Triticum aestivum
  peptide (1)..(162): Ceres Seq. ID no. 13662012
  misc_feature (7)..(161): Homolog of NCBI NO: 1388088 NR Description: thioredoxin m
  misc_feature (7)..(161): Homolog of NCBI NO: 1351239 NR Description: Thioredoxin M-type, chloroplast precursor (TRX-M)
  misc_feature (1)..(161): Homolog of NCBI NO: 15232567 NR Description: thioredoxin M-type 4, chloroplast precursor
  misc_feature (1)..(161): Homolog of NCBI NO: 6539614 NR Description: thioredoxin m4 [Arabidopsis thaliana]
  misc_feature (21)..(161): Homolog of NCBI NO: 15594012 NR Description: putative thioredoxin m2 [Pisum sativum]
  misc_feature (1)..(161): Homolog of NCBI NO: 21618235 NR Description: putative M-type thioredoxin [Arabidopsis thaliana]
  misc_feature (1)..(161): Homolog of NCBI NO: 6539610 NR Description: thioredoxin m2 [Arabidopsis thaliana]
  misc_feature (1)..(161): Homolog of NCBI NO: 15236327 NR Description: thioredoxin M-type 2, chloroplast precursor
  misc_feature (1)..(161): Homolog of NCBI NO: 30678634 NR Description: thioredoxin M-type 1, chloroplast precursor
  misc_feature (1)..(162): Homolog of NCBI NO: 11135407 NR Description: Thioredoxin M-type, chloroplast precursor (TRX-M)
MRIASSTKVSLSTRQMFSVGGLRTRVSLSSVSKNSSASRLRRRGGFIICEAQDTATGIPMVNDSTWESLVLKADEPVVVDFWAPWCGPCKMIDPIVNELAQQYTGKIKFFKLNTDDSPATPGKYGVRSIPTIMIFVKGEKKDTIIGAVPKTTLATSIDKFLQ

SEQ ID NO: 61955 - DNA, 866 bp, Triticum aestivum
  misc_feature (1)..(866): Ceres Seq. ID no. 14301765
atagatctctacttagcttctccgcgatacaagcccatttaaattcacatccaaccggatcgaggatttagggttcgcgaaaaaaatggcgcaacaacaatcgttgatctacagcttcgtcgctcgcgggacggtgatcctcgccgagttcactgatttcaaaggcaacttcacctccgtcgctgcacagtgcctccagaagctcccctcttccaacaacaagttcacctacacctgcgacggccacaccttcagttacctcgtcgaagatggattcacgtactgtgttgttgcggttgattctgctgggaggcagattccgatggcgtttttggagagagtgaaagaggattttagcaagagatatggtggtgggaaggctgctactgctcaggctaacagcttcaataaagagtttggctctaagctgaaagagcacatgcagtattgtatggatcaccctgatgagattagcaagcttgctaaggtgaaggctcaagtctctgaagttaaaggtgttatgatggaaaacatcgagaaggttcttgaccgtggtgagaaaattgagcttctggtggacaaaaccgagaaccttcgctctcaggcacaagacttcagaacaacggggacacagatgagaagaaagatgtggcttcagaacatgaagattaaactcatagttctcgccatcatcgtcgcactgattctcatcatcgtgctctcagtttgccatggcttcaagtgttaaagagccccatcaaagttaaaaaaactctcttgaaatctttttctcactcggtcttcgtaatctatatataatagcaaaccatttttattaatctgatgatgtcatcattttttataag

SEQ ID NO: 61956 - protein, 220 aa, Triticum aestivum
  peptide (1)..(220): Ceres Seq. ID no. 14301766
  misc_feature (128)..(216): Pfam Name: Synaptobrevin Pfam Description: Synaptobrevin
  misc_feature (4)..(220): Homolog of NCBI NO: 30685571 NR Description: synaptobrevin -related [Arabidopsis thaliana]
  misc_feature (4)..(195): Homolog of NCBI NO: 33347409 NR Description: synptobrevin-related protein [Pyrus pyrifolia]
  misc_feature (4)..(220): Homolog of NCBI NO: 27805765 NR Description: Putative vesicle-associated membrane protein 726
  misc_feature (4)..(220): Homolog of NCBI NO: 29150380 NR Description: synaptobrevin-like protein
  misc_feature (4)..(220): Homolog of NCBI NO: 30685375 NR Description: synaptobrevin -related [Arabidopsis thaliana]
  misc_feature (4)..(220): Homolog of NCBI NO: 27805753 NR Description: Vesicle-associated membrane protein 725
  misc_feature (4)..(220): Homolog of NCBI NO: 15220315 NR Description: synaptobrevin 7B -related [Arabidopsis thaliana]
  misc_feature (4)..(220): Homolog of NCBI NO: 600710 NR Description: formerly called HAT24; synaptobrevin-related
  misc_feature (4)..(220): Homolog of NCBI NO: 15225796 NR Description: synaptobrevin -related [Arabidopsis thaliana]
  misc_feature (4)..(220): Homolog of NCBI NO: 15220943 NR Description: synaptobrevin 7B -related, 3' partial
MAQQQSLIYSFVARGTVILAEFTDFKGNFTSVAAQCLQKLPSSNNKFTYTCDGHTFSYLVEDGFTYCVVAVDSAGRQIPMAFLERVKEDFSKRYGGGKAATAQANSFNKEFGSKLKEHMQYCMDHPDEISKLAKVKAQVSEVKGVMMENIEKVLDRGEKIELLVDKTENLRSQAQDFRTTGTQMRRKMWLQNMKIKLIVLAIIVALILIIVLSVCHGFKC

SEQ ID NO: 61957 - protein, 141 aa, Triticum aestivum
  peptide (1)..(141): Ceres Seq. ID no. 14301767
  misc_feature (49)..(137): Pfam Name: Synaptobrevin Pfam Description: Synaptobrevin
  misc_feature (1)..(141): Homolog of NCBI NO: 30685571 NR Description: synaptobrevin -related [Arabidopsis thaliana]
  misc_feature (1)..(116): Homolog of NCBI NO: 33347409 NR Description: synptobrevin-related protein [Pyrus pyrifolia]
  misc_feature (1)..(141): Homolog of NCBI NO: 27805765 NR Description: Putative vesicle-associated membrane protein 726
  misc_feature (1)..(141): Homolog of NCBI NO: 29150380 NR Description: synaptobrevin-like protein
  misc_feature (1)..(141): Homolog of NCBI NO: 30685375 NR Description: synaptobrevin -related [Arabidopsis thaliana]
  misc_feature (1)..(141): Homolog of NCBI NO: 27805753 NR Description: Vesicle-associated membrane protein 725
  misc_feature (1)..(141): Homolog of NCBI NO: 15220315 NR Description: synaptobrevin 7B -related [Arabidopsis thaliana]
  misc_feature (1)..(141): Homolog of NCBI NO: 600710 NR Description: formerly called HAT24; synaptobrevin-related
  misc_feature (1)..(141): Homolog of NCBI NO: 15225796 NR Description: synaptobrevin -related [Arabidopsis thaliana]
  misc_feature (1)..(141): Homolog of NCBI NO: 15220943 NR Description: synaptobrevin 7B -related, 3' partial
MAFLERVKEDFSKRYGGGKAATAQANSFNKEFGSKLKEHMQYCMDHPDEISKLAKVKAQVSEVKGVMMENIEKVLDRGEKIELLVDKTENLRSQAQDFRTTGTQMRRKMWLQNMKIKLIVLAIIVALILIIVLSVCHGFKC

SEQ ID NO: 61958 - DNA, 835 bp, Triticum aestivum
  misc_feature (1)..(835): Ceres Seq. ID no. 12624657
cccctttcccttggcgtgaaccaactttcaagtgcttccgttcttgcctcccgtgccgccgccgcctccaatcttgcctccgacctcgtcgtccggcctcgcggcgccggagcccggccggatggagtacccacggtcaccgggcgccccatatcatgcgccgccacctccaatgtcgtcgcttcgtccgcctacgccttcctcggcagttcatgccgtcgccgccccaactccttccgcagacgccatgaagaggaagcgacaggggaaccacctcatccaagggggcccagccgatgcagcaccaccctctttcgggcccgcttcggttcctcccgtcaaggccgccggcgggaggaagaagaccggctccaccagcccaaccggtgcatgtgcgaagtccccgaggaagaatgcaatcacagcaagaggtcgggctcctcctccgcctacggctggccacaacctccccattcacggcgactccaccggccacgcctaccatgtgttcgatgaaacgaccgggagccaaagtgtgccttccacatataccgaaatgttggccgagagtatagtggatttgagtgctcactctccgatcaatgtggatgatggcgatggtgctaggggcggcgatggtggcgacgatcttcacaacaatgaggattttgcttgatttctccatgactggtggtcatttgagcaacttttgttttgtttgatcgcgcatttataaggctaaacttgctacctcgtatgttgcgcttgattttgaatgtgatgaattagtatgatgatgaactagcgatgtttatataataaattttatgtattt

SEQ ID NO: 61959 - protein, 184 aa, Triticum aestivum
  peptide (1)..(184): Ceres Seq. ID no. 12624658
  misc_feature (1)..(117): Pfam Name: Extensin-like region Pfam Description: Extensin-like region
  misc_feature (1)..(108): Homolog of NCBI NO: 131000 NR Description: Acidic proline-rich protein PRP25 precursor
  misc_feature (1)..(113): Homolog of NCBI NO: 15145793 NR Description: basic proline-rich protein [Sus scrofa]
  misc_feature (1)..(120): Homolog of NCBI NO: 15240851 NR Description: putative protein; protein id: At5g07750.1
  misc_feature (1)..(113): Homolog of NCBI NO: 15145797 NR Description: basic proline-rich protein [Sus scrofa]
MEYPRSPGAPYHAPPPPMSSLRPPTPSSAVHAVAAPTPSADAMKRKRQGNHLIQGGPADAAPPSFGPASVPPVKAAGGRKKTGSTSPTGACAKSPRKNAITARGRAPPPPTAGHNLPIHGDSTGHAYHVFDETTGSQSVPSTYTEMLAESIVDLSAHSPINVDDGDGARGGDGGDDLHNNEDFA

SEQ ID NO: 61960 - protein, 171 aa, Triticum aestivum
  peptide (1)..(171): Ceres Seq. ID no. 12624659
PLSLGVNQLSSASVLASRAAAASNLASDLVVRPRGAGARPDGVPTVTGRPISCAATSNVVASSAYAFLGSSCRRRPNSFRRRHEEEATGEPPHPRGPSRCSTTLFRARFGSSRQGRRREEEDRLHQPNRCMCEVPEEECNHSKRSGSSSAYGWPQPPHSRRLHRPRLPCVR

SEQ ID NO: 61961 - protein, 167 aa, Triticum aestivum
  peptide (1)..(167): Ceres Seq. ID no. 12624660
  misc_feature (1)..(100): Pfam Name: Extensin-like region Pfam Description: Extensin-like region
  misc_feature (1)..(91): Homolog of NCBI NO: 131000 NR Description: Acidic proline-rich protein PRP25 precursor
  misc_feature (1)..(96): Homolog of NCBI NO: 15145793 NR Description: basic proline-rich protein [Sus scrofa]
  misc_feature (1)..(103): Homolog of NCBI NO: 15240851 NR Description: putative protein; protein id: At5g07750.1
  misc_feature (1)..(96): Homolog of NCBI NO: 15145797 NR Description: basic proline-rich protein [Sus scrofa]
MSSLRPPTPSSAVHAVAAPTPSADAMKRKRQGNHLIQGGPADAAPPSFGPASVPPVKAAGGRKKTGSTSPTGACAKSPRKNAITARGRAPPPPTAGHNLPIHGDSTGHAYHVFDETTGSQSVPSTYTEMLAESIVDLSAHSPINVDDGDGARGGDGGDDLHNNEDFA

SEQ ID NO: 61962 - DNA, 1533 bp, Triticum aestivum
  misc_feature (1)..(1533): Ceres Seq. ID no. 13583262
aaaaaacctagatgccacaccctatcccagccgcagccgccgccgccgtcgccgccgccgccgctgcaaccgccgccttcgattccgtgaaattggaggggaagacaattggatctgtctgccgcaggaggagtggggagaaatagaatgaaggcgcgacagttcctgaatgttgtgatggagaggtatggcactggcggtgccggtggcagcttgtatacggtcagtcgcatcgacgccaaggaacacctcttctaccgatccacggccgaagcacaggcagcagaaaaatcaaggttcgatatggagtgcccatcatcagccgttgtgccaccatggatggagaccatctcgcggatgcctccgtccaagctcagattcgagcggtccacctcagacaacaaaagactggatttcctgcccttccatgaacgaggcagcggtgctgcgagcaagatcctctgcgtggacgccgctggccacaccgccctatacgacatggacgccggttcggtccagccaattccatgcctcaacagtcccaaggggagcaggcccatcagcttctccaccaccaatcccgaagcctctgaccgtgaacgtgctgatgccttctacgttatgggaaggttcccttccagctatgacccctacaacttcgaggtactcatgtacagtaacccttctaatggcaggacgatgaaaggctggaattggctcaagctaccaacaccacctgcctatgctgacaattgcattgtcaattcccatgcgctgcttgaaattgaaggtgactcaattcttgttgtctcctccggagaagaaagccttggcacctactgcttcaacacagccagtcgcaagtggtttaaggctggctcctggacactgccattcctcagtcgtgctgtgcatgtaccagagctggacaacctcttatttggcattgccagcgatgcacccaaccacttttgtgcaatgggtatctcccgtcttctctcgaagaggtgtccacctttagtgtacagttggccacaccttgatctgcccgaggactggataatgcaagattgcagctttgtgtacttgggaaatgggaggttttgcatcaccaaagtctttgagtttggtctggacgaagacactggcaacacgactgatatgggtgctgtgatgtctggcgtggaggtagtgcatcacaagaagtctggactcatcatggtcaaccataggtccaaattctacaggttcttcagggatgacatccaatgtgtcttgtaaggtaacttggtgaaaggggagcaacacgggtttttccaggaggattggaattgtctgtcttcccctttccatcagtatctagtagctacaacttctgctatgttagtttttgggcagtagtgctcatttccttcagtatgttgtatcactatatttgctgccgttgctgtatacatagcttcttaggtgcttttattttattattagatggactagtatcttgatgaaattatgatatggtttataactggt

SEQ ID NO: 61963 - protein, 377 aa, Triticum aestivum
  peptide (1)..(377): Ceres Seq. ID no. 13583263
  misc_feature (3)..(164): Homolog of NCBI NO: 34898928 NR Description: OJ1316_A04.17 [Oryza sativa (japonica
  misc_feature (64)..(366): Homolog of NCBI NO: 28876026 NR Description: hypothetical protein [Oryza sativa (japonica
  misc_feature (137)..(377): Homolog of NCBI NO: 38344193 NR Description: OSJNBa0064G10.9 [Oryza sativa (japonica
  misc_feature (145)..(349): Homolog of NCBI NO: 15451605 NR Description: Hypothetical protein [Oryza sativa]
  misc_feature (3)..(355): Homolog of NCBI NO: 38345446 NR Description: OSJNBa0042L16.1 [Oryza sativa (japonica
  misc_feature (3)..(364): Homolog of NCBI NO: 34897052 NR Description: hypothetical protein [Oryza sativa (japonica
  misc_feature (51)..(355): Homolog of NCBI NO: 15451604 NR Description: Hypothetical protein [Oryza sativa]
  misc_feature (87)..(366): Homolog of NCBI NO: 34907072 NR Description: OSJNBa0093F16.25 [Oryza sativa (japonica
  misc_feature (65)..(376): Homolog of NCBI NO: 34902348 NR Description: Hypothetical protein [Oryza sativa (japonica
  misc_feature (100)..(348): Homolog of NCBI NO: 37531434 NR Description: hypothetical protein [Oryza sativa (japonica
MKARQFLNVVMERYGTGGAGGSLYTVSRIDAKEHLFYRSTAEAQAAEKSRFDMECPSSAVVPPWMETISRMPPSKLRFERSTSDNKRLDFLPFHERGSGAASKILCVDAAGHTALYDMDAGSVQPIPCLNSPKGSRPISFSTTNPEASDRERADAFYVMGRFPSSYDPYNFEVLMYSNPSNGRTMKGWNWLKLPTPPAYADNCIVNSHALLEIEGDSILVVSSGEESLGTYCFNTASRKWFKAGSWTLPFLSRAVHVPELDNLLFGIASDAPNHFCAMGISRLLSKRCPPLVYSWPHLDLPEDWIMQDCSFVYLGNGRFCITKVFEFGLDEDTGNTTDMGAVMSGVEVVHHKKSGLIMVNHRSKFYRFFRDDIQCVL

SEQ ID NO: 61964 - protein, 367 aa, Triticum aestivum
  peptide (1)..(367): Ceres Seq. ID no. 13583264
  misc_feature (1)..(154): Homolog of NCBI NO: 34898928 NR Description: OJ1316_A04.17 [Oryza sativa (japonica
  misc_feature (54)..(356): Homolog of NCBI NO: 28876026 NR Description: hypothetical protein [Oryza sativa (japonica
  misc_feature (127)..(367): Homolog of NCBI NO: 38344193 NR Description: OSJNBa0064G10.9 [Oryza sativa (japonica
  misc_feature (135)..(339): Homolog of NCBI NO: 15451605 NR Description: Hypothetical protein [Oryza sativa]
  misc_feature (1)..(345): Homolog of NCBI NO: 38345446 NR Description: OSJNBa0042L16.1 [Oryza sativa (japonica
  misc_feature (1)..(354): Homolog of NCBI NO: 34897052 NR Description: hypothetical protein [Oryza sativa (japonica
  misc_feature (41)..(345): Homolog of NCBI NO: 15451604 NR Description: Hypothetical protein [Oryza sativa]
  misc_feature (77)..(356): Homolog of NCBI NO: 34907072 NR Description: OSJNBa0093F16.25 [Oryza sativa (japonica
  misc_feature (55)..(366): Homolog of NCBI NO: 34902348 NR Description: Hypothetical protein [Oryza sativa (japonica
  misc_feature (90)..(338): Homolog of NCBI NO: 37531434 NR Description: hypothetical protein [Oryza sativa (japonica
MERYGTGGAGGSLYTVSRIDAKEHLFYRSTAEAQAAEKSRFDMECPSSAVVPPWMETISRMPPSKLRFERSTSDNKRLDFLPFHERGSGAASKILCVDAAGHTALYDMDAGSVQPIPCLNSPKGSRPISFSTTNPEASDRERADAFYVMGRFPSSYDPYNFEVLMYSNPSNGRTMKGWNWLKLPTPPAYADNCIVNSHALLEIEGDSILVVSSGEESLGTYCFNTASRKWFKAGSWTLPFLSRAVHVPELDNLLFGIASDAPNHFCAMGISRLLSKRCPPLVYSWPHLDLPEDWIMQDCSFVYLGNGRFCITKVFEFGLDEDTGNTTDMGAVMSGVEVVHHKKSGLIMVNHRSKFYRFFRDDIQCVL

SEQ ID NO: 61965 - protein, 325 aa, Triticum aestivum
  peptide (1)..(325): Ceres Seq. ID no. 13583265
  misc_feature (1)..(112): Homolog of NCBI NO: 34898928 NR Description: OJ1316_A04.17 [Oryza sativa (japonica
  misc_feature (12)..(314): Homolog of NCBI NO: 28876026 NR Description: hypothetical protein [Oryza sativa (japonica
  misc_feature (85)..(325): Homolog of NCBI NO: 38344193 NR Description: OSJNBa0064G10.9 [Oryza sativa (japonica
  misc_feature (93)..(297): Homolog of NCBI NO: 15451605 NR Description: Hypothetical protein [Oryza sativa]
  misc_feature (1)..(303): Homolog of NCBI NO: 38345446 NR Description: OSJNBa0042L16.1 [Oryza sativa (japonica
  misc_feature (1)..(312): Homolog of NCBI NO: 34897052 NR Description: hypothetical protein [Oryza sativa (japonica
  misc_feature (1)..(303): Homolog of NCBI NO: 15451604 NR Description: Hypothetical protein [Oryza sativa]
  misc_feature (35)..(314): Homolog of NCBI NO: 34907072 NR Description: OSJNBa0093F16.25 [Oryza sativa (japonica
  misc_feature (13)..(324): Homolog of NCBI NO: 34902348 NR Description: Hypothetical protein [Oryza sativa (japonica
  misc_feature (48)..(296): Homolog of NCBI NO: 37531434 NR Description: hypothetical protein [Oryza sativa (japonica
MECPSSAVVPPWMETISRMPPSKLRFERSTSDNKRLDFLPFHERGSGAASKILCVDAAGHTALYDMDAGSVQPIPCLNSPKGSRPISFSTTNPEASDRERADAFYVMGRFPSSYDPYNFEVLMYSNPSNGRTMKGWNWLKLPTPPAYADNCIVNSHALLEIEGDSILVVSSGEESLGTYCFNTASRKWFKAGSWTLPFLSRAVHVPELDNLLFGIASDAPNHFCAMGISRLLSKRCPPLVYSWPHLDLPEDWIMQDCSFVYLGNGRFCITKVFEFGLDEDTGNTTDMGAVMSGVEVVHHKKSGLIMVNHRSKFYRFFRDDIQCVL

SEQ ID NO: 61966 - DNA, 866 bp, Triticum aestivum
  misc_feature (1)..(866): Ceres Seq. ID no. 13596404
aaacactagccacactcgctgacagagtcactgggaagaggcgattcctcccaccaccaggttcccccaaatcgctcgcacccgccactaaccctagcgacatctgcgctcccaatcgctcggcctctcgccggagctccagatccgcggccgcttcctcccgcgctggtggtgaccttcccggatcggagccaagatgacggagtcgatggtgcggaacaagccggggatggcgagcgtcaaggacatgccggtgctgcaggacgggccgccgccgggcgggttcgcgcccgtgcgctacgcgcgccgcatccccaacaagggccccagcgccatcgccctcttcctcaccaccttcggcgccttctcctggggcatgtaccaggtcggacaggggaacaaggtccgccgtgcactcaaggaggagaaaattgctgcccgtagtgctatactgccgatgctccaagctgaagaggatgaaagatttgtcaaagaatggaagaagtatcttgaggaggaagcgaggatcatgaaaaatgttcctggatggaaagttggtgagagcgtgtacaattctgggaaatggatgcctcctgcaaccggtgagctgcgtccggaggtttggtaaggtccaaggtcttgcttcagcccatcgaggatggcatcgtgccttgagggcatgaataaggctttcagacctggatacccaaaatttgctacgaggaatacatacttgagcattcgtcgtgtatttcttctgttgacggaatttgaatggctaataattggacagagcaagccgactttggtctttatatgaaccatcttcttttgttgatgtaacgtgtctttgtattgctacggct

SEQ ID NO: 61967 - protein, 143 aa, Triticum aestivum
  peptide (1)..(143): Ceres Seq. ID no. 13596405
  misc_feature (16)..(139): Pfam Name: GRIM-19 protein Pfam Description: GRIM-19 protein
  misc_feature (13)..(138): Homolog of NCBI NO: 34809544 NR Description: GRIM19 protein [Homo sapiens]
  misc_feature (13)..(138): Homolog of NCBI NO: 21361822 NR Description: cell death-regulatory protein GRIM19; CGI-39
  misc_feature (20)..(138): Homolog of NCBI NO: 27668839 NR Description: similar to genes associated with
  misc_feature (1)..(142): Homolog of NCBI NO: 34334020 NR Description: NADH:ubiquinone oxidoreductase B16.6 subunit
  misc_feature (1)..(72): Homolog of NCBI NO: 26451954 NR Description: unknown protein [Arabidopsis thaliana]
  misc_feature (1)..(141): Homolog of NCBI NO: 25406799 NR Description: hypothetical protein [imported] - Arabidopsis
  misc_feature (1)..(139): Homolog of NCBI NO: 16973316 NR Description: F6 [Gossypium hirsutum]
  misc_feature (1)..(142): Homolog of NCBI NO: 15219769 NR Description: expressed protein [Arabidopsis thaliana]
  misc_feature (1)..(143): Homolog of NCBI NO: 20260652 NR Description: unknown protein [Arabidopsis thaliana]
  misc_feature (1)..(143): Homolog of NCBI NO: 18403216 NR Description: expressed protein [Arabidopsis thaliana]
MTESMVRNKPGMASVKDMPVLQDGPPPGGFAPVRYARRIPNKGPSAIALFLTTFGAFSWGMYQVGQGNKVRRALKEEKIAARSAILPMLQAEEDERFVKEWKKYLEEEARIMKNVPGWKVGESVYNSGKWMPPATGELRPEVW

SEQ ID NO: 61968 - protein, 139 aa, Triticum aestivum
  peptide (1)..(139): Ceres Seq. ID no. 13596406
  misc_feature (12)..(135): Pfam Name: GRIM-19 protein Pfam Description: GRIM-19 protein
  misc_feature (9)..(134): Homolog of NCBI NO: 34809544 NR Description: GRIM19 protein [Homo sapiens]
  misc_feature (9)..(134): Homolog of NCBI NO: 21361822 NR Description: cell death-regulatory protein GRIM19; CGI-39
  misc_feature (16)..(134): Homolog of NCBI NO: 27668839 NR Description: similar to genes associated with
  misc_feature (1)..(138): Homolog of NCBI NO: 34334020 NR Description: NADH:ubiquinone oxidoreductase B16.6 subunit
  misc_feature (1)..(68): Homolog of NCBI NO: 26451954 NR Description: unknown protein [Arabidopsis thaliana]
  misc_feature (1)..(137): Homolog of NCBI NO: 25406799 NR Description: hypothetical protein [imported] - Arabidopsis
  misc_feature (1)..(135): Homolog of NCBI NO: 16973316 NR Description: F6 [Gossypium hirsutum]
  misc_feature (1)..(138): Homolog of NCBI NO: 15219769 NR Description: expressed protein [Arabidopsis thaliana]
  misc_feature (1)..(139): Homolog of NCBI NO: 20260652 NR Description: unknown protein [Arabidopsis thaliana]
  misc_feature (1)..(139): Homolog of NCBI NO: 18403216 NR Description: expressed protein [Arabidopsis thaliana]
MVRNKPGMASVKDMPVLQDGPPPGGFAPVRYARRIPNKGPSAIALFLTTFGAFSWGMYQVGQGNKVRRALKEEKIAARSAILPMLQAEEDERFVKEWKKYLEEEARIMKNVPGWKVGESVYNSGKWMPPATGELRPEVW

SEQ ID NO: 61969 - protein, 132 aa, Triticum aestivum
  peptide (1)..(132): Ceres Seq. ID no. 13596407
  misc_feature (5)..(128): Pfam Name: GRIM-19 protein Pfam Description: GRIM-19 protein
  misc_feature (2)..(127): Homolog of NCBI NO: 34809544 NR Description: GRIM19 protein [Homo sapiens]
  misc_feature (2)..(127): Homolog of NCBI NO: 21361822 NR Description: cell death-regulatory protein GRIM19; CGI-39
  misc_feature (9)..(127): Homolog of NCBI NO: 27668839 NR Description: similar to genes associated with
  misc_feature (1)..(131): Homolog of NCBI NO: 34334020 NR Description: NADH:ubiquinone oxidoreductase B16.6 subunit
  misc_feature (1)..(61): Homolog of NCBI NO: 26451954 NR Description: unknown protein [Arabidopsis thaliana]
  misc_feature (1)..(130): Homolog of NCBI NO: 25406799 NR Description: hypothetical protein [imported] - Arabidopsis
  misc_feature (1)..(128): Homolog of NCBI NO: 16973316 NR Description: F6 [Gossypium hirsutum]
  misc_feature (1)..(131): Homolog of NCBI NO: 15219769 NR Description: expressed protein [Arabidopsis thaliana]
  misc_feature (1)..(132): Homolog of NCBI NO: 20260652 NR Description: unknown protein [Arabidopsis thaliana]
  misc_feature (1)..(132): Homolog of NCBI NO: 18403216 NR Description: expressed protein [Arabidopsis thaliana]
MASVKDMPVLQDGPPPGGFAPVRYARRIPNKGPSAIALFLTTFGAFSWGMYQVGQGNKVRRALKEEKIAARSAILPMLQAEEDERFVKEWKKYLEEEARIMKNVPGWKVGESVYNSGKWMPPATGELRPEVW

SEQ ID NO: 61970 - DNA, 1116 bp, Triticum aestivum
  misc_feature (1)..(1116): Ceres Seq. ID no. 12614847
cccaaattcctcctcctgcctgcctgctgccgcgagagtcctccactccacaacaaccttcgagaacgagcgcgcgcacggaggcggccgcgatctctcgcccaccaacccaccacccgcgccatggcttccaccaatggcggctttgtcagtcctcttgcagcggccgttccagttgaggcggttttgtttgacattgatggtaccttgtgcgactcggatcctcttcatcacatcgctttccaagaattgcttcttgcgattgggtacaacaatggtgtgcctattgacgacgagttcttcataaacaacatcgctggaagaagcgatgctgaagctgcccagaatttgttcccagactggcccctcgaaaaggggctgaaattcctagaggacaaagacgtcaaatacagaagtttggcgatggagcgcctagagcctgtaaagggccttcacaaagtggttcagtgggtgaaagatcacggctacaagcgtgccgcagtaaccaatgccccaaggatcaatgcagagctcatgatcaaacttcttggtctatcagacttcttccaggctgtcattgttggaggcgaatgtgagaagccaaaacccgccccctttccatacctgaaggccctcaaggagctcgaagtgtccgcagcacacaccttcatcttcgaggattccgcttcagggacacgcgcaggtgttgccgcgggaatgcccgtcgtcgccgtctcgacgaggaacccggagaagtccctacaggaagctggggccgcattgatcatcagtgactatgaagaccagaaactgtggaacgcgctcgaggagattgatagggaggaagcgaagctaaagactggtggggcgtgagacttttgatggggatgaacagttgattagaccactgcaaatttatccattcttattatttataagggattctacaccctgaagttattatggtaggatagtttgatatatgtttcttttggttctctagtagagaatcaaataaaaaactttagtgcccaacacatgagatttgtttggttgacgggacctatgaaaatggcatatctgtcaggctcattgcctaccagaattttgactgtt

SEQ ID NO: 61971 - protein, 290 aa, Triticum aestivum
  peptide (1)..(290): Ceres Seq. ID no. 12614848
  misc_feature (59)..(247): Pfam Name: haloacid dehalogenase-like hydrolase Pfam Description: haloacid dehalogenase-like hydrolase
  misc_feature (59)..(271): Homolog of NCBI NO: 23039672 NR Description: hypothetical protein [Trichodesmium erythraeum
  misc_feature (61)..(272): Homolog of NCBI NO: 37521914 NR Description: hypothetical protein glr2345 [Gloeobacter
  misc_feature (61)..(278): Homolog of NCBI NO: 17228223 NR Description: hypothetical protein [Nostoc sp. PCC 7120]
  misc_feature (59)..(275): Homolog of NCBI NO: 23042473 NR Description: hypothetical protein [Trichodesmium erythraeum
  misc_feature (61)..(278): Homolog of NCBI NO: 23127812 NR Description: hypothetical protein [Nostoc punctiforme]
  misc_feature (121)..(279): Homolog of NCBI NO: 37700485 NR Description: putative beta-phosphoglucomutase [Oryza sativa]
  misc_feature (88)..(281): Homolog of NCBI NO: 25408616 NR Description: hypothetical protein At2g38740 [imported] -
  misc_feature (42)..(288): Homolog of NCBI NO: 34897820 NR Description: P0514G12.30 [Oryza sativa (japonica
  misc_feature (43)..(279): Homolog of NCBI NO: 37536998 NR Description: putative beta-phosphoglucomutase
  misc_feature (53)..(281): Homolog of NCBI NO: 18404847 NR Description: expressed protein
PKFLLLPACCRESPPLHNNLRERARARRRPRSLAHQPTTRAMASTNGGFVSPLAAAVPVEAVLFDIDGTLCDSDPLHHIAFQELLLAIGYNNGVPIDDEFFINNIAGRSDAEAAQNLFPDWPLEKGLKFLEDKDVKYRSLAMERLEPVKGLHKVVQWVKDHGYKRAAVTNAPRINAELMIKLLGLSDFFQAVIVGGECEKPKPAPFPYLKALKELEVSAAHTFIFEDSASGTRAGVAAGMPVVAVSTRNPEKSLQEAGAALIISDYEDQKLWNALEEIDREEAKLKTGGA

SEQ ID NO: 61972 - protein, 249 aa, Triticum aestivum
  peptide (1)..(249): Ceres Seq. ID no. 12614849
  misc_feature (18)..(206): Pfam Name: haloacid dehalogenase-like hydrolase Pfam Description: haloacid dehalogenase-like hydrolase
  misc_feature (18)..(230): Homolog of NCBI NO: 23039672 NR Description: hypothetical protein [Trichodesmium erythraeum
  misc_feature (20)..(231): Homolog of NCBI NO: 37521914 NR Description: hypothetical protein glr2345 [Gloeobacter
  misc_feature (20)..(237): Homolog of NCBI NO: 17228223 NR Description: hypothetical protein [Nostoc sp. PCC 7120]
  misc_feature (18)..(234): Homolog of NCBI NO: 23042473 NR Description: hypothetical protein [Trichodesmium erythraeum
  misc_feature (20)..(237): Homolog of NCBI NO: 23127812 NR Description: hypothetical protein [Nostoc punctiforme]
  misc_feature (80)..(238): Homolog of NCBI NO: 37700485 NR Description: putative beta-phosphoglucomutase [Oryza sativa]
  misc_feature (47)..(240): Homolog of NCBI NO: 25408616 NR Description: hypothetical protein At2g38740 [imported] -
  misc_feature (1)..(247): Homolog of NCBI NO: 34897820 NR Description: P0514G12.30 [Oryza sativa (japonica
  misc_feature (2)..(238): Homolog of NCBI NO: 37536998 NR Description: putative beta-phosphoglucomutase
  misc_feature (12)..(240): Homolog of NCBI NO: 18404847 NR Description: expressed protein
MASTNGGFVSPLAAAVPVEAVLFDIDGTLCDSDPLHHIAFQELLLAIGYNNGVPIDDEFFINNIAGRSDAEAAQNLFPDWPLEKGLKFLEDKDVKYRSLAMERLEPVKGLHKVVQWVKDHGYKRAAVTNAPRINAELMIKLLGLSDFFQAVIVGGECEKPKPAPFPYLKALKELEVSAAHTFIFEDSASGTRAGVAAGMPVVAVSTRNPEKSLQEAGAALIISDYEDQKLWNALEEIDREEAKLKTGGA

SEQ ID NO: 61973 - protein, 149 aa, Triticum aestivum
  peptide (1)..(149): Ceres Seq. ID no. 12614850
  misc_feature (1)..(106): Pfam Name: haloacid dehalogenase-like hydrolase Pfam Description: haloacid dehalogenase-like hydrolase
  misc_feature (1)..(130): Homolog of NCBI NO: 23039672 NR Description: hypothetical protein [Trichodesmium erythraeum
  misc_feature (1)..(131): Homolog of NCBI NO: 37521914 NR Description: hypothetical protein glr2345 [Gloeobacter
  misc_feature (1)..(137): Homolog of NCBI NO: 17228223 NR Description: hypothetical protein [Nostoc sp. PCC 7120]
  misc_feature (1)..(134): Homolog of NCBI NO: 23042473 NR Description: hypothetical protein [Trichodesmium erythraeum
  misc_feature (1)..(137): Homolog of NCBI NO: 23127812 NR Description: hypothetical protein [Nostoc punctiforme]
  misc_feature (1)..(138): Homolog of NCBI NO: 37700485 NR Description: putative beta-phosphoglucomutase [Oryza sativa]
  misc_feature (1)..(140): Homolog of NCBI NO: 25408616 NR Description: hypothetical protein At2g38740 [imported] -
  misc_feature (1)..(147): Homolog of NCBI NO: 34897820 NR Description: P0514G12.30 [Oryza sativa (japonica
  misc_feature (1)..(138): Homolog of NCBI NO: 37536998 NR Description: putative beta-phosphoglucomutase
  misc_feature (1)..(140): Homolog of NCBI NO: 18404847 NR Description: expressed protein
MERLEPVKGLHKVVQWVKDHGYKRAAVTNAPRINAELMIKLLGLSDFFQAVIVGGECEKPKPAPFPYLKALKELEVSAAHTFIFEDSASGTRAGVAAGMPVVAVSTRNPEKSLQEAGAALIISDYEDQKLWNALEEIDREEAKLKTGGA

SEQ ID NO: 61974 - DNA, 1781 bp, Triticum aestivum
  misc_feature (1)..(1781): Ceres Seq. ID no. 14303615
tcactccgccactccggccccattcgacagagacatcaccggcagcaggttaataatggcgcttcgcgcggcggagctccggcgactcctcctcctccgcggcggggcggtcctcccgctcccgctcgcgtcgcgctgccggccggcgagcacggccgcccgtgacgacgagggagcagggggcaacgcctacgacgtgctcggggtgggagagacgagctcctccgcggagatcaaggcctccttccaccgcctcgccaaggagacccaccccgacgtcgctgccgccgccggttcccgacggttccttcagatcctcgcggcctacgagatcctatccgattcccagcgaagggcgcactatgatagcttcctgcgctcgcagaggctagttatacagaagcatcccaggccatcgcaatatgtatatccatatccatatagttcaggcattgtgatgcctagagaaagtaatgttgtcgagtggcttaaatggtacaggcttactgttgatgacattgttacaaaaaagagaatcgcgacgggttcaggttatttcgatagacttgagagtgaactgtactctgcagtccatgctgcatactatggccccgaggttgagtccatggatctccttcctgattgctttgaagccgaggagaggtctgtgtatgagacatctgagctattgcaccttgtatctggccgtgatctgcttggtattgtcagtctagtcgatagcgtccgagagcggtctgatgcttgtcgtgagaagctgacacattctggttctgcaacctgcggcgttagtccaaatgttgcagtaaacggggagaaatgttcaatacctaggcatgcagatattcacaagcaagagaatgaggatagtgacagtatcccatcagatgcctacaaggacattgaattgcagatatgtgagagagtagtggccactgcaaataggaggctcaagtgcaattgcattgacaattcagacatggaagatcacatacatgtatttcttgttccaaatgaggtggttgcacctgatgtgatgcaagagcatctcctccttggaacaatcactgggttagacaccagtggagaggaaggatcttgctgtgtctatgatggccatggaataaagacccatgtaattgttaagcacaggacactgatggttaaacacatgcactggtatcaatttggagatgaagtttcaccctgcgagtgtcgatgtagcagggctcggttgccacccagcaggttttggctttttgagccacggtgttatatgcatgacactggcggttggtacatcgagacatttgggagagacaagaaagggaggacaactccatcgccgagacattggcatggtgtcaatgaacattctgaaaaccatgctctttcatcatattctggcgtggcgcctggcgaagaaagtgaggtgccagtttaatggcatattaattttaccactagagcagtagacaacaggtggtggcacttgctggctgtgctatattcggcaagacaaggcaaagctggctgagctattattaacatcctaaggtagtatgccacttcgaaagtcattgcattctccgctgctataaaagtttggtttttagcatttctggagtgcctagggttaggtttatctatttcccttcccgcaaaaaaaaggtttatctgtttcccaaagtataatgagtttttttttcgacaaagggtggattcaaagtataatgagtacataaagtaatatgtctgatggc

SEQ ID NO: 61975 - protein, 486 aa, Triticum aestivum
  peptide (1)..(486): Ceres Seq. ID no. 14303616
  misc_feature (62)..(125): Pfam Name: DnaJ domain Pfam Description: DnaJ domain
  misc_feature (64)..(137): Homolog of NCBI NO: 37521966 NR Description: similar to heat shock protein DnaJ [Gloeobacter
  misc_feature (64)..(124): Homolog of NCBI NO: 16079600 NR Description: heat-shock protein [Bacillus subtilis]
  misc_feature (60)..(123): Homolog of NCBI NO: 34912486 NR Description: heat shock protein-like [Oryza sativa (japonica
  misc_feature (58)..(124): Homolog of NCBI NO: 22972332 NR Description: hypothetical protein [Chloroflexus aurantiacus]
  misc_feature (64)..(129): Homolog of NCBI NO: 7488763 NR Description: DnaJ protein homolog - kidney bean (fragment)
  misc_feature (20)..(143): Homolog of NCBI NO: 34894012 NR Description: P0672D08.16 [Oryza sativa (japonica
  misc_feature (62)..(394): Homolog of NCBI NO: 15235570 NR Description: DnaJ protein family [Arabidopsis thaliana]
  misc_feature (188)..(220): Homolog of NCBI NO: 17027260 NR Description: hypothetical protein, 5'-partial
  misc_feature (243)..(466): Homolog of NCBI NO: 17027260 NR Description: hypothetical protein, 5'-partial
  misc_feature (19)..(466): Homolog of NCBI NO: 14488362 NR Description: putative heat shock protein
HSATPAPFDRDITGSRLIMALRAAELRRLLLLRGGAVLPLPLASRCRPASTAARDDEGAGGNAYDVLGVGETSSSAEIKASFHRLAKETHPDVAAAAGSRRFLQILAAYEILSDSQRRAHYDSFLRSQRLVIQKHPRPSQYVYPYPYSSGIVMPRESNVVEWLKWYRLTVDDIVTKKRIATGSGYFDRLESELYSAVHAAYYGPEVESMDLLPDCFEAEERSVYETSELLHLVSGRDLLGIVSLVDSVRERSDACREKLTHSGSATCGVSPNVAVNGEKCSIPRHADIHKQENEDSDSIPSDAYKDIELQICERVVATANRRLKCNCIDNSDMEDHIHVFLVPNEVVAPDVMQEHLLLGTITGLDTSGEEGSCCVYDGHGIKTHVIVKHRTLMVKHMHWYQFGDEVSPCECRCSRARLPPSRFWLFEPRCYMHDTGGWYIETFGRDKKGRTTPSPRHWHGVNEHSENHALSSYSGVAPGEESEVPV

SEQ ID NO: 61976 - protein, 468 aa, Triticum aestivum
  peptide (1)..(468): Ceres Seq. ID no. 14303617
  misc_feature (44)..(107): Pfam Name: DnaJ domain Pfam Description: DnaJ domain
  misc_feature (46)..(119): Homolog of NCBI NO: 37521966 NR Description: similar to heat shock protein DnaJ [Gloeobacter
  misc_feature (46)..(106): Homolog of NCBI NO: 16079600 NR Description: heat-shock protein [Bacillus subtilis]
  misc_feature (42)..(105): Homolog of NCBI NO: 34912486 NR Description: heat shock protein-like [Oryza sativa (japonica
  misc_feature (40)..(106): Homolog of NCBI NO: 22972332 NR Description: hypothetical protein [Chloroflexus aurantiacus]
  misc_feature (46)..(111): Homolog of NCBI NO: 7488763 NR Description: DnaJ protein homolog - kidney bean (fragment)
  misc_feature (2)..(125): Homolog of NCBI NO: 34894012 NR Description: P0672D08.16 [Oryza sativa (japonica
  misc_feature (44)..(376): Homolog of NCBI NO: 15235570 NR Description: DnaJ protein family [Arabidopsis thaliana]
  misc_feature (170)..(202): Homolog of NCBI NO: 17027260 NR Description: hypothetical protein, 5'-partial
  misc_feature (225)..(448): Homolog of NCBI NO: 17027260 NR Description: hypothetical protein, 5'-partial
  misc_feature (1)..(448): Homolog of NCBI NO: 14488362 NR Description: putative heat shock protein
MALRAAELRRLLLLRGGAVLPLPLASRCRPASTAARDDEGAGGNAYDVLGVGETSSSAEIKASFHRLAKETHPDVAAAAGSRRFLQILAAYEILSDSQRRAHYDSFLRSQRLVIQKHPRPSQYVYPYPYSSGIVMPRESNVVEWLKWYRLTVDDIVTKKRIATGSGYFDRLESELYSAVHAAYYGPEVESMDLLPDCFEAEERSVYETSELLHLVSGRDLLGIVSLVDSVRERSDACREKLTHSGSATCGVSPNVAVNGEKCSIPRHADIHKQENEDSDSIPSDAYKDIELQICERVVATANRRLKCNCIDNSDMEDHIHVFLVPNEVVAPDVMQEHLLLGTITGLDTSGEEGSCCVYDGHGIKTHVIVKHRTLMVKHMHWYQFGDEVSPCECRCSRARLPPSRFWLFEPRCYMHDTGGWYIETFGRDKKGRTTPSPRHWHGVNEHSENHALSSYSGVAPGEESEVPV

SEQ ID NO: 61977 - protein, 334 aa, Triticum aestivum
  peptide (1)..(334): Ceres Seq. ID no. 14303618
  misc_feature (1)..(242): Homolog of NCBI NO: 15235570 NR Description: DnaJ protein family [Arabidopsis thaliana]
  misc_feature (36)..(68): Homolog of NCBI NO: 17027260 NR Description: hypothetical protein, 5'-partial
  misc_feature (91)..(314): Homolog of NCBI NO: 17027260 NR Description: hypothetical protein, 5'-partial
  misc_feature (1)..(314): Homolog of NCBI NO: 14488362 NR Description: putative heat shock protein
MPRESNVVEWLKWYRLTVDDIVTKKRIATGSGYFDRLESELYSAVHAAYYGPEVESMDLLPDCFEAEERSVYETSELLHLVSGRDLLGIVSLVDSVRERSDACREKLTHSGSATCGVSPNVAVNGEKCSIPRHADIHKQENEDSDSIPSDAYKDIELQICERVVATANRRLKCNCIDNSDMEDHIHVFLVPNEVVAPDVMQEHLLLGTITGLDTSGEEGSCCVYDGHGIKTHVIVKHRTLMVKHMHWYQFGDEVSPCECRCSRARLPPSRFWLFEPRCYMHDTGGWYIETFGRDKKGRTTPSPRHWHGVNEHSENHALSSYSGVAPGEESEVPV

SEQ ID NO: 61978 - DNA, 1391 bp, Triticum aestivum
  misc_feature (1)..(1391): Ceres Seq. ID no. 13503476
accaaagcattagcacgctcctccacagcccactgctctgcctgtttgtggctttgccgtttcctgttccccactcatcgtcggcgatacaatcttctcgtggattgtctcgtggaggcgggagcgatggggcgtccgtgcgtcggcgctctcctggcgtgcgccgccgttgcagcttcttgctgcggctgcttccagttccagggtgctgctgcggcggcgaccccgtcgttcggggacaacttcgacatcaccggcgccgaggaccacgtcaagacctcccccgacggccagacctggtacctctccctcgacaacaagacgggcgttgggttccagacgaagcagaagtacctgttcgggtggttcagcatgaagctcaagctcgtcgggaacgactccgccggcgtcgtcaccgcctactacatgtgctcggacctggacgcggcgccggagcgcgacgagctggacttcgagttcctgggcaaccgcaccggcgagccgtacatcatccagacgaacgtgtaccgcagcggcgtaggcgggcgggagatgcggcactcgctgtggttcgaccccaccgccgagttccacagctactccatcctctggaaccccaagcagatcgtgtttttcgtggacaaggtgccgatcagggagtaccgcaactcggacaagcccaacaggttcttcccgatcatgaagcccatgtacgtcttctccagcatctggaacgccgacgactgggccacgcgcggggggctggagaagacggactggaccaaggggcccttcgtctcctcctacagcgacttcaccgccgacgcctgcgcctgggccaccggcccggccccgccggcgtgcgcggccgccacggggaacagctggtgggaccagccgccggcgtgggcgctcgacgacggccagcgccgggactcgggctgggtggccaggaacctcgtgatatacgactactgcgacgaccgcaagaggttcccggccgtgccggaggagtgcgcgctcaggaccaagactagctagtagctcctcatggatgggccgccctaggtctcgcttcacatgcatcgttcttttttgggggttcgatcgagtacgtggtgtggtgtagctatcaattggtggatggatttttttttcttttctcttctcttgttttgtgatgatgagatgcacatgcggacgtgcatgtgcacggtgatgcggcattgattgcccggggtggctgtgctctcatgtgagtgatagccctttcggaggaaaatgatgacatttttgttccgatgccttccatgctgcacgacacgagcatggatgggccaaaacttcatagaaatggtcccacgtatacgcatgataatcggcttcgactt

SEQ ID NO: 61979 - protein, 346 aa, Triticum aestivum
  peptide (1)..(346): Ceres Seq. ID no. 13503477
  misc_feature (78)..(262): Pfam Name: Glycosyl hydrolases family 16 Pfam Description: Glycosyl hydrolases family 16
  misc_feature (77)..(339): Homolog of NCBI NO: 7447418 NR Description: probable endo-xyloglucan transferase - upland
  misc_feature (77)..(339): Homolog of NCBI NO: 5070246 NR Description: xyloglucan endo-transglycosylase-like protein
  misc_feature (78)..(339): Homolog of NCBI NO: 3452719 NR Description: endo-xyloglucan transferase (EXGT) [Nicotiana
  misc_feature (78)..(339): Homolog of NCBI NO: 3043422 NR Description: endoxyloglucan transferase [Cicer arietinum]
  misc_feature (78)..(339): Homolog of NCBI NO: 38605537 NR Description: Probable xyloglucan
  misc_feature (41)..(210): Homolog of NCBI NO: 33146647 NR Description: xyloglucan endotransglycosylase-like protein
  misc_feature (51)..(341): Homolog of NCBI NO: 25313538 NR Description: protein T23J18.21 [imported] - Arabidopsis
  misc_feature (71)..(341): Homolog of NCBI NO: 38605338 NR Description: Probable xyloglucan
  misc_feature (51)..(341): Homolog of NCBI NO: 18391291 NR Description: xyloglucan endotransglycosylase, putative
  misc_feature (41)..(346): Homolog of NCBI NO: 27261026 NR Description: putative xyloglucan endotransglycosylase
TKALARSSTAHCSACLWLCRFLFPTHRRRYNLLVDCLVEAGAMGRPCVGALLACAAVAASCCGCFQFQGAAAAATPSFGDNFDITGAEDHVKTSPDGQTWYLSLDNKTGVGFQTKQKYLFGWFSMKLKLVGNDSAGVVTAYYMCSDLDAAPERDELDFEFLGNRTGEPYIIQTNVYRSGVGGREMRHSLWFDPTAEFHSYSILWNPKQIVFFVDKVPIREYRNSDKPNRFFPIMKPMYVFSSIWNADDWATRGGLEKTDWTKGPFVSSYSDFTADACAWATGPAPPACAAATGNSWWDQPPAWALDDGQRRDSGWVARNLVIYDYCDDRKRFPAVPEECALRTKTS

SEQ ID NO: 61980 - protein, 344 aa, Triticum aestivum
  peptide (1)..(344): Ceres Seq. ID no. 13503478
QSISTLLHSPLLCLFVALPFPVPHSSSAIQSSRGLSRGGGSDGASVRRRSPGVRRRCSFLLRLLPVPGCCCGGDPVVRGQLRHHRRRGPRQDLPRRPDLVPLPRQQDGRWVPDEAEVPVRVVQHEAQARRERLRRRRHRLLHVLGPGRGAGARRAGLRVPGQPHRRAVHHPDERVPQRRRRAGDAALAVVRPHRRVPQLLHPLEPQADRVFRGQGADQGVPQLGQAQQVLPDHEAHVRLLQHLERRRLGHARGAGEDGLDQGALRLLLQRLHRRRLRLGHRPGPAGVRGRHGEQLVGPAAGVGARRRPAPGLGLGGQEPRDIRLLRRPQEVPGRAGGVRAQDQD

SEQ ID NO: 61981 - protein, 304 aa, Triticum aestivum
  peptide (1)..(304): Ceres Seq. ID no. 13503479
  misc_feature (36)..(220): Pfam Name: Glycosyl hydrolases family 16 Pfam Description: Glycosyl hydrolases family 16
  misc_feature (35)..(297): Homolog of NCBI NO: 7447418 NR Description: probable endo-xyloglucan transferase - upland
  misc_feature (35)..(297): Homolog of NCBI NO: 5070246 NR Description: xyloglucan endo-transglycosylase-like protein
  misc_feature (36)..(297): Homolog of NCBI NO: 3452719 NR Description: endo-xyloglucan transferase (EXGT) [Nicotiana
  misc_feature (36)..(297): Homolog of NCBI NO: 3043422 NR Description: endoxyloglucan transferase [Cicer arietinum]
  misc_feature (36)..(297): Homolog of NCBI NO: 38605537 NR Description: Probable xyloglucan
  misc_feature (1)..(168): Homolog of NCBI NO: 33146647 NR Description: xyloglucan endotransglycosylase-like protein
  misc_feature (9)..(299): Homolog of NCBI NO: 25313538 NR Description: protein T23J18.21 [imported] - Arabidopsis
  misc_feature (29)..(299): Homolog of NCBI NO: 38605338 NR Description: Probable xyloglucan
  misc_feature (9)..(299): Homolog of NCBI NO: 18391291 NR Description: xyloglucan endotransglycosylase, putative
  misc_feature (1)..(304): Homolog of NCBI NO: 27261026 NR Description: putative xyloglucan endotransglycosylase
MGRPCVGALLACAAVAASCCGCFQFQGAAAAATPSFGDNFDITGAEDHVKTSPDGQTWYLSLDNKTGVGFQTKQKYLFGWFSMKLKLVGNDSAGVVTAYYMCSDLDAAPERDELDFEFLGNRTGEPYIIQTNVYRSGVGGREMRHSLWFDPTAEFHSYSILWNPKQIVFFVDKVPIREYRNSDKPNRFFPIMKPMYVFSSIWNADDWATRGGLEKTDWTKGPFVSSYSDFTADACAWATGPAPPACAAATGNSWWDQPPAWALDDGQRRDSGWVARNLVIYDYCDDRKRFPAVPEECALRTKTS

SEQ ID NO: 61982 - DNA, 1392 bp, Triticum aestivum
  misc_feature (1)..(1392): Ceres Seq. ID no. 13598294
ctagaacatcctaatcgaaaaacaatccacatcaaccttccagttcgtccgtaagcctcagcgccggaagtaccgcgatcgagcgagcgagtttcccgggcccacactgatggctctggttccctcgggctcaggcagcgcgccggtgatcgccgaggtggagatgaacggcggcgccgaccagagcgccaccaccgtgcgagccaccgtcgtgcaggcctccaccgtcttctacgacacccccgccactctcgataaagcagagagattaatagcagaggctgctggatatggttcacagttggtggtgttcccggaagcttttgttggtggttatcctcgtggatccacctttggatttgggatcagtattagtatcactaatccaaaagacaagggaaagggtgaattccagaagtattatgcagccgccatagacgtgcctggtccagaggtcacactcttagctgctatggctgggaaatataaggtctttctggtaatgggtgtgattgagagagaaggttacacactatattgttcagtgctcttctttgaccctctaggtcggtacctgggtaagcaccgcaagctcatgccgacggcattagaacggataatatggggatttggagatggatcaacaattcctgtttatgacactccacttggaaagattggagcccttatttgctgggaaaataagatgccactcttgaggacagcactgtatggtaaaggtattgagatatactgcgctcccacggccgattcaaggccagtgtggcaagcttccatgacacacatcgccatggaggggggatgctttgtgctgtcggcgaaccagttctgccgcagacaggactaccctccgccgtccgagtacgcctttgccggtttaggagaagagccttccccagacaccgtcgtttgccctggaggcagcgttatcatttcgccgtcaggcgaagtcctggcaggtcccaactacgacggagaggcgctgatcacagccgaccttgacatgggagagatcgtccgggccaagtttgattttgacgtggtgggccactactctcggcctgaggtgctgagcttggtggtggatgaccagccgcaccgcccggtgtccttcacctctgccgctgagaaggctccggctgccaagagcgacgacaccgcaaagccctgacgaccttcagctcagtcacaagcagttgatttctatcgatggttctcttttttgtgtgaactgcgaaaagatttctgtcgatagcttaataaagccgatgaaatgtaggctcgggtcgcccgcatgtctgaccgacgcccctgtaactttggctgcttgtaaaaaaaatgccttccggaacaatcagccgaggtccgttc

SEQ ID NO: 61983 - protein, 360 aa, Triticum aestivum
  peptide (1)..(360): Ceres Seq. ID no. 13598295
  misc_feature (20)..(359): Homolog of NCBI NO: 25290267 NR Description: nitrilase (EC 3.5.5.1) 2 [imported] - Arabidopsis
  misc_feature (20)..(359): Homolog of NCBI NO: 15229932 NR Description: nitrilase 2 [Arabidopsis thaliana]
  misc_feature (20)..(359): Homolog of NCBI NO: 25290266 NR Description: nitrilase (EC 3.5.5.1) 2 [imported] - Arabidopsis
  misc_feature (1)..(345): Homolog of NCBI NO: 21593970 NR Description: Nitrilase 4 (sp P46011) [Arabidopsis thaliana]
  misc_feature (1)..(345): Homolog of NCBI NO: 15242205 NR Description: Nitrilase 4 (sp P46011) [Arabidopsis thaliana]
  misc_feature (1)..(346): Homolog of NCBI NO: 37654216 NR Description: nitrilase 1 [Zea mays]
  misc_feature (1)..(352): Homolog of NCBI NO: 3914163 NR Description: NITRILASE 4
  misc_feature (1)..(352): Homolog of NCBI NO: 7435980 NR Description: nitrilase (EC 3.5.5.1) 4B - common tobacco
  misc_feature (1)..(357): Homolog of NCBI NO: 37654214 NR Description: nitrilase 2 [Zea mays]
  misc_feature (1)..(360): Homolog of NCBI NO: 25290269 NR Description: nitrilase-like protein [imported] - rice
MALVPSGSGSAPVIAEVEMNGGADQSATTVRATVVQASTVFYDTPATLDKAERLIAEAAGYGSQLVVFPEAFVGGYPRGSTFGFGISISITNPKDKGKGEFQKYYAAAIDVPGPEVTLLAAMAGKYKVFLVMGVIEREGYTLYCSVLFFDPLGRYLGKHRKLMPTALERIIWGFGDGSTIPVYDTPLGKIGALICWENKMPLLRTALYGKGIEIYCAPTADSRPVWQASMTHIAMEGGCFVLSANQFCRRQDYPPPSEYAFAGLGEEPSPDTVVCPGGSVIISPSGEVLAGPNYDGEALITADLDMGEIVRAKFDFDVVGHYSRPEVLSLVVDDQPHRPVSFTSAAEKAPAAKSDDTAKP

SEQ ID NO: 61984 - protein, 342 aa, Triticum aestivum
  peptide (1)..(342): Ceres Seq. ID no. 13598296
  misc_feature (2)..(341): Homolog of NCBI NO: 25290267 NR Description: nitrilase (EC 3.5.5.1) 2 [imported] - Arabidopsis
  misc_feature (2)..(341): Homolog of NCBI NO: 15229932 NR Description: nitrilase 2 [Arabidopsis thaliana]
  misc_feature (2)..(341): Homolog of NCBI NO: 25290266 NR Description: nitrilase (EC 3.5.5.1) 2 [imported] - Arabidopsis
  misc_feature (1)..(327): Homolog of NCBI NO: 21593970 NR Description: Nitrilase 4 (sp P46011) [Arabidopsis thaliana]
  misc_feature (1)..(327): Homolog of NCBI NO: 15242205 NR Description: Nitrilase 4 (sp P46011) [Arabidopsis thaliana]
  misc_feature (1)..(328): Homolog of NCBI NO: 37654216 NR Description: nitrilase 1 [Zea mays]
  misc_feature (1)..(334): Homolog of NCBI NO: 3914163 NR Description: NITRILASE 4
  misc_feature (1)..(334): Homolog of NCBI NO: 7435980 NR Description: nitrilase (EC 3.5.5.1) 4B - common tobacco
  misc_feature (1)..(339): Homolog of NCBI NO: 37654214 NR Description: nitrilase 2 [Zea mays]
  misc_feature (1)..(342): Homolog of NCBI NO: 25290269 NR Description: nitrilase-like protein [imported] - rice
MNGGADQSATTVRATVVQASTVFYDTPATLDKAERLIAEAAGYGSQLVVFPEAFVGGYPRGSTFGFGISISITNPKDKGKGEFQKYYAAAIDVPGPEVTLLAAMAGKYKVFLVMGVIEREGYTLYCSVLFFDPLGRYLGKHRKLMPTALERIIWGFGDGSTIPVYDTPLGKIGALICWENKMPLLRTALYGKGIEIYCAPTADSRPVWQASMTHIAMEGGCFVLSANQFCRRQDYPPPSEYAFAGLGEEPSPDTVVCPGGSVIISPSGEVLAGPNYDGEALITADLDMGEIVRAKFDFDVVGHYSRPEVLSLVVDDQPHRPVSFTSAAEKAPAAKSDDTAKP

SEQ ID NO: 61985 - protein, 239 aa, Triticum aestivum
  peptide (1)..(239): Ceres Seq. ID no. 13598297
  misc_feature (1)..(238): Homolog of NCBI NO: 25290267 NR Description: nitrilase (EC 3.5.5.1) 2 [imported] - Arabidopsis
  misc_feature (1)..(238): Homolog of NCBI NO: 15229932 NR Description: nitrilase 2 [Arabidopsis thaliana]
  misc_feature (1)..(238): Homolog of NCBI NO: 25290266 NR Description: nitrilase (EC 3.5.5.1) 2 [imported] - Arabidopsis
  misc_feature (1)..(224): Homolog of NCBI NO: 21593970 NR Description: Nitrilase 4 (sp P46011) [Arabidopsis thaliana]
  misc_feature (1)..(224): Homolog of NCBI NO: 15242205 NR Description: Nitrilase 4 (sp P46011) [Arabidopsis thaliana]
  misc_feature (1)..(225): Homolog of NCBI NO: 37654216 NR Description: nitrilase 1 [Zea mays]
  misc_feature (1)..(231): Homolog of NCBI NO: 3914163 NR Description: NITRILASE 4
  misc_feature (1)..(231): Homolog of NCBI NO: 7435980 NR Description: nitrilase (EC 3.5.5.1) 4B - common tobacco
  misc_feature (1)..(236): Homolog of NCBI NO: 37654214 NR Description: nitrilase 2 [Zea mays]
  misc_feature (1)..(239): Homolog of NCBI NO: 25290269 NR Description: nitrilase-like protein [imported] - rice
MAGKYKVFLVMGVIEREGYTLYCSVLFFDPLGRYLGKHRKLMPTALERIIWGFGDGSTIPVYDTPLGKIGALICWENKMPLLRTALYGKGIEIYCAPTADSRPVWQASMTHIAMEGGCFVLSANQFCRRQDYPPPSEYAFAGLGEEPSPDTVVCPGGSVIISPSGEVLAGPNYDGEALITADLDMGEIVRAKFDFDVVGHYSRPEVLSLVVDDQPHRPVSFTSAAEKAPAAKSDDTAKP

SEQ ID NO: 61986 - DNA, 1255 bp, Triticum aestivum
  misc_feature (1)..(1255): Ceres Seq. ID no. 12614972
cgaaaaagcctgctctcacttgattgagcacactacacttttctgctcgcgcgcgacgccgcgtgcggacagtcagtctgtttccatccatctccaatggccgccatcgccaccaagtggacttccggccctgttccgttcacggacgtcgacgacggcacggtgccgaagcggccagccaaggaggagttcgggagcctcgtggcagcgctgccgcgcaagaatcaggccggcctggagctgcgcctgtaccagggcttctggctgccggaccactgggtggcgggcaccgtcgtcttccagcggcgcttcgtcccacgcgccgacgacgtgatcctcgccagctaccccaagtgcggcaccacgtggctcaaggcgctggccttcgccaccatgacgcgcgacgcgtacccggcgccggcgcagcacccgctcctccgcctcaacccgcacgactgcatcccgttcctggacgagatcttcgcggacgggcaggaggccaagctggagaggctcccgtcgccgcgcctcatgaacacgcacatgccgcacaccctgctccccgagtcggtcaccggcgcggacgtcgccggctgtaaggtcgtgtacgtctgcagggaccccaaggacatggtcgtgtcgctgtggcacttcctccggcgccggcagccggacctcccgttcgcggagctgttcgagcacgtctgcgacggcgccgtggccgtcggcccgatctgggaccacgtgctcagctactggcgcgcgagcctcgcgcggcctgacagggtgctcttcctcaggtacgaagacctgctgctggacacgggcaagcacgtgaggcggctggcggagttcatgggccggccgttctcgcccgccgaggagggcgccggcgccgtggaggcggtggtggagctgtgcagcttcgagaagatgaaggggctggaggtgaacaagaagggatcggcgggggcgtaccacgccatgccccgggactctttcttcaggaaaggggtcgccggcgactgggtgaaccacatgacgccggagatggcgacgcggctggatgaggtcgtccgtgacaagttccgcggcacggggctcgcggctccgtgatctggacaatctgcatgcgtgattcgattgtactgtatgcttggctgctggtgcccgttgatttagaataaagatgctgttctcggcacaatcactgcttacatcatcgaataaaggtttaactacgattgtcgattgc

SEQ ID NO: 61987 - protein, 339 aa, Triticum aestivum
  peptide (1)..(339): Ceres Seq. ID no. 12614973
  misc_feature (78)..(335): Pfam Name: Sulfotransferase domain Pfam Description: Sulfotransferase domain
  misc_feature (10)..(336): Homolog of NCBI NO: 38344441 NR Description: OSJNBa0038O10.13 [Oryza sativa (japonica
  misc_feature (35)..(336): Homolog of NCBI NO: 34905060 NR Description: putative flavonol 4'-sulfotransferase
  misc_feature (13)..(339): Homolog of NCBI NO: 34894524 NR Description: putative steroid sulfotransferase
  misc_feature (52)..(274): Homolog of NCBI NO: 30349136 NR Description: STF-1 [Triticum monococcum]
  misc_feature (27)..(335): Homolog of NCBI NO: 37531912 NR Description: putative flavonol 3-sulfotransferase
  misc_feature (1)..(336): Homolog of NCBI NO: 38346451 NR Description: OSJNBa0018J19.12 [Oryza sativa (japonica
  misc_feature (11)..(336): Homolog of NCBI NO: 35215145 NR Description: putative flavonol 3'-sulfotransferase
  misc_feature (1)..(336): Homolog of NCBI NO: 40253319 NR Description: putative flavonol 3-sulfotransferase
  misc_feature (11)..(336): Homolog of NCBI NO: 40253317 NR Description: putative flavonol 3-sulfotransferase
  misc_feature (10)..(322): Homolog of NCBI NO: 34393650 NR Description: putative flavonol 3-sulfotransferase
MAAIATKWTSGPVPFTDVDDGTVPKRPAKEEFGSLVAALPRKNQAGLELRLYQGFWLPDHWVAGTVVFQRRFVPRADDVILASYPKCGTTWLKALAFATMTRDAYPAPAQHPLLRLNPHDCIPFLDEIFADGQEAKLERLPSPRLMNTHMPHTLLPESVTGADVAGCKVVYVCRDPKDMVVSLWHFLRRRQPDLPFAELFEHVCDGAVAVGPIWDHVLSYWRASLARPDRVLFLRYEDLLLDTGKHVRRLAEFMGRPFSPAEEGAGAVEAVVELCSFEKMKGLEVNKKGSAGAYHAMPRDSFFRKGVAGDWVNHMTPEMATRLDEVVRDKFRGTGLAAP

SEQ ID NO: 61988 - protein, 240 aa, Triticum aestivum
  peptide (1)..(240): Ceres Seq. ID no. 12614974
  misc_feature (1)..(236): Pfam Name: Sulfotransferase domain Pfam Description: Sulfotransferase domain
  misc_feature (1)..(237): Homolog of NCBI NO: 38344441 NR Description: OSJNBa0038O10.13 [Oryza sativa (japonica
  misc_feature (1)..(237): Homolog of NCBI NO: 34905060 NR Description: putative flavonol 4'-sulfotransferase
  misc_feature (1)..(240): Homolog of NCBI NO: 34894524 NR Description: putative steroid sulfotransferase
  misc_feature (1)..(175): Homolog of NCBI NO: 30349136 NR Description: STF-1 [Triticum monococcum]
  misc_feature (1)..(236): Homolog of NCBI NO: 37531912 NR Description: putative flavonol 3-sulfotransferase
  misc_feature (1)..(237): Homolog of NCBI NO: 38346451 NR Description: OSJNBa0018J19.12 [Oryza sativa (japonica
  misc_feature (1)..(237): Homolog of NCBI NO: 35215145 NR Description: putative flavonol 3'-sulfotransferase
  misc_feature (1)..(237): Homolog of NCBI NO: 40253319 NR Description: putative flavonol 3-sulfotransferase
  misc_feature (1)..(237): Homolog of NCBI NO: 40253317 NR Description: putative flavonol 3-sulfotransferase
  misc_feature (1)..(223): Homolog of NCBI NO: 34393650 NR Description: putative flavonol 3-sulfotransferase
MTRDAYPAPAQHPLLRLNPHDCIPFLDEIFADGQEAKLERLPSPRLMNTHMPHTLLPESVTGADVAGCKVVYVCRDPKDMVVSLWHFLRRRQPDLPFAELFEHVCDGAVAVGPIWDHVLSYWRASLARPDRVLFLRYEDLLLDTGKHVRRLAEFMGRPFSPAEEGAGAVEAVVELCSFEKMKGLEVNKKGSAGAYHAMPRDSFFRKGVAGDWVNHMTPEMATRLDEVVRDKFRGTGLAAP

SEQ ID NO: 61989 - protein, 194 aa, Triticum aestivum
  peptide (1)..(194): Ceres Seq. ID no. 12614975
  misc_feature (1)..(190): Pfam Name: Sulfotransferase domain Pfam Description: Sulfotransferase domain
  misc_feature (1)..(191): Homolog of NCBI NO: 38344441 NR Description: OSJNBa0038O10.13 [Oryza sativa (japonica
  misc_feature (1)..(191): Homolog of NCBI NO: 34905060 NR Description: putative flavonol 4'-sulfotransferase
  misc_feature (1)..(194): Homolog of NCBI NO: 34894524 NR Description: putative steroid sulfotransferase
  misc_feature (1)..(129): Homolog of NCBI NO: 30349136 NR Description: STF-1 [Triticum monococcum]
  misc_feature (1)..(190): Homolog of NCBI NO: 37531912 NR Description: putative flavonol 3-sulfotransferase
  misc_feature (1)..(191): Homolog of NCBI NO: 38346451 NR Description: OSJNBa0018J19.12 [Oryza sativa (japonica
  misc_feature (1)..(191): Homolog of NCBI NO: 35215145 NR Description: putative flavonol 3'-sulfotransferase
  misc_feature (1)..(191): Homolog of NCBI NO: 40253319 NR Description: putative flavonol 3-sulfotransferase
  misc_feature (1)..(191): Homolog of NCBI NO: 40253317 NR Description: putative flavonol 3-sulfotransferase
  misc_feature (1)..(177): Homolog of NCBI NO: 34393650 NR Description: putative flavonol 3-sulfotransferase
MNTHMPHTLLPESVTGADVAGCKVVYVCRDPKDMVVSLWHFLRRRQPDLPFAELFEHVCDGAVAVGPIWDHVLSYWRASLARPDRVLFLRYEDLLLDTGKHVRRLAEFMGRPFSPAEEGAGAVEAVVELCSFEKMKGLEVNKKGSAGAYHAMPRDSFFRKGVAGDWVNHMTPEMATRLDEVVRDKFRGTGLAAP

SEQ ID NO: 61990 - DNA, 1728 bp, Triticum aestivum
  misc_feature (1)..(1728): Ceres Seq. ID no. 13596013
attacctagagcatcctaatcgaaaaattgtcgattcccctcaaccctagccgccagcggcggccagattttgctagtaacaagtgcttattagcttcacctccccctccagctgccgccgcctgccatctccggcgacgagcagggcggagaaggagaactagccatggcctcggtggcgccggaggttgagaagaaggaggaggaggagcaggtggtgaacccgtgggaggtgtcggcggggaagggcggcatcgactacgacaagctggtcgaccagttcggctgccagcgcctggacgccccgctcatcgaccgcatcgcgcgactcaccggccgccccccgcaccgcttcctccgccgcggcctcttcttcgcccaccgggatttgaacgagatactggacatctacgagaagggggacaagttctacctctacacggggagagggccctcctcagaggcgttgcatctcggacacctcgtccccttcatgttcaccaaatatttgcaggatgctttcaaggttcctctggtgatacagctaactgatgatgagaagttcctgtggaaaaatttgacggtagaggaaagtaaaaggcttgcgcgtgaaaatgcaaaagacattatagcatgcggatttgatgttgaaaggacttttatattctctgattttaattttgttggcggtgccttttacgaaaacatggttaaagtggccagatgtgtgacatataataaagttgtcggaatatttggattcactccagaggatcacattggaaagattagctttcctcctgtgcaagcagttccatcattcccttcttcatttcccaaacacttttctggcaatgaccaactacggtgcctgataccttgtgcaatagaccaggatccttatttcaggatgacccgtgatgttgctccaagaattggttaccagaagccagcactgattgagtcaagatttttccctgcccttcagggggagaacacgaaaatgtcagctagtgatccaaattctgctatatatgtgaccgatagtactaaatatataaagacaaaggtgaataaatatgcattctcaggtggccaggactctgtagaacttcatagaaaacttggagctaaccttgaggttgatgtctcaattaagtacctgaacttcttccttgaagacgatgatgagctcgagcgcataaagaaggcgtacaaggaaggaaggatgctgacgggtgaagtgaagcagcttctggttacggttctttctgagatggttgaaaggcacaaaagagctagagctcgagttaccgaggagatggtcgacgccttcatggctgtgaggcctcttcccaacatgtttggctgagcattgggtgggaagttcataccctttctgtgtggattttattgaattccaggagcaacatatgaagtttcaggatttagttgtaactattaatgtcaacctggccgctcaatcctgtatggcagccactgattttgcaaaatcagcatgtgatatgtttgttttcaagcttgctcgatcactgcaaagatttctatttattggaattagggaacacacacgtgttttttttgaaaccgaggcaaaagatttgcctcgtatattaattaagaggggagagagtacaacacatggcagttacaactttgcttgtcagattgggacatacaacgtaaaaagactactctcgcggcatc

SEQ ID NO: 61991 - protein, 401 aa, Triticum aestivum
  peptide (1)..(401): Ceres Seq. ID no. 13596014
  misc_feature (1)..(396): Homolog of NCBI NO: 37590880 NR Description: Unknown (protein for MGC:73274) [Danio rerio]
  misc_feature (9)..(396): Homolog of NCBI NO: 7428462 NR Description: tryptophan-tRNA ligase (EC 6.1.1.2) [validated] -
  misc_feature (1)..(396): Homolog of NCBI NO: 29144895 NR Description: tryptophanyl-tRNA synthetase [Mus musculus]
  misc_feature (15)..(396): Homolog of NCBI NO: 34328206 NR Description: tryptophanyl-tRNA synthetase [Mus musculus]
  misc_feature (12)..(396): Homolog of NCBI NO: 4759316 NR Description: tryptophanyl-tRNA synthetase; interferon-induced
  misc_feature (1)..(396): Homolog of NCBI NO: 12835778 NR Description: unnamed protein product [Mus musculus]
  misc_feature (12)..(396): Homolog of NCBI NO: 135191 NR Description: Tryptophanyl-tRNA synthetase (Tryptophan--tRNA
  misc_feature (9)..(396): Homolog of NCBI NO: 2851538 NR Description: TRYPTOPHANYL-TRNA SYNTHETASE (TRYPTOPHAN--TRNA
  misc_feature (12)..(396): Homolog of NCBI NO: 32709 NR Description: IFP53 [Homo sapiens]
  misc_feature (7)..(400): Homolog of NCBI NO: 15229319 NR Description: tryptophanyl-tRNA synthetase -related
MASVAPEVEKKEEEEQVVNPWEVSAGKGGIDYDKLVDQFGCQRLDAPLIDRIARLTGRPPHRFLRRGLFFAHRDLNEILDIYEKGDKFYLYTGRGPSSEALHLGHLVPFMFTKYLQDAFKVPLVIQLTDDEKFLWKNLTVEESKRLARENAKDIIACGFDVERTFIFSDFNFVGGAFYENMVKVARCVTYNKVVGIFGFTPEDHIGKISFPPVQAVPSFPSSFPKHFSGNDQLRCLIPCAIDQDPYFRMTRDVAPRIGYQKPALIESRFFPALQGENTKMSASDPNSAIYVTDSTKYIKTKVNKYAFSGGQDSVELHRKLGANLEVDVSIKYLNFFLEDDDELERIKKAYKEGRMLTGEVKQLLVTVLSEMVERHKRARARVTEEMVDAFMAVRPLPNMFG

SEQ ID NO: 61992 - protein, 292 aa, Triticum aestivum
  peptide (1)..(292): Ceres Seq. ID no. 13596015
  misc_feature (1)..(287): Homolog of NCBI NO: 37590880 NR Description: Unknown (protein for MGC:73274) [Danio rerio]
  misc_feature (1)..(287): Homolog of NCBI NO: 7428462 NR Description: tryptophan-tRNA ligase (EC 6.1.1.2) [validated] -
  misc_feature (1)..(287): Homolog of NCBI NO: 29144895 NR Description: tryptophanyl-tRNA synthetase [Mus musculus]
  misc_feature (1)..(287): Homolog of NCBI NO: 34328206 NR Description: tryptophanyl-tRNA synthetase [Mus musculus]
  misc_feature (1)..(287): Homolog of NCBI NO: 4759316 NR Description: tryptophanyl-tRNA synthetase; interferon-induced
  misc_feature (1)..(287): Homolog of NCBI NO: 12835778 NR Description: unnamed protein product [Mus musculus]
  misc_feature (1)..(287): Homolog of NCBI NO: 135191 NR Description: Tryptophanyl-tRNA synthetase (Tryptophan--tRNA
  misc_feature (1)..(287): Homolog of NCBI NO: 2851538 NR Description: TRYPTOPHANYL-TRNA SYNTHETASE (TRYPTOPHAN--TRNA
  misc_feature (1)..(287): Homolog of NCBI NO: 32709 NR Description: IFP53 [Homo sapiens]
  misc_feature (1)..(291): Homolog of NCBI NO: 15229319 NR Description: tryptophanyl-tRNA synthetase -related
MFTKYLQDAFKVPLVIQLTDDEKFLWKNLTVEESKRLARENAKDIIACGFDVERTFIFSDFNFVGGAFYENMVKVARCVTYNKVVGIFGFTPEDHIGKISFPPVQAVPSFPSSFPKHFSGNDQLRCLIPCAIDQDPYFRMTRDVAPRIGYQKPALIESRFFPALQGENTKMSASDPNSAIYVTDSTKYIKTKVNKYAFSGGQDSVELHRKLGANLEVDVSIKYLNFFLEDDDELERIKKAYKEGRMLTGEVKQLLVTVLSEMVERHKRARARVTEEMVDAFMAVRPLPNMFG

SEQ ID NO: 61993 - protein, 221 aa, Triticum aestivum
  peptide (1)..(221): Ceres Seq. ID no. 13596016
  misc_feature (1)..(216): Homolog of NCBI NO: 37590880 NR Description: Unknown (protein for MGC:73274) [Danio rerio]
  misc_feature (1)..(216): Homolog of NCBI NO: 7428462 NR Description: tryptophan-tRNA ligase (EC 6.1.1.2) [validated] -
  misc_feature (1)..(216): Homolog of NCBI NO: 29144895 NR Description: tryptophanyl-tRNA synthetase [Mus musculus]
  misc_feature (1)..(216): Homolog of NCBI NO: 34328206 NR Description: tryptophanyl-tRNA synthetase [Mus musculus]
  misc_feature (1)..(216): Homolog of NCBI NO: 4759316 NR Description: tryptophanyl-tRNA synthetase; interferon-induced
  misc_feature (1)..(216): Homolog of NCBI NO: 12835778 NR Description: unnamed protein product [Mus musculus]
  misc_feature (1)..(216): Homolog of NCBI NO: 135191 NR Description: Tryptophanyl-tRNA synthetase (Tryptophan--tRNA
  misc_feature (1)..(216): Homolog of NCBI NO: 2851538 NR Description: TRYPTOPHANYL-TRNA SYNTHETASE (TRYPTOPHAN--TRNA
  misc_feature (1)..(216): Homolog of NCBI NO: 32709 NR Description: IFP53 [Homo sapiens]
  misc_feature (1)..(220): Homolog of NCBI NO: 15229319 NR Description: tryptophanyl-tRNA synthetase -related
MVKVARCVTYNKVVGIFGFTPEDHIGKISFPPVQAVPSFPSSFPKHFSGNDQLRCLIPCAIDQDPYFRMTRDVAPRIGYQKPALIESRFFPALQGENTKMSASDPNSAIYVTDSTKYIKTKVNKYAFSGGQDSVELHRKLGANLEVDVSIKYLNFFLEDDDELERIKKAYKEGRMLTGEVKQLLVTVLSEMVERHKRARARVTEEMVDAFMAVRPLPNMFG

SEQ ID NO: 61994 - DNA, 1122 bp, Triticum aestivum
  misc_feature (1)..(1122): Ceres Seq. ID no. 14301614
gaaatccccggcttaaacccacgccttcccttcctccccccgcctccgactgcgtccaagaaacccaatcccattcccacctgctgcggctgctccgggatcgaggcgcgcggcggcgatggcgatcgagaagaaggggatgtcggcgtacgaggcggagcgggagaggacggtggaggagaacaagcgcaagatggaggcgctcaacctgcgccacctctccgccgccgtcgccacctacgcccccaagaccccctcccccatgaagcacaagaggcgcaggatcatcgaggcggcgacccccgtcccgtcgccgcccaggaggtcccgccggctcgcccacctccccgaggtcaagtacgccgacgcctgcgcggaggtgggagaagatagtgagagagcgggaaggtggtctcctagaagacgaagtggcagcatctacttagcaggaggtggaggtggaccaatttccatgaaagctaggatggaggcagcaagcaaagcagaggagttagaatcacaacttgaccctgaatttccatccttcatgaagcggatgctacattcacatgtggtgcgagggttctggttgggtctcccaagccatttctgtgacacgtacctgccaaagaatgactgcactatcactttggtggatgagaaagatgaagagttcgagtccaaataccttgcctacaagaaggggctaagtggtggctgggctggttttgctctggatcatgtgattcgggatggagactcgacggtctttcagctgatcaagcctacaaccttcaaggtgcatatcatccgagctgctgttggtgatgatgacaacgaggaaatggagtgagcacaccgtgcagcttcactgctaagaactaacctatcagtggtagatggactagttaggagttgggtatggtttaagctttatctatctggatcgctggtgcggttatgcattttgttggtatgtccaccagtggcttacaagatggcaagtaggatttggggcgtggtgtaggcttttgtgtatcaggattacccgcgcagctatgtactaatatgttcccatgtccaccaatactgataatgagatcagatggcaagtaatcagcc

SEQ ID NO: 61995 - protein, 244 aa, Triticum aestivum
  peptide (1)..(244): Ceres Seq. ID no. 14301615
  misc_feature (10)..(232): Homolog of NCBI NO: 15237157 NR Description: transcriptional factor B3 family [Arabidopsis
  misc_feature (125)..(232): Homolog of NCBI NO: 34904376 NR Description: unnamed protein product [Oryza sativa (japonica
  misc_feature (60)..(243): Homolog of NCBI NO: 30694114 NR Description: expressed protein [Arabidopsis thaliana]
  misc_feature (10)..(244): Homolog of NCBI NO: 9294620 NR Description: gene_id:MVI11.9~unknown protein [Arabidopsis
  misc_feature (1)..(241): Homolog of NCBI NO: 15217278 NR Description: Unknown protein [Oryza sativa]
MAIEKKGMSAYEAERERTVEENKRKMEALNLRHLSAAVATYAPKTPSPMKHKRRRIIEAATPVPSPPRRSRRLAHLPEVKYADACAEVGEDSERAGRWSPRRRSGSIYLAGGGGGPISMKARMEAASKAEELESQLDPEFPSFMKRMLHSHVVRGFWLGLPSHFCDTYLPKNDCTITLVDEKDEEFESKYLAYKKGLSGGWAGFALDHVIRDGDSTVFQLIKPTTFKVHIIRAAVGDDDNEEME

SEQ ID NO: 61996 - protein, 237 aa, Triticum aestivum
  peptide (1)..(237): Ceres Seq. ID no. 14301616
  misc_feature (3)..(225): Homolog of NCBI NO: 15237157 NR Description: transcriptional factor B3 family [Arabidopsis
  misc_feature (118)..(225): Homolog of NCBI NO: 34904376 NR Description: unnamed protein product [Oryza sativa (japonica
  misc_feature (53)..(236): Homolog of NCBI NO: 30694114 NR Description: expressed protein [Arabidopsis thaliana]
  misc_feature (3)..(237): Homolog of NCBI NO: 9294620 NR Description: gene_id:MVI11.9~unknown protein [Arabidopsis
  misc_feature (1)..(234): Homolog of NCBI NO: 15217278 NR Description: Unknown protein [Oryza sativa]
MSAYEAERERTVEENKRKMEALNLRHLSAAVATYAPKTPSPMKHKRRRIIEAATPVPSPPRRSRRLAHLPEVKYADACAEVGEDSERAGRWSPRRRSGSIYLAGGGGGPISMKARMEAASKAEELESQLDPEFPSFMKRMLHSHVVRGFWLGLPSHFCDTYLPKNDCTITLVDEKDEEFESKYLAYKKGLSGGWAGFALDHVIRDGDSTVFQLIKPTTFKVHIIRAAVGDDDNEEME

SEQ ID NO: 61997 - protein, 219 aa, Triticum aestivum
  peptide (1)..(219): Ceres Seq. ID no. 14301617
  misc_feature (1)..(207): Homolog of NCBI NO: 15237157 NR Description: transcriptional factor B3 family [Arabidopsis
  misc_feature (100)..(207): Homolog of NCBI NO: 34904376 NR Description: unnamed protein product [Oryza sativa (japonica
  misc_feature (35)..(218): Homolog of NCBI NO: 30694114 NR Description: expressed protein [Arabidopsis thaliana]
  misc_feature (1)..(219): Homolog of NCBI NO: 9294620 NR Description: gene_id:MVI11.9~unknown protein [Arabidopsis
  misc_feature (1)..(216): Homolog of NCBI NO: 15217278 NR Description: Unknown protein [Oryza sativa]
MEALNLRHLSAAVATYAPKTPSPMKHKRRRIIEAATPVPSPPRRSRRLAHLPEVKYADACAEVGEDSERAGRWSPRRRSGSIYLAGGGGGPISMKARMEAASKAEELESQLDPEFPSFMKRMLHSHVVRGFWLGLPSHFCDTYLPKNDCTITLVDEKDEEFESKYLAYKKGLSGGWAGFALDHVIRDGDSTVFQLIKPTTFKVHIIRAAVGDDDNEEME

SEQ ID NO: 61998 - DNA, 1004 bp, Triticum aestivum
  misc_feature (1)..(1004): Ceres Seq. ID no. 13654659
ctgtcctcgttgtcattattgatcttcgtcttggtcgccctcccttcgcctgcgctcgcgcagcagcaacccgccgctccctccggctggccgtcgtccgtcccgctcccggcgcccgcaaattcttcctcccccctcgacatggcgtcctgcccttcggtcaagaacatcctcgtgctggacgcggaggggaagcgcgtggccgtcaagtactatgccgatgactggccctccgcgtcctccaagctggctttcgagaagtcgctcttcgtgaagacccagaagaccagcgccagagcagaggctgatgtggtaatgttcgatggctacatcattgtgtacaagttcatccaagatctccatttttttgtaactggaggagatgaggagaatgagctcattttagcgtcagttcttcagggattttctgatgctgttggcattcttctcagaaacaatgtagacaaaaggaccgcacttgaaaatctggatctcatctttttgtgccttgacgaagttgttgatggagggattgttctggaaacagatggaaatgtgatagccgagaaggtgtcaggccatggattggaaggagctgggtcgttcactgagcagacgataagccaagccctagcgacagcaagagagcacttcgcgaggtctcttctgaagtagtgtgtgtaggcatctttcgggttggcgatgcgcccagcattgaactcgtgtgtttcctcttgtagcacagtgcacctagtttgcaagaaagaaagaaagagcgagaaaatgacttgaatctttgcacgtgagttcgttcgttcgtctattgttgtggtgctcgtcgacattttgtcgcagagatgtactccctccgttcgaaattacttgtcttgaaaatggatgtatctagaactaaaattccgaacggagggagtatgtgcggcctaagtgcctaactggttaccagattcccttctaaggtctgtataagaaacttgtgatggtgc

SEQ ID NO: 61999 - protein, 224 aa, Triticum aestivum
  peptide (1)..(224): Ceres Seq. ID no. 13654660
  misc_feature (53)..(198): Pfam Name: Clathrin adaptor complex small chain Pfam Description: Clathrin adaptor complex small chain
  misc_feature (60)..(224): Homolog of NCBI NO: 7259350 NR Description: nonclathrin coat protein zeta2-COP [Oryza sativa]
  misc_feature (46)..(224): Homolog of NCBI NO: 7259352 NR Description: nonclathrin coat protein zeta1-COP [Lycopersicon
  misc_feature (45)..(224): Homolog of NCBI NO: 7259354 NR Description: nonclathrin coat protein zeta2-COP [Lycopersicon
  misc_feature (50)..(224): Homolog of NCBI NO: 7380908 NR Description: nonclathrin coat protein zeta2-COP [Zea mays]
  misc_feature (19)..(213): Homolog of NCBI NO: 34908112 NR Description: putative zeta1-COP [Oryza sativa (japonica
  misc_feature (48)..(223): Homolog of NCBI NO: 7380910 NR Description: nonclathrin coat protein zeta1-COP [Zea mays]
  misc_feature (48)..(223): Homolog of NCBI NO: 7678766 NR Description: zeta1-COP [Oryza sativa (japonica cultivar-group)]
LSSLSLLIFVLVALPSPALAQQQPAAPSGWPSSVPLPAPANSSSPLDMASCPSVKNILVLDAEGKRVAVKYYADDWPSASSKLAFEKSLFVKTQKTSARAEADVVMFDGYIIVYKFIQDLHFFVTGGDEENELILASVLQGFSDAVGILLRNNVDKRTALENLDLIFLCLDEVVDGGIVLETDGNVIAEKVSGHGLEGAGSFTEQTISQALATAREHFARSLLK

SEQ ID NO: 62000 - protein, 177 aa, Triticum aestivum
  peptide (1)..(177): Ceres Seq. ID no. 13654661
  misc_feature (6)..(151): Pfam Name: Clathrin adaptor complex small chain Pfam Description: Clathrin adaptor complex small chain
  misc_feature (13)..(177): Homolog of NCBI NO: 7259350 NR Description: nonclathrin coat protein zeta2-COP [Oryza sativa]
  misc_feature (1)..(177): Homolog of NCBI NO: 7259352 NR Description: nonclathrin coat protein zeta1-COP [Lycopersicon
  misc_feature (1)..(177): Homolog of NCBI NO: 7259354 NR Description: nonclathrin coat protein zeta2-COP [Lycopersicon
  misc_feature (3)..(177): Homolog of NCBI NO: 7380908 NR Description: nonclathrin coat protein zeta2-COP [Zea mays]
  misc_feature (1)..(166): Homolog of NCBI NO: 34908112 NR Description: putative zeta1-COP [Oryza sativa (japonica
  misc_feature (1)..(176): Homolog of NCBI NO: 7380910 NR Description: nonclathrin coat protein zeta1-COP [Zea mays]
  misc_feature (1)..(176): Homolog of NCBI NO: 7678766 NR Description: zeta1-COP [Oryza sativa (japonica cultivar-group)]
MASCPSVKNILVLDAEGKRVAVKYYADDWPSASSKLAFEKSLFVKTQKTSARAEADVVMFDGYIIVYKFIQDLHFFVTGGDEENELILASVLQGFSDAVGILLRNNVDKRTALENLDLIFLCLDEVVDGGIVLETDGNVIAEKVSGHGLEGAGSFTEQTISQALATAREHFARSLLK

SEQ ID NO: 62001 - protein, 119 aa, Triticum aestivum
  peptide (1)..(119): Ceres Seq. ID no. 13654662
  misc_feature (1)..(93): Pfam Name: Clathrin adaptor complex small chain Pfam Description: Clathrin adaptor complex small chain
  misc_feature (1)..(119): Homolog of NCBI NO: 7259350 NR Description: nonclathrin coat protein zeta2-COP [Oryza sativa]
  misc_feature (1)..(119): Homolog of NCBI NO: 7259352 NR Description: nonclathrin coat protein zeta1-COP [Lycopersicon
  misc_feature (1)..(119): Homolog of NCBI NO: 7259354 NR Description: nonclathrin coat protein zeta2-COP [Lycopersicon
  misc_feature (1)..(119): Homolog of NCBI NO: 7380908 NR Description: nonclathrin coat protein zeta2-COP [Zea mays]
  misc_feature (1)..(108): Homolog of NCBI NO: 34908112 NR Description: putative zeta1-COP [Oryza sativa (japonica
  misc_feature (1)..(118): Homolog of NCBI NO: 7380910 NR Description: nonclathrin coat protein zeta1-COP [Zea mays]
  misc_feature (1)..(118): Homolog of NCBI NO: 7678766 NR Description: zeta1-COP [Oryza sativa (japonica cultivar-group)]
MFDGYIIVYKFIQDLHFFVTGGDEENELILASVLQGFSDAVGILLRNNVDKRTALENLDLIFLCLDEVVDGGIVLETDGNVIAEKVSGHGLEGAGSFTEQTISQALATAREHFARSLLK

SEQ ID NO: 62002 - DNA, 1299 bp, Triticum aestivum
  misc_feature (1)..(1299): Ceres Seq. ID no. 13662173
attcattcattctccctcccctccttccttcctacctaatcctagaggagcatagctagggttcctccccgcagccgtcgcctcctctcctctcctcaccccgccgccgccggccaacgagatccagccagcgagatccgaccgacgccgtctccgtctccgtctccgcctcgccgccgccgcctgcttcggcatgtcgcattccaacgaagtaaggtacaccgcgcgctccatcacgcctccggcagacagggacagcggctccaagtcgcccccaccacggaggcgcgcggcttccaagtcgcctcccctgcctccccctccccctttccctcccaagggggtgcgcaccatctcgaggtcgcctccacctagtagtagaagacgcagcgtctcgaggtcccctccaccaaagaggcgcggcaggtccaggtccaggtccaggtccaggaacaggagccgctccaggagcagagacaaagacgatgtgaggaatcctggcaacaacctctatgtcactggactgtccacacggacgcaggaaactgacctggagaagttcttcagcaaagagggcaaggttaaagactgccgtgtcgttatcgatcctcgtacgaaagaatcacgtggctttgcgttcgtgaccatggagaatgttgaggatgcaaggcgctgcatcaagtacctgcaccgtactgtacttgaaggccgcctcatcagtgtggcaaaggcaaagagaactcgtgagaggacccctacccctggagaatactgtggtccgagaggcgggcgctcccgggtggagccgcggcggagccgttctccacgccgttccagcaggtcgtcgagggaccggtcaaggtcgccggccgcaaggagggacagggacagcagggacaggaagcgcgactgaatgaaacaaggcaaggggagaaacaaaatgatgctaaaatcacatatcgccgcgagttgtcgagtatgaatgtgtcttggattctttgttgctgaatgaatgtttgtttgatgaaggaggactctagtcagtatttctgctggatgctttctttagataagcagctgatttgtcttgtctttctgttttatcagaggagaggatttccctaacattcatttctttttaggttttgtgttgtgtatggacgatgaaggcgcatttcgtgtttttaaggtttctcgctatcgaatcggatgcgtctatttggttgtatgagcacctttgtcttgtcttggctggatgctaacattattattattattattatgtctgtgatggtatgc

SEQ ID NO: 62003 - protein, 239 aa, Triticum aestivum
  peptide (1)..(239): Ceres Seq. ID no. 13662174
  misc_feature (106)..(177): Pfam Name: RNA recognition motif. (a.k.a. RRM, RBD, or RNP domain) Pfam Description: RNA recognition motif. (a.k.a. RRM, RBD, or RNP
  misc_feature (61)..(209): Homolog of NCBI NO: 16944647 NR Description: conserved hypothetical protein [Neurospora crassa]
  misc_feature (59)..(235): Homolog of NCBI NO: 40738429 NR Description: hypothetical protein AN6676.2 [Aspergillus
  misc_feature (64)..(179): Homolog of NCBI NO: 30680096 NR Description: transformer serine/arginine-rich
  misc_feature (98)..(231): Homolog of NCBI NO: 8778550 NR Description: F22G5.31 [Arabidopsis thaliana]
  misc_feature (91)..(229): Homolog of NCBI NO: 34902002 NR Description: putative transformer serine/arginine-rich
  misc_feature (64)..(231): Homolog of NCBI NO: 18390758 NR Description: transformer serine/arginine-rich
  misc_feature (51)..(231): Homolog of NCBI NO: 28973767 NR Description: putative transformer-SR ribonucleoprotein
  misc_feature (55)..(225): Homolog of NCBI NO: 7489207 NR Description: transformer-SR ribonucleoprotein - common tobacco
  misc_feature (55)..(234): Homolog of NCBI NO: 11275253 NR Description: transformer-2-like protein - liverwort
  misc_feature (1)..(239): Homolog of NCBI NO: 40253470 NR Description: putative transformer-SR ribonucleoprotein
MSHSNEVRYTARSITPPADRDSGSKSPPPRRRAASKSPPLPPPPPFPPKGVRTISRSPPPSSRRRSVSRSPPPKRRGRSRSRSRSRNRSRSRSRDKDDVRNPGNNLYVTGLSTRTQETDLEKFFSKEGKVKDCRVVIDPRTKESRGFAFVTMENVEDARRCIKYLHRTVLEGRLISVAKAKRTRERTPTPGEYCGPRGGRSRVEPRRSRSPRRSSRSSRDRSRSPAARRDRDSRDRKRD

SEQ ID NO: 62004 - DNA, 1610 bp, Triticum aestivum
  misc_feature (1)..(1610): Ceres Seq. ID no. 13596509
ataatctaatcaccaaataaaactagtactactcctcggagcagcagcactgcagcagtggtggtattaattaatcgaacccatcccagcggagaagaagaaaagaagaaggctctccttctcctttaagcttcgaatcatccttccttcccccctccccctccctccctcccacttcatctctccgcgacgaagcttccaaaacccccaaaaggatcccccaatcttcgcctctgcctccggcccgatcaagctctcagcagcggctgccgcgcggctcggcccgggatccatggagaggtacgagctgctcaaggacatcggcgccggcaacttcggcgtcgcgcggctgatgcgcaacaaggagaccaaggagctcgtcgccatgaagtacatcccacggggcctcaagattgacgagaatgtggcgagggagatcataaaccaccggtcgctgcggcaccccaacataatccgattcaaggaggtggtggtcacgccgacgcacctggcgattgtgatggagtacgcggcgggcggcgagctcttcgaccggatctgcaacgccgggaggttcagcgaggacgaggccaggtacttcttccagcagctcatctgcggcgtgagttactgccacttcatgcaaatttgccaccgggacctgaagctggagaacactctgctggacggcagcccggcgccccgcctcaagatctgcgacttcggttattcaaagtcgtcgttgctgcactcgaagcccaagtcgacggtcggcacgccggcgtacatcgccccggaggtgctctcccgccgggaatacgacggcaagacagccgatgtgtggtcttgtggagtgaccctttatgtgatgctagtcggcggttacccttttgaggatcctgatgaccccaagaacttcagaaagaccattgggagaataatgtcaatccaatacaaaataccggagtatgtccacgtatcccaagactgcaagcaactccttgccagtatttttgtcgcaaaccctgcaaagagaataacaatgagggagatcaggaaccacccttggttcttgaagaacttaccaagagagctcacggaagctgcccaagcaatgtactacaagagagacaacagcgccccgacctactcggtccagtccgtggaggggatcatgaagatcgtggaggaggcgcagaaaccgcctccttccaccactccggtggcgggtttcgggtgggcggaggaggacgagcaggaggatggcaagaagccagaggaggaagcggaggaggaagacgaagaaaatgagtatgagaagcagttgaatgaggtccgtgccagcggcgagttccacatcagctagctgatgggggtgcttcactggcgtgagaaggccacagaccggggataaaatttgtcatatagtttgtagtttgtgttttgttctcgagtttttctcttcattctcgtctccggttctgcaacagtgtaaattaccaaagtggttccgtcgctgtctttacaatgactgattaagctagcattgcggaaacataatgtatggaataaatcatcttattgagcatgttcttacaaaaaaaaaaaaa

SEQ ID NO: 62005 - protein, 357 aa, Triticum aestivum
  peptide (1)..(357): Ceres Seq. ID no. 15221902
  misc_feature (4)..(260): Pfam Name: Protein kinase domain Pfam Description: Protein kinase domain
  misc_feature (1)..(357): Homolog of NCBI NO: 19568098 NR Description: osmotic stress-activated protein kinase
MERYELLKDIGAGNFGVARLMRNKETKELVAMKYIPRGLKIDENVAREIINHRSLRHPNIIRFKEVVVTPTHLAIVMEYAAGGELFDRICNAGRFSEDEARYFFQQLICGVSYCHFMQICHRDLKLENTLLDGSPAPRLKICDFGYSKSSLLHSKPKSTVGTPAYIAPEVLSRREYDGKTADVWSCGVTLYVMLVGGYPFEDPDDPKNFRKTIGRIMSIQYKIPEYVHVSQDCKQLLASIFVANPAKRITMREIRNHPWFLKNLPRELTEAAQAMYYKRDNSAPTYSVQSVEGIMKIVEEAQKPPPSTTPVAGFGWAEEDEQEDGKKPEEEAEEEDEENEYEKQLNEVRASGEFHIS

SEQ ID NO: 62006 - protein, 337 aa, Triticum aestivum
  peptide (1)..(337): Ceres Seq. ID no. 15221903
  misc_feature (1)..(240): Pfam Name: Protein kinase domain Pfam Description: Protein kinase domain
  misc_feature (1)..(337): Homolog of NCBI NO: 19568098 NR Description: osmotic stress-activated protein kinase
MRNKETKELVAMKYIPRGLKIDENVAREIINHRSLRHPNIIRFKEVVVTPTHLAIVMEYAAGGELFDRICNAGRFSEDEARYFFQQLICGVSYCHFMQICHRDLKLENTLLDGSPAPRLKICDFGYSKSSLLHSKPKSTVGTPAYIAPEVLSRREYDGKTADVWSCGVTLYVMLVGGYPFEDPDDPKNFRKTIGRIMSIQYKIPEYVHVSQDCKQLLASIFVANPAKRITMREIRNHPWFLKNLPRELTEAAQAMYYKRDNSAPTYSVQSVEGIMKIVEEAQKPPPSTTPVAGFGWAEEDEQEDGKKPEEEAEEEDEENEYEKQLNEVRASGEFHIS

SEQ ID NO: 62007 - protein, 326 aa, Triticum aestivum
  peptide (1)..(326): Ceres Seq. ID no. 15221904
  misc_feature (1)..(229): Pfam Name: Protein kinase domain Pfam Description: Protein kinase domain
  misc_feature (1)..(326): Homolog of NCBI NO: 19568098 NR Description: osmotic stress-activated protein kinase
MKYIPRGLKIDENVAREIINHRSLRHPNIIRFKEVVVTPTHLAIVMEYAAGGELFDRICNAGRFSEDEARYFFQQLICGVSYCHFMQICHRDLKLENTLLDGSPAPRLKICDFGYSKSSLLHSKPKSTVGTPAYIAPEVLSRREYDGKTADVWSCGVTLYVMLVGGYPFEDPDDPKNFRKTIGRIMSIQYKIPEYVHVSQDCKQLLASIFVANPAKRITMREIRNHPWFLKNLPRELTEAAQAMYYKRDNSAPTYSVQSVEGIMKIVEEAQKPPPSTTPVAGFGWAEEDEQEDGKKPEEEAEEEDEENEYEKQLNEVRASGEFHIS

SEQ ID NO: 62008 - DNA, 759 bp, Triticum aestivum
  misc_feature (1)..(759): Ceres Seq. ID no. 12584578
gccagcgctgtacgagccgggcagccacacgcggatccagcgcgggttcggagtcgccctcgcctccgcccgcgaaccagctccgacgcctcaacctcggctcctcgtcgcagctcgccgtcttccacgccaaggtcgacgagatctcgctcctcgccgtcagcaccgccacagtccacaggcgtcagccccacgagcgctatatttttagatgaagcacatattcaagatcatcgcggtactggcggcaatctccgccgtctgggttgcgctccttgaaacctcgacagtccctcgcagttttacttggttgcttcccatctacttggtagtggcgcttggatgctatggcctttttatggttggatatgggctcatgttcttcccaacctgccctcaagaagtggtattactacagcaggatatcatggaggcaaaggatttcctatcaaaaagaggtgttgatgtgagctctgattgaggtcaataccaatgatttatgtttcgtgaccagtttgaagcttcctggatactggatagaaaaaattatgacatttcactgtgtctagatatttgttactaatgcagtctttgtgagtggcgtgttacagttctacattttgttagttcagtggatggtttgtcaggatattagttatgtcaggaaaacagtgtgagaatagctaaatagctaattaatggtttgttaacaagtccatcaatgttcagacatgtttgctatttaacaatctggttttc

SEQ ID NO: 62009 - protein, 92 aa, Triticum aestivum
  peptide (1)..(92): Ceres Seq. ID no. 12584579
ASAVRAGQPHADPARVRSRPRLRPRTSSDASTSAPRRSSPSSTPRSTRSRSSPSAPPQSTGVSPTSAIFLDEAHIQDHRGTGGNLRRLGCAP

SEQ ID NO: 62010 - protein, 89 aa, Triticum aestivum
  peptide (1)..(89): Ceres Seq. ID no. 12584580
  misc_feature (11)..(84): Homolog of NCBI NO: 20138038 NR Description: Dolichol-phosphate mannosyltransferase subunit 3 mannose synthase subunit 3) (Dolichyl-phosphate
  misc_feature (1)..(88): Homolog of NCBI NO: 30315013 NR Description: unknown [Vitis vinifera]
  misc_feature (1)..(89): Homolog of NCBI NO: 18402057 NR Description: expressed protein; protein id: At1g48140.1
MKHIFKIIAVLAAISAVWVALLETSTVPRSFTWLLPIYLVVALGCYGLFMVGYGLMFFPTCPQEVVLLQQDIMEAKDFLSKRGVDVSSD

SEQ ID NO: 62011 - protein, 70 aa, Triticum aestivum
  peptide (1)..(70): Ceres Seq. ID no. 12584581
QRCTSRAATRGSSAGSESPSPPPANQLRRLNLGSSSQLAVFHAKVDEISLLAVSTATVHRRQPHERYIFR

SEQ ID NO: 62012 - DNA, 1138 bp, Triticum aestivum
  misc_feature (1)..(1138): Ceres Seq. ID no. 13596017
gtcaataagtttttctccgccattttccccgtcctccgcgagaagcgcctcgaggtccccgtgtgcggctagctagatcggtggcgcctcccctccctcctcccccgcggaaggcgctcgcccccttcattcccggaaccgattctcgcaagggattcctcgctgctcggctcttcttgaggcatgcagagccagatcgtgtgccatgggtgcaggagcgttctactctaccccagaggggcccccagcgtgtgctgcgccgtgtgccacgccgtcaccagcgcgccgcctccaggaatggagatggctcagcttatatgcgtcggctgtcgaactttattgatgtatactcgcaatgcaactactgtcagatgctcatgttgtgatacagtcaaccttgccagaccagcaccgccagtgaatagtatagctcatgtgaactgtggccagtgccagacggtgttaatgtatccatacggagcatcttctgtcaaatgtgctatctgcaattttattacgaacatcggaatgaacaccgtgagacctttgccacctacaatgcatgcaccaaacggaatttcatatagtgtcccatcgacctctgcgccatccgctcaatcgcagaatgtaacggtggtcgtcgaaaacccaatgacagtagatgacaagggaaaattggtgagcaacgtcgtagtcggggttacgtccggcgggaaaaagtagcaaaacatgtcagcgcttgtaccaagtgatgccctgttctgtgtcttataatctggagttgggaacactttgtattatactcgtgtctggtgatcgaccgatcggtcgcatagaagaaaaccccgaagcgcgtaaacggactgcgccaacaaaaaaagagagtgcgggtgtggataatacggaaaaaaactgtattttgcttaccccctagattcttttgtatgtaaaatgtgggcactgtcagacctcactgcgtgatcaaatcctctctgtcctgtcctgtgtcctgtcctggaggggcctctcgttctggatgaataacagcaaataactttgcatatggctggccccacctgtcaatgattggtaattaaacgactgtaattattgtgatgaataattctttgaaggctgt

SEQ ID NO: 62013 - protein, 179 aa, Triticum aestivum
  peptide (1)..(179): Ceres Seq. ID no. 13596018
  misc_feature (43)..(175): Homolog of NCBI NO: 29467531 NR Description: P0582D05.23 [Oryza sativa (japonica
  misc_feature (1)..(73): Homolog of NCBI NO: 25403154 NR Description: probable zinc-finger protein, 7043-7771
  misc_feature (1)..(114): Homolog of NCBI NO: 29467531 NR Description: P0582D05.23 [Oryza sativa (japonica
  misc_feature (1)..(115): Homolog of NCBI NO: 34905200 NR Description: P0672D01.2 [Oryza sativa (japonica
  misc_feature (1)..(118): Homolog of NCBI NO: 18398482 NR Description: zinc-finger protein -related [Arabidopsis
  misc_feature (1)..(119): Homolog of NCBI NO: 30692719 NR Description: zinc-finger protein -related [Arabidopsis
  misc_feature (1)..(178): Homolog of NCBI NO: 30685085 NR Description: zinc-finger protein Lsd1 [Arabidopsis thaliana]
  misc_feature (1)..(178): Homolog of NCBI NO: 30685083 NR Description: zinc-finger protein Lsd1 [Arabidopsis thaliana]
  misc_feature (1)..(179): Homolog of NCBI NO: 17981380 NR Description: zinc finger protein LSD2 [Brassica oleracea]
  misc_feature (1)..(178): Homolog of NCBI NO: 17981378 NR Description: zinc finger protein LSD1 [Brassica oleracea]
MQSQIVCHGCRSVLLYPRGAPSVCCAVCHAVTSAPPPGMEMAQLICVGCRTLLMYTRNATTVRCSCCDTVNLARPAPPVNSIAHVNCGQCQTVLMYPYGASSVKCAICNFITNIGMNTVRPLPPTMHAPNGISYSVPSTSAPSAQSQNVTVVVENPMTVDDKGKLVSNVVVGVTSGGKK

SEQ ID NO: 62014 - protein, 141 aa, Triticum aestivum
  peptide (1)..(141): Ceres Seq. ID no. 13596019
  misc_feature (5)..(137): Homolog of NCBI NO: 29467531 NR Description: P0582D05.23 [Oryza sativa (japonica
  misc_feature (1)..(35): Homolog of NCBI NO: 25403154 NR Description: probable zinc-finger protein, 7043-7771
  misc_feature (1)..(76): Homolog of NCBI NO: 29467531 NR Description: P0582D05.23 [Oryza sativa (japonica
  misc_feature (1)..(77): Homolog of NCBI NO: 34905200 NR Description: P0672D01.2 [Oryza sativa (japonica
  misc_feature (1)..(80): Homolog of NCBI NO: 18398482 NR Description: zinc-finger protein -related [Arabidopsis
  misc_feature (1)..(81): Homolog of NCBI NO: 30692719 NR Description: zinc-finger protein -related [Arabidopsis
  misc_feature (1)..(140): Homolog of NCBI NO: 30685085 NR Description: zinc-finger protein Lsd1 [Arabidopsis thaliana]
  misc_feature (1)..(140): Homolog of NCBI NO: 30685083 NR Description: zinc-finger protein Lsd1 [Arabidopsis thaliana]
  misc_feature (1)..(141): Homolog of NCBI NO: 17981380 NR Description: zinc finger protein LSD2 [Brassica oleracea]
  misc_feature (1)..(140): Homolog of NCBI NO: 17981378 NR Description: zinc finger protein LSD1 [Brassica oleracea]
MEMAQLICVGCRTLLMYTRNATTVRCSCCDTVNLARPAPPVNSIAHVNCGQCQTVLMYPYGASSVKCAICNFITNIGMNTVRPLPPTMHAPNGISYSVPSTSAPSAQSQNVTVVVENPMTVDDKGKLVSNVVVGVTSGGKK

SEQ ID NO: 62015 - protein, 139 aa, Triticum aestivum
  peptide (1)..(139): Ceres Seq. ID no. 13596020
  misc_feature (3)..(135): Homolog of NCBI NO: 29467531 NR Description: P0582D05.23 [Oryza sativa (japonica
  misc_feature (1)..(33): Homolog of NCBI NO: 25403154 NR Description: probable zinc-finger protein, 7043-7771
  misc_feature (1)..(74): Homolog of NCBI NO: 29467531 NR Description: P0582D05.23 [Oryza sativa (japonica
  misc_feature (1)..(75): Homolog of NCBI NO: 34905200 NR Description: P0672D01.2 [Oryza sativa (japonica
  misc_feature (1)..(78): Homolog of NCBI NO: 18398482 NR Description: zinc-finger protein -related [Arabidopsis
  misc_feature (1)..(79): Homolog of NCBI NO: 30692719 NR Description: zinc-finger protein -related [Arabidopsis
  misc_feature (1)..(138): Homolog of NCBI NO: 30685085 NR Description: zinc-finger protein Lsd1 [Arabidopsis thaliana]
  misc_feature (1)..(138): Homolog of NCBI NO: 30685083 NR Description: zinc-finger protein Lsd1 [Arabidopsis thaliana]
  misc_feature (1)..(139): Homolog of NCBI NO: 17981380 NR Description: zinc finger protein LSD2 [Brassica oleracea]
  misc_feature (1)..(138): Homolog of NCBI NO: 17981378 NR Description: zinc finger protein LSD1 [Brassica oleracea]
MAQLICVGCRTLLMYTRNATTVRCSCCDTVNLARPAPPVNSIAHVNCGQCQTVLMYPYGASSVKCAICNFITNIGMNTVRPLPPTMHAPNGISYSVPSTSAPSAQSQNVTVVVENPMTVDDKGKLVSNVVVGVTSGGKK

SEQ ID NO: 62016 - DNA, 1906 bp, Triticum aestivum
  misc_feature (1)..(1906): Ceres Seq. ID no. 15179739
ccccgccgcctcgtccacctgtcgccggcgcgccgccactgccaccgccagcgagattgcgacctgagaggtcccgcgtcgtcgtgctgttcccggctctaccttcgccgcggccaccatgatctgtgcaatctccggcgaggtgccggatgagccggtggtatcaaagaggtcggggctcctctttgagcggcggctcatcgagcgctacattgaggaccatggaaagtgtccagttacgaaggaggaactctccatggacgacatcgtgctggtgaagaccaacaaggtcgtgaggcccaggcctctgcaggctgcaagcattcccggactccttggaatctttcaaaacgagtgggatgctcttatgctttctaattttgctttggagcagcagcttcacacagcaagacaagaacttagtcatgcgttataccagcatgatgctgcctgccgtgttatagccagattaaagaaggaaagagatgagtctagagcacttttggctctagctgagagacagattcccgcttcgatggcaggagttgcacctgcagctgttgtttccaatggaaaaagagcaatggaggatgaaattggccctgatgggaagaagatacgccctggtatcaatcctgtcatgatcgatgaactaacagagtgtaataccatgctttctgcccagcgtaagaaacgacaggtaccaccaagtttggcatcaattgatgaactggagagatatactcagatctctagtcatccactccacaagacaaacaagccgggcattttgtctatggatatccatccgtcaaaggacatagttgcaactgggggtattgatacgaatgcagtgctatttgataggacatctggtcaaatcctgtgtacacttgctggtcactccaagaagataaccactttgaaatttgttccacgggatgagctcgtggtaactggatcagcagataagactgttcggatttggcaagggggtgaggagggaaactatagttgcatccatactttgaaagatcataccgctgaggtcgaagctgttactgtgcatgcgactcagaagtactttgtgaccgcggccaaggataatacttggtgcttctatgatatttcaactgggtcttgcctctcacaggttggcgaggcttcaggacaagagggatatacatctgcgtctttccacccagatggtcttatccttggaacaggaactactgaagctgttgtcaaaatttgggatgtgaaaactcagtccaatgttgcaaagtttgaggggcatgctggacctgtcactgctatgtccttctctgaaaatggttacttcctggcgactgctgctcttgatggtgtcaagctttgggatctaaggaaattgagaaattttaggactttctcgccatatgattcggatacgccgacaaattctgtggaatttgattttagcggtacctatcttgctgttgctggttcagatataagggtttaccaagtagccaacgtcaagacggaatggaatcttatcaagaccttgccagatttgtcaggaacagggaaagtgacctctgcgaagtttggcactgatgccaaatatatcgccgtcggctctatggaccgtaacctgaggatatttgggcctcctggagatgatcaaatggatgatgatgcaaaaccatcggccgagtgaggaaatgcagtgtacctggttttacttgtttgatgctccctgtgctctcttttggcagtgaatggatgggttgcgtatgaggaaaagcagggtcctcagggagcaatggcgtgggcgtccgccgatgtaaagacattattgtattgtaggcttcactaattttctaatgaggatataatttgttttgaagaggaatacaatccc

SEQ ID NO: 62017 - protein, 527 aa, Triticum aestivum
  peptide (1)..(527): Ceres Seq. ID no. 15179740
  misc_feature (299)..(336): Pfam Name: WD domain, G-beta repeat Pfam Description: WD domain, G-beta repeat
  misc_feature (1)..(32): Homolog of NCBI NO: 25406791 NR Description: hypothetical protein [imported] - Arabidopsis
  misc_feature (461)..(525): Homolog of NCBI NO: 25406791 NR Description: hypothetical protein [imported] - Arabidopsis
  misc_feature (336)..(446): Homolog of NCBI NO: 25406791 NR Description: hypothetical protein [imported] - Arabidopsis
  misc_feature (107)..(285): Homolog of NCBI NO: 25406791 NR Description: hypothetical protein [imported] - Arabidopsis
  misc_feature (310)..(506): Homolog of NCBI NO: 25408261 NR Description: probable PRP19-like spliceosomal protein
  misc_feature (1)..(285): Homolog of NCBI NO: 25408261 NR Description: probable PRP19-like spliceosomal protein
  misc_feature (1)..(506): Homolog of NCBI NO: 30685653 NR Description: transducin / WD-40 repeat protein family
  misc_feature (1)..(506): Homolog of NCBI NO: 30685651 NR Description: transducin / WD-40 repeat protein family
  misc_feature (1)..(525): Homolog of NCBI NO: 18390401 NR Description: transducin / WD-40 repeat protein family
  misc_feature (1)..(527): Homolog of NCBI NO: 37535206 NR Description: putative WD-repeat containing protein
MICAISGEVPDEPVVSKRSGLLFERRLIERYIEDHGKCPVTKEELSMDDIVLVKTNKVVRPRPLQAASIPGLLGIFQNEWDALMLSNFALEQQLHTARQELSHALYQHDAACRVIARLKKERDESRALLALAERQIPASMAGVAPAAVVSNGKRAMEDEIGPDGKKIRPGINPVMIDELTECNTMLSAQRKKRQVPPSLASIDELERYTQISSHPLHKTNKPGILSMDIHPSKDIVATGGIDTNAVLFDRTSGQILCTLAGHSKKITTLKFVPRDELVVTGSADKTVRIWQGGEEGNYSCIHTLKDHTAEVEAVTVHATQKYFVTAAKDNTWCFYDISTGSCLSQVGEASGQEGYTSASFHPDGLILGTGTTEAVVKIWDVKTQSNVAKFEGHAGPVTAMSFSENGYFLATAALDGVKLWDLRKLRNFRTFSPYDSDTPTNSVEFDFSGTYLAVAGSDIRVYQVANVKTEWNLIKTLPDLSGTGKVTSAKFGTDAKYIAVGSMDRNLRIFGPPGDDQMDDDAKPSAE

SEQ ID NO: 62018 - protein, 481 aa, Triticum aestivum
  peptide (1)..(481): Ceres Seq. ID no. 15179741
  misc_feature (253)..(290): Pfam Name: WD domain, G-beta repeat Pfam Description: WD domain, G-beta repeat
  misc_feature (1)..(464): Homolog of NCBI NO: 28278498 NR Description: Similar to nuclear matrix protein NMP200 related
  misc_feature (415)..(479): Homolog of NCBI NO: 25406791 NR Description: hypothetical protein [imported] - Arabidopsis
  misc_feature (290)..(400): Homolog of NCBI NO: 25406791 NR Description: hypothetical protein [imported] - Arabidopsis
  misc_feature (61)..(239): Homolog of NCBI NO: 25406791 NR Description: hypothetical protein [imported] - Arabidopsis
  misc_feature (264)..(460): Homolog of NCBI NO: 25408261 NR Description: probable PRP19-like spliceosomal protein
  misc_feature (1)..(239): Homolog of NCBI NO: 25408261 NR Description: probable PRP19-like spliceosomal protein
  misc_feature (1)..(460): Homolog of NCBI NO: 30685653 NR Description: transducin / WD-40 repeat protein family
  misc_feature (1)..(460): Homolog of NCBI NO: 30685651 NR Description: transducin / WD-40 repeat protein family
  misc_feature (1)..(479): Homolog of NCBI NO: 18390401 NR Description: transducin / WD-40 repeat protein family
  misc_feature (1)..(481): Homolog of NCBI NO: 37535206 NR Description: putative WD-repeat containing protein
MDDIVLVKTNKVVRPRPLQAASIPGLLGIFQNEWDALMLSNFALEQQLHTARQELSHALYQHDAACRVIARLKKERDESRALLALAERQIPASMAGVAPAAVVSNGKRAMEDEIGPDGKKIRPGINPVMIDELTECNTMLSAQRKKRQVPPSLASIDELERYTQISSHPLHKTNKPGILSMDIHPSKDIVATGGIDTNAVLFDRTSGQILCTLAGHSKKITTLKFVPRDELVVTGSADKTVRIWQGGEEGNYSCIHTLKDHTAEVEAVTVHATQKYFVTAAKDNTWCFYDISTGSCLSQVGEASGQEGYTSASFHPDGLILGTGTTEAVVKIWDVKTQSNVAKFEGHAGPVTAMSFSENGYFLATAALDGVKLWDLRKLRNFRTFSPYDSDTPTNSVEFDFSGTYLAVAGSDIRVYQVANVKTEWNLIKTLPDLSGTGKVTSAKFGTDAKYIAVGSMDRNLRIFGPPGDDQMDDDAKPSAE

SEQ ID NO: 62019 - protein, 444 aa, Triticum aestivum
  peptide (1)..(444): Ceres Seq. ID no. 15179742
  misc_feature (216)..(253): Pfam Name: WD domain, G-beta repeat Pfam Description: WD domain, G-beta repeat
  misc_feature (1)..(427): Homolog of NCBI NO: 28278498 NR Description: Similar to nuclear matrix protein NMP200 related
  misc_feature (378)..(442): Homolog of NCBI NO: 25406791 NR Description: hypothetical protein [imported] - Arabidopsis
  misc_feature (253)..(363): Homolog of NCBI NO: 25406791 NR Description: hypothetical protein [imported] - Arabidopsis
  misc_feature (24)..(202): Homolog of NCBI NO: 25406791 NR Description: hypothetical protein [imported] - Arabidopsis
  misc_feature (227)..(423): Homolog of NCBI NO: 25408261 NR Description: probable PRP19-like spliceosomal protein
  misc_feature (1)..(202): Homolog of NCBI NO: 25408261 NR Description: probable PRP19-like spliceosomal protein
  misc_feature (1)..(423): Homolog of NCBI NO: 30685653 NR Description: transducin / WD-40 repeat protein family
  misc_feature (1)..(423): Homolog of NCBI NO: 30685651 NR Description: transducin / WD-40 repeat protein family
  misc_feature (1)..(442): Homolog of NCBI NO: 18390401 NR Description: transducin / WD-40 repeat protein family
  misc_feature (1)..(444): Homolog of NCBI NO: 37535206 NR Description: putative WD-repeat containing protein
MLSNFALEQQLHTARQELSHALYQHDAACRVIARLKKERDESRALLALAERQIPASMAGVAPAAVVSNGKRAMEDEIGPDGKKIRPGINPVMIDELTECNTMLSAQRKKRQVPPSLASIDELERYTQISSHPLHKTNKPGILSMDIHPSKDIVATGGIDTNAVLFDRTSGQILCTLAGHSKKITTLKFVPRDELVVTGSADKTVRIWQGGEEGNYSCIHTLKDHTAEVEAVTVHATQKYFVTAAKDNTWCFYDISTGSCLSQVGEASGQEGYTSASFHPDGLILGTGTTEAVVKIWDVKTQSNVAKFEGHAGPVTAMSFSENGYFLATAALDGVKLWDLRKLRNFRTFSPYDSDTPTNSVEFDFSGTYLAVAGSDIRVYQVANVKTEWNLIKTLPDLSGTGKVTSAKFGTDAKYIAVGSMDRNLRIFGPPGDDQMDDDAKPSAE

SEQ ID NO: 62020 - DNA, 1798 bp, Triticum aestivum
  misc_feature (1)..(1798): Ceres Seq. ID no. 13596021
cacacaaacccgcaaaaacaatccatcccccaaaaccccaccgccccgcggcggcggcggcggcgtcgcgatggacccttcctcggccggcgctggcggcaactcgctgccgtcggtcggccccgacgggcagaagcggcgcgtgtgctacttctacgactcggaggtgggcaactactactacgggcagggccacccgatgaagccgcaccgcatccgcatgacccactcgctgctggcgcagtacggcctcctcgaccagatgcaggtgctgcgccccaaccccgcccgcgaccgcgacctctgccgcttccacgccgacgactacatctccttcctccgctccgtcacgcccgagacgcagcaggaccagatccgggccctcaagcgcttcaacgtcggcgaggactgccccgtcttcgacggcctctacagcttctgccagacctacgcgggggcctccgtcggcggcgccgtcaagctcaaccacggccttgacatcgccatcaactggtcggggggcctgcaccacgcgaagaagtgcgaggcctcagggttctgctacgtcaacgacatcgtactcgccatactcgagctcctcaagcaccaccagcgagttctctatgtcgatattgatatccaccatggtgacggagttgaggaggcattctacacgacagacagggttatgacagtctcattccacaagtttggggattatttcccaggtacaggggatgtccgtgatattgggcattcaaaaggaaagtattactcccttaatgtccctctggatgatgggattgacgacgaaagctaccagtccctgtttaagcctataatggccaaagttatggaggttttccagcctggtgcagttgtttttcaatgtggcgccgattcgttatctggggataggttgggttgcttcaatctttcgatcagaggtcatgcagaatgcgtgaagtacatgaggtctttcaatgttccattgttgcttcttggcggtggtggctataccataagaaatgtcgcacgatgttggtgttatgagacaggagttgcacttggccaagagctcgaggataagatgcctgtcaatgagtactatgaatacttcggtccagattacactcttcatgtggcaccaagtaacatggagaacaaaaatacacgctacgaactggataatataagaaccaaacttcttgacaatctttcaaaacttcgacatgcccctagcgttcagtttcaagagcgacctcctgatactgagttccctgagccgggtgaagatgaagacgatcaggatgaaaggcatgatgaccctgattctgatatggaaatggattatcacacacctttggaagactcagcaaggagaatcactattcaaggtacaagagttaagagagaatcagctggagctgagacaaaagatcagcaggatggtagcagagtaacaggtgaacatagaggaccagaacctatggcagaagacatgggtccctccaagcaagctcatgtcgacgctaatgccatgaccgtggatgagcccggaattgtcaagaccgaatcaggaagctctaccaagttgcctgacccaccagccatctaccagaagccatgattgtaagcattcggaccgtgcggcttcttgcatgtgtttttgacagtaaaaagacgaagtgacgagtggtagctcgagtgtctgacccatgtatacatgtagcatggattattaagctgtaatatgtatagtcgattaaatgagccgcgaggcagaattttcttggcc

SEQ ID NO: 62021 - protein, 542 aa, Triticum aestivum
  peptide (1)..(542): Ceres Seq. ID no. 13596022
  misc_feature (43)..(506): Homolog of NCBI NO: 6680193 NR Description: histone deacetylase 1 [Mus musculus]
  misc_feature (43)..(503): Homolog of NCBI NO: 19526271 NR Description: histone deacetylase [Takifugu rubripes]
  misc_feature (43)..(506): Homolog of NCBI NO: 30583783 NR Description: Homo sapiens histone deacetylase 1 [synthetic
  misc_feature (43)..(506): Homolog of NCBI NO: 13128860 NR Description: histone deacetylase 1
  misc_feature (32)..(534): Homolog of NCBI NO: 9022439 NR Description: histone deacetylase [Mesembryanthemum
  misc_feature (32)..(529): Homolog of NCBI NO: 2318131 NR Description: histone deacetylase [Arabidopsis thaliana]
  misc_feature (32)..(529): Homolog of NCBI NO: 15233694 NR Description: Histone deacetylase [Arabidopsis thaliana]
  misc_feature (24)..(509): Homolog of NCBI NO: 12698880 NR Description: histone deacetylase HD1 [Oryza sativa]
  misc_feature (24)..(542): Homolog of NCBI NO: 3023947 NR Description: Probable histone deacetylase (RPD3 homolog)
  misc_feature (24)..(542): Homolog of NCBI NO: 14550104 NR Description: histone deacetylase HDA101 [Zea mays]
TQTRKNNPSPKTPPPRGGGGGVAMDPSSAGAGGNSLPSVGPDGQKRRVCYFYDSEVGNYYYGQGHPMKPHRIRMTHSLLAQYGLLDQMQVLRPNPARDRDLCRFHADDYISFLRSVTPETQQDQIRALKRFNVGEDCPVFDGLYSFCQTYAGASVGGAVKLNHGLDIAINWSGGLHHAKKCEASGFCYVNDIVLAILELLKHHQRVLYVDIDIHHGDGVEEAFYTTDRVMTVSFHKFGDYFPGTGDVRDIGHSKGKYYSLNVPLDDGIDDESYQSLFKPIMAKVMEVFQPGAVVFQCGADSLSGDRLGCFNLSIRGHAECVKYMRSFNVPLLLLGGGGYTIRNVARCWCYETGVALGQELEDKMPVNEYYEYFGPDYTLHVAPSNMENKNTRYELDNIRTKLLDNLSKLRHAPSVQFQERPPDTEFPEPGEDEDDQDERHDDPDSDMEMDYHTPLEDSARRITIQGTRVKRESAGAETKDQQDGSRVTGEHRGPEPMAEDMGPSKQAHVDANAMTVDEPGIVKTESGSSTKLPDPPAIYQKP

SEQ ID NO: 62022 - protein, 519 aa, Triticum aestivum
  peptide (1)..(519): Ceres Seq. ID no. 13596023
  misc_feature (20)..(483): Homolog of NCBI NO: 6680193 NR Description: histone deacetylase 1 [Mus musculus]
  misc_feature (20)..(480): Homolog of NCBI NO: 19526271 NR Description: histone deacetylase [Takifugu rubripes]
  misc_feature (20)..(483): Homolog of NCBI NO: 30583783 NR Description: Homo sapiens histone deacetylase 1 [synthetic
  misc_feature (20)..(483): Homolog of NCBI NO: 13128860 NR Description: histone deacetylase 1
  misc_feature (9)..(511): Homolog of NCBI NO: 9022439 NR Description: histone deacetylase [Mesembryanthemum
  misc_feature (9)..(506): Homolog of NCBI NO: 2318131 NR Description: histone deacetylase [Arabidopsis thaliana]
  misc_feature (9)..(506): Homolog of NCBI NO: 15233694 NR Description: Histone deacetylase [Arabidopsis thaliana]
  misc_feature (1)..(486): Homolog of NCBI NO: 12698880 NR Description: histone deacetylase HD1 [Oryza sativa]
  misc_feature (1)..(519): Homolog of NCBI NO: 3023947 NR Description: Probable histone deacetylase (RPD3 homolog)
  misc_feature (1)..(519): Homolog of NCBI NO: 14550104 NR Description: histone deacetylase HDA101 [Zea mays]
MDPSSAGAGGNSLPSVGPDGQKRRVCYFYDSEVGNYYYGQGHPMKPHRIRMTHSLLAQYGLLDQMQVLRPNPARDRDLCRFHADDYISFLRSVTPETQQDQIRALKRFNVGEDCPVFDGLYSFCQTYAGASVGGAVKLNHGLDIAINWSGGLHHAKKCEASGFCYVNDIVLAILELLKHHQRVLYVDIDIHHGDGVEEAFYTTDRVMTVSFHKFGDYFPGTGDVRDIGHSKGKYYSLNVPLDDGIDDESYQSLFKPIMAKVMEVFQPGAVVFQCGADSLSGDRLGCFNLSIRGHAECVKYMRSFNVPLLLLGGGGYTIRNVARCWCYETGVALGQELEDKMPVNEYYEYFGPDYTLHVAPSNMENKNTRYELDNIRTKLLDNLSKLRHAPSVQFQERPPDTEFPEPGEDEDDQDERHDDPDSDMEMDYHTPLEDSARRITIQGTRVKRESAGAETKDQQDGSRVTGEHRGPEPMAEDMGPSKQAHVDANAMTVDEPGIVKTESGSSTKLPDPPAIYQKP

SEQ ID NO: 62023 - protein, 476 aa, Triticum aestivum
  peptide (1)..(476): Ceres Seq. ID no. 13596024
  misc_feature (1)..(440): Homolog of NCBI NO: 6680193 NR Description: histone deacetylase 1 [Mus musculus]
  misc_feature (1)..(437): Homolog of NCBI NO: 19526271 NR Description: histone deacetylase [Takifugu rubripes]
  misc_feature (1)..(440): Homolog of NCBI NO: 30583783 NR Description: Homo sapiens histone deacetylase 1 [synthetic
  misc_feature (1)..(440): Homolog of NCBI NO: 13128860 NR Description: histone deacetylase 1
  misc_feature (1)..(468): Homolog of NCBI NO: 9022439 NR Description: histone deacetylase [Mesembryanthemum
  misc_feature (1)..(463): Homolog of NCBI NO: 2318131 NR Description: histone deacetylase [Arabidopsis thaliana]
  misc_feature (1)..(463): Homolog of NCBI NO: 15233694 NR Description: Histone deacetylase [Arabidopsis thaliana]
  misc_feature (1)..(443): Homolog of NCBI NO: 12698880 NR Description: histone deacetylase HD1 [Oryza sativa]
  misc_feature (1)..(476): Homolog of NCBI NO: 3023947 NR Description: Probable histone deacetylase (RPD3 homolog)
  misc_feature (1)..(476): Homolog of NCBI NO: 14550104 NR Description: histone deacetylase HDA101 [Zea mays]
MKPHRIRMTHSLLAQYGLLDQMQVLRPNPARDRDLCRFHADDYISFLRSVTPETQQDQIRALKRFNVGEDCPVFDGLYSFCQTYAGASVGGAVKLNHGLDIAINWSGGLHHAKKCEASGFCYVNDIVLAILELLKHHQRVLYVDIDIHHGDGVEEAFYTTDRVMTVSFHKFGDYFPGTGDVRDIGHSKGKYYSLNVPLDDGIDDESYQSLFKPIMAKVMEVFQPGAVVFQCGADSLSGDRLGCFNLSIRGHAECVKYMRSFNVPLLLLGGGGYTIRNVARCWCYETGVALGQELEDKMPVNEYYEYFGPDYTLHVAPSNMENKNTRYELDNIRTKLLDNLSKLRHAPSVQFQERPPDTEFPEPGEDEDDQDERHDDPDSDMEMDYHTPLEDSARRITIQGTRVKRESAGAETKDQQDGSRVTGEHRGPEPMAEDMGPSKQAHVDANAMTVDEPGIVKTESGSSTKLPDPPAIYQKP

SEQ ID NO: 62024 - DNA, 1584 bp, Triticum aestivum
  misc_feature (1)..(1584): Ceres Seq. ID no. 13596025
ttwcctaraacatyctaattgaaaaaagtgacaaggaaatcaagaacagctcaagaccatggaggcaccgagaaatcacggcgcgccatgcctgctccttctgctggcactagctgcccaatggtgcagtgtctcgacggcgagctgcagcttcacgatatccaactactgcactcacaccatctggccggggacgatggccggcgcgggcacgccgcagctgcccacgacggggttcaggctagaccccgggcagaccgtgcggatcccggcgccggccggttggtccggccggatatgggcgcgcacggggtgcaacttcagcaccgacggctcaggcgcggccgccggcgcggtcgcgtgccagaccggcgactgcggtggtggacacatggagtgcggcggcacgggcgggaagccgccagcgacgctcttcgagatcacgctggggaagggcggccccgccgaccaggacttctatgacgtgagcctcgtcgacgggtacaacctgcccgtcgtcgccgtcccgcgggcgcggcagggcagctgcaatgccaccggctgcgccgccgacctcaacctctcatgtcccaaggagctgcaggtggccggcggcaatggtggcggcccggtggcatgccagagcgcgtgcgaggcgttcacgcaggacaagtactgctgcagtggcgcctacgcgacgccagacacctgcagcccgacggcctactcgtccgtcttcaagtcggcgtgcccgcgggcctacagctacgcctacgacgacggcagcagcctcttcacctgcaacgccgtcgactacaccatcgcgttctgcctccctccagccgggttgaacatgcctgctgatgctaacggtgctcctcctgctgacaacaatggtggtggaagcgcatacgtgccgcccccgacaggcaacagcggggctgggagcgtctaccagccaccccctgcaggtaacaatggtgccggaagtgcctaccagccgcctccaacaggcaacaatggcgtcggaagtgcctaccagacacctccgactggcaccaatggcattggaagcacctacgagacacccttggctagcagcaatggcgtcggaagtgccttccagccgcccctgacgggcgacgacaatggcgtgagaagcgcctaccagccggggatgaccccgtcgtcggcgagcacgcgatacggtcagctatggtttctgctacctgcagcgctcgtgttctttaaatgatcaatctccatgaaaggccagccagtgtttcatgtcgagccggccttcgagcttccgaatacatgagggattggatgatcttaggcgcggaagaaagaagaggctcgaagcagagtacatccaagcatagatcttgtaggagtttctgacagattcacagtagtcgcaacttaaaaccctcctgtattcagtaactagatagtactggtggtgcagattgggggagatgtaaatattggcttctttcatgtagaccaacaatgaaatctactccagtagtacaaattgtatactcattaattccattattaataaggaatggtatactc

SEQ ID NO: 62025 - protein, 398 aa, Triticum aestivum
  peptide (1)..(398): Ceres Seq. ID no. 15221740
  misc_feature (36)..(258): Pfam Name: Thaumatin family Pfam Description: Thaumatin family
  misc_feature (31)..(261): Homolog of NCBI NO: 7442169 NR Description: pathogenesis-related protein F20M13.230 -
  misc_feature (12)..(275): Homolog of NCBI NO: 15233437 NR Description: thaumatin family [Arabidopsis thaliana]
  misc_feature (13)..(262): Homolog of NCBI NO: 37531042 NR Description: putative thaumatin-like protein
  misc_feature (13)..(261): Homolog of NCBI NO: 30692042 NR Description: thaumatin family [Arabidopsis thaliana]
  misc_feature (31)..(324): Homolog of NCBI NO: 7442168 NR Description: pathogenesis-related protein F20M13.220 -
  misc_feature (24)..(324): Homolog of NCBI NO: 18420282 NR Description: thaumatin-like protein, putative [Arabidopsis
  misc_feature (24)..(324): Homolog of NCBI NO: 21592749 NR Description: putative thaumatin-like protein [Arabidopsis
  misc_feature (4)..(379): Homolog of NCBI NO: 37531036 NR Description: putative thaumatin-like protein
  misc_feature (24)..(258): Homolog of NCBI NO: 15238593 NR Description: thaumatin-like protein, putative [Arabidopsis
  misc_feature (1)..(315): Homolog of NCBI NO: 34905146 NR Description: putative pathogenesis-related protein
MEAPRNHGAPCLLLLLALAAQWCSVSTASCSFTISNYCTHTIWPGTMAGAGTPQLPTTGFRLDPGQTVRIPAPAGWSGRIWARTGCNFSTDGSGAAAGAVACQTGDCGGGHMECGGTGGKPPATLFEITLGKGGPADQDFYDVSLVDGYNLPVVAVPRARQGSCNATGCAADLNLSCPKELQVAGGNGGGPVACQSACEAFTQDKYCCSGAYATPDTCSPTAYSSVFKSACPRAYSYAYDDGSSLFTCNAVDYTIAFCLPPAGLNMPADANGAPPADNNGGGSAYVPPPTGNSGAGSVYQPPPAGNNGAGSAYQPPPTGNNGVGSAYQTPPTGTNGIGSTYETPLASSNGVGSAFQPPLTGDDNGVRSAYQPGMTPSSASTRYGQLWFLLPAALVFFK

SEQ ID NO: 62026 - protein, 352 aa, Triticum aestivum
  peptide (1)..(352): Ceres Seq. ID no. 15221741
  misc_feature (1)..(212): Pfam Name: Thaumatin family Pfam Description: Thaumatin family
  misc_feature (1)..(215): Homolog of NCBI NO: 7442169 NR Description: pathogenesis-related protein F20M13.230 -
  misc_feature (1)..(229): Homolog of NCBI NO: 15233437 NR Description: thaumatin family [Arabidopsis thaliana]
  misc_feature (1)..(216): Homolog of NCBI NO: 37531042 NR Description: putative thaumatin-like protein
  misc_feature (1)..(215): Homolog of NCBI NO: 30692042 NR Description: thaumatin family [Arabidopsis thaliana]
  misc_feature (1)..(278): Homolog of NCBI NO: 7442168 NR Description: pathogenesis-related protein F20M13.220 -
  misc_feature (1)..(278): Homolog of NCBI NO: 18420282 NR Description: thaumatin-like protein, putative [Arabidopsis
  misc_feature (1)..(278): Homolog of NCBI NO: 21592749 NR Description: putative thaumatin-like protein [Arabidopsis
  misc_feature (1)..(333): Homolog of NCBI NO: 37531036 NR Description: putative thaumatin-like protein
  misc_feature (1)..(212): Homolog of NCBI NO: 15238593 NR Description: thaumatin-like protein, putative [Arabidopsis
  misc_feature (1)..(269): Homolog of NCBI NO: 34905146 NR Description: putative pathogenesis-related protein
MAGAGTPQLPTTGFRLDPGQTVRIPAPAGWSGRIWARTGCNFSTDGSGAAAGAVACQTGDCGGGHMECGGTGGKPPATLFEITLGKGGPADQDFYDVSLVDGYNLPVVAVPRARQGSCNATGCAADLNLSCPKELQVAGGNGGGPVACQSACEAFTQDKYCCSGAYATPDTCSPTAYSSVFKSACPRAYSYAYDDGSSLFTCNAVDYTIAFCLPPAGLNMPADANGAPPADNNGGGSAYVPPPTGNSGAGSVYQPPPAGNNGAGSAYQPPPTGNNGVGSAYQTPPTGTNGIGSTYETPLASSNGVGSAFQPPLTGDDNGVRSAYQPGMTPSSASTRYGQLWFLLPAALVFFK

SEQ ID NO: 62027 - protein, 287 aa, Triticum aestivum
  peptide (1)..(287): Ceres Seq. ID no. 15221742
  misc_feature (1)..(147): Pfam Name: Thaumatin family Pfam Description: Thaumatin family
  misc_feature (1)..(150): Homolog of NCBI NO: 7442169 NR Description: pathogenesis-related protein F20M13.230 -
  misc_feature (1)..(164): Homolog of NCBI NO: 15233437 NR Description: thaumatin family [Arabidopsis thaliana]
  misc_feature (1)..(151): Homolog of NCBI NO: 37531042 NR Description: putative thaumatin-like protein
  misc_feature (1)..(150): Homolog of NCBI NO: 30692042 NR Description: thaumatin family [Arabidopsis thaliana]
  misc_feature (1)..(213): Homolog of NCBI NO: 7442168 NR Description: pathogenesis-related protein F20M13.220 -
  misc_feature (1)..(213): Homolog of NCBI NO: 18420282 NR Description: thaumatin-like protein, putative [Arabidopsis
  misc_feature (1)..(213): Homolog of NCBI NO: 21592749 NR Description: putative thaumatin-like protein [Arabidopsis
  misc_feature (1)..(268): Homolog of NCBI NO: 37531036 NR Description: putative thaumatin-like protein
  misc_feature (1)..(147): Homolog of NCBI NO: 15238593 NR Description: thaumatin-like protein, putative [Arabidopsis
  misc_feature (1)..(204): Homolog of NCBI NO: 34905146 NR Description: putative pathogenesis-related protein
MECGGTGGKPPATLFEITLGKGGPADQDFYDVSLVDGYNLPVVAVPRARQGSCNATGCAADLNLSCPKELQVAGGNGGGPVACQSACEAFTQDKYCCSGAYATPDTCSPTAYSSVFKSACPRAYSYAYDDGSSLFTCNAVDYTIAFCLPPAGLNMPADANGAPPADNNGGGSAYVPPPTGNSGAGSVYQPPPAGNNGAGSAYQPPPTGNNGVGSAYQTPPTGTNGIGSTYETPLASSNGVGSAFQPPLTGDDNGVRSAYQPGMTPSSASTRYGQLWFLLPAALVFFK

SEQ ID NO: 62028 - DNA, 1338 bp, Triticum aestivum
  misc_feature (1)..(1338): Ceres Seq. ID no. 13596408
ttacctagaacatcctaatcgaaaaaatttactcccaaaccaagccaaacgaaccagcgccgcagcccgcagcgcacccatcccaccaaacaaacagctagcaggcgaggcgacccgctccgacctcgagccgatgccgacgccgtacagcgcggcggcgctgcagcagcaccagcgtctggtctcctcctccggcggcctggcggcgacgggggcccacaggtgcggcgagcacgacgggacggtgccgccggaggtggcgcggcaccacgagcacgcggcgccgggggggcgctgctgctgctcggcggtggtgcagcgcgtggcggcgccggcggcggacgtgtgggccgtggtccggcgcttcgaccagccgcaggcgtacaagagcttcgtgcgcagctgcgcgctgctggacggcgacggcggcgtgggcacgctgcgcgaggtgcgcgtggtgtcgggcctccccgcggcgtccagccgggagcggctggagatcctggacgacgagcggcacgtgctgagcttcagcgtggtgggcggcgagcaccggctccgcaactaccggtcggtgaccacggtgcacccggcgccgggggagagcgcgtcggcgacgctggtggtggagtcgtacgtggtggacgtgccccccgggaacacccccgaggacacccgcgtcttcgtggacaccatcgtcaagtgcaacctccagtccctcgcccgcaccgccgagaagctcgccggccggggggcggcctacggcgcgctgccgtgatcgatcgatccgaccggaacccgcagtcgccggcccgcgcctccctccggtggtcaactcgagcccggccctcccggctcggccgcaggggcgtttcggtaaaatcgcgcaccgattttccgattaatgaatccaaatccatggtggtggtggtgcgcgggtggtggcgaccgattatttttctcttgttctttctggcgtgaaggcgaggggtcggtgggtcggttcggaccggtcggtgcgctttcgcggctggcccctcgctgtttctccttatcgcgagacacacccccctgtagtagtggtagctctagtttttgttcgttcccctttgtttgatctcgggtaagatgatgataagatttgacaggaattgaggagtaaaaactagcttcgaccgatgcaaggctcatcgacatctctgtatatatacttttagtttcccgttccattgtgtgtgttgtcatcatcaccattttggtcgtgacatttcatcaatcaaatttacaagatgttcaacgaggcacaacggaccagagccgtcacggtcttgttggacc

SEQ ID NO: 62029 - protein, 258 aa, Triticum aestivum
  peptide (1)..(258): Ceres Seq. ID no. 13596409
  misc_feature (100)..(242): Pfam Name: Pathogenesis-related protein Bet v I family Pfam Description: Pathogenesis-related protein Bet v I family
  misc_feature (54)..(258): Homolog of NCBI NO: 37537066 NR Description: unknown protein [Oryza sativa (japonica
  misc_feature (86)..(250): Homolog of NCBI NO: 25348264 NR Description: hypothetical protein F6F3.16 - Arabidopsis
  misc_feature (86)..(250): Homolog of NCBI NO: 21593547 NR Description: unknown [Arabidopsis thaliana]
  misc_feature (86)..(250): Homolog of NCBI NO: 18378830 NR Description: expressed protein [Arabidopsis thaliana]
  misc_feature (77)..(244): Homolog of NCBI NO: 15225245 NR Description: Bet v I allergen family [Arabidopsis thaliana]
  misc_feature (82)..(245): Homolog of NCBI NO: 25348262 NR Description: hypothetical protein At2g40330 [imported] -
  misc_feature (82)..(245): Homolog of NCBI NO: 18405351 NR Description: Bet v I allergen family [Arabidopsis thaliana]
  misc_feature (82)..(246): Homolog of NCBI NO: 15239114 NR Description: expressed protein [Arabidopsis thaliana]
  misc_feature (87)..(248): Homolog of NCBI NO: 18404709 NR Description: expressed protein [Arabidopsis thaliana]
  misc_feature (48)..(248): Homolog of NCBI NO: 34907924 NR Description: B1088C09.9 [Oryza sativa (japonica
YLEHPNRKNLLPNQAKRTSAAARSAPIPPNKQLAGEATRSDLEPMPTPYSAAALQQHQRLVSSSGGLAATGAHRCGEHDGTVPPEVARHHEHAAPGGRCCCSAVVQRVAAPAADVWAVVRRFDQPQAYKSFVRSCALLDGDGGVGTLREVRVVSGLPAASSRERLEILDDERHVLSFSVVGGEHRLRNYRSVTTVHPAPGESASATLVVESYVVDVPPGNTPEDTRVFVDTIVKCNLQSLARTAEKLAGRGAAYGALP

SEQ ID NO: 62030 - protein, 214 aa, Triticum aestivum
  peptide (1)..(214): Ceres Seq. ID no. 13596410
  misc_feature (56)..(198): Pfam Name: Pathogenesis-related protein Bet v I family Pfam Description: Pathogenesis-related protein Bet v I family
  misc_feature (10)..(214): Homolog of NCBI NO: 37537066 NR Description: unknown protein [Oryza sativa (japonica
  misc_feature (42)..(206): Homolog of NCBI NO: 25348264 NR Description: hypothetical protein F6F3.16 - Arabidopsis
  misc_feature (42)..(206): Homolog of NCBI NO: 21593547 NR Description: unknown [Arabidopsis thaliana]
  misc_feature (42)..(206): Homolog of NCBI NO: 18378830 NR Description: expressed protein [Arabidopsis thaliana]
  misc_feature (33)..(200): Homolog of NCBI NO: 15225245 NR Description: Bet v I allergen family [Arabidopsis thaliana]
  misc_feature (38)..(201): Homolog of NCBI NO: 25348262 NR Description: hypothetical protein At2g40330 [imported] -
  misc_feature (38)..(201): Homolog of NCBI NO: 18405351 NR Description: Bet v I allergen family [Arabidopsis thaliana]
  misc_feature (38)..(202): Homolog of NCBI NO: 15239114 NR Description: expressed protein [Arabidopsis thaliana]
  misc_feature (43)..(204): Homolog of NCBI NO: 18404709 NR Description: expressed protein [Arabidopsis thaliana]
  misc_feature (4)..(204): Homolog of NCBI NO: 34907924 NR Description: B1088C09.9 [Oryza sativa (japonica
MPTPYSAAALQQHQRLVSSSGGLAATGAHRCGEHDGTVPPEVARHHEHAAPGGRCCCSAVVQRVAAPAADVWAVVRRFDQPQAYKSFVRSCALLDGDGGVGTLREVRVVSGLPAASSRERLEILDDERHVLSFSVVGGEHRLRNYRSVTTVHPAPGESASATLVVESYVVDVPPGNTPEDTRVFVDTIVKCNLQSLARTAEKLAGRGAAYGALP

SEQ ID NO: 62031 - DNA, 1082 bp, Triticum aestivum
  misc_feature (1)..(1082): Ceres Seq. ID no. 12592832
actctccaccgatcccctcacccccaccggcggcgcacagctcgacgacccgcgcgatcctgcggaggcggcagtcatggtgcacgtcaacttctaccgcaactatgggaagaccttcaagaagccaaggcgtccgtatgagaaggagcgtcttgacgctgagctgaagctggttggggagtacggtctgcgggccaagcgtgagctctatcgtgtgcagtacgccctcagccgcatccgaaatgctgccagggagctgctcaccctggatgagaagaacccccgccgtatctttgagggtgcagcgctcctgcgccgcatgaaccgctacggtcttctcactgaggaacagaacaagcttgattacgtgcttgccctcactgttgacaacttcctccagcgccgtctccagaccatcgtcttcaagaatggcatggccaagtcaatccatcatgctcgtgtcctcatcagacagcgccacatcagggttggaaagcagctcgtcaacattccttctttcatggtgagggtggacactgagaaacacgtcgacttctcgctcaccagccccctgggtggtggccaacctggaagagtgaagcggaagaaccagaagaaggcctcaggtggtggtggtgacgacggcgaggaggaggaagactaagcgctcagcctcgacccgcataacttccgttgcagaaatgttgagattgccttgtggaacttgcaacgtgaaatgattcaaactttggttcgttcttagaaacttagtggtgtagagctttcgttgcttcagctatcgattctaaaattaaacttatggttgtcagttttgcttggttagtgaccaccgagcataagaagtgaactcagtgaggctgcttcgttttttgtgaaccaaacgtatcttgttatcggtttgacagccctggttctgagttattttactctgcatgaagtgttactgttgtccttgctatccttctcttttgtctggttggctaggttggtgtgtcgaccgaatgatcacaataagtgctatatagtactctttccaaggctataattccaattgtagtatt

SEQ ID NO: 62032 - protein, 220 aa, Triticum aestivum
  peptide (1)..(220): Ceres Seq. ID no. 12592833
  misc_feature (31)..(133): Pfam Name: Ribosomal protein S4/S9 N-terminal domain Pfam Description: Ribosomal protein S4/S9 N-terminal domain
  misc_feature (37)..(220): Homolog of NCBI NO: 27735416 NR Description: Similar to ribosomal protein S9 [Xenopus laevis]
  misc_feature (37)..(220): Homolog of NCBI NO: 13592067 NR Description: ribosomal protein S9 [Rattus norvegicus]
  misc_feature (37)..(219): Homolog of NCBI NO: 15294029 NR Description: 40S ribosomal protein S9 [Ictalurus punctatus]
  misc_feature (37)..(220): Homolog of NCBI NO: 14141193 NR Description: ribosomal protein S9; 40S ribosomal protein S9
  misc_feature (33)..(219): Homolog of NCBI NO: 1710780 NR Description: 40S ribosomal protein S9 (S7)
  misc_feature (35)..(220): Homolog of NCBI NO: 24661707 NR Description: Ribosomal protein S9 CG3395-PA
  misc_feature (33)..(220): Homolog of NCBI NO: 40741183 NR Description: RS9_PODAN 40S ribosomal protein S9 (S7)
  misc_feature (26)..(219): Homolog of NCBI NO: 6440857 NR Description: 40S ribosomal protein S9 [Chlamydomonas sp. HS-5]
  misc_feature (26)..(219): Homolog of NCBI NO: 15242241 NR Description: 40S ribosomal protein - like; protein id:
  misc_feature (26)..(218): Homolog of NCBI NO: 15242498 NR Description: 40S ribosomal protein S9-like
LSTDPLTPTGGAQLDDPRDPAEAAVMVHVNFYRNYGKTFKKPRRPYEKERLDAELKLVGEYGLRAKRELYRVQYALSRIRNAARELLTLDEKNPRRIFEGAALLRRMNRYGLLTEEQNKLDYVLALTVDNFLQRRLQTIVFKNGMAKSIHHARVLIRQRHIRVGKQLVNIPSFMVRVDTEKHVDFSLTSPLGGGQPGRVKRKNQKKASGGGGDDGEEEED

SEQ ID NO: 62033 - protein, 195 aa, Triticum aestivum
  peptide (1)..(195): Ceres Seq. ID no. 12592834
  misc_feature (6)..(108): Pfam Name: Ribosomal protein S4/S9 N-terminal domain Pfam Description: Ribosomal protein S4/S9 N-terminal domain
  misc_feature (12)..(195): Homolog of NCBI NO: 27735416 NR Description: Similar to ribosomal protein S9 [Xenopus laevis]
  misc_feature (12)..(195): Homolog of NCBI NO: 13592067 NR Description: ribosomal protein S9 [Rattus norvegicus]
  misc_feature (12)..(194): Homolog of NCBI NO: 15294029 NR Description: 40S ribosomal protein S9 [Ictalurus punctatus]
  misc_feature (12)..(195): Homolog of NCBI NO: 14141193 NR Description: ribosomal protein S9; 40S ribosomal protein S9
  misc_feature (8)..(194): Homolog of NCBI NO: 1710780 NR Description: 40S ribosomal protein S9 (S7)
  misc_feature (10)..(195): Homolog of NCBI NO: 24661707 NR Description: Ribosomal protein S9 CG3395-PA
  misc_feature (8)..(195): Homolog of NCBI NO: 40741183 NR Description: RS9_PODAN 40S ribosomal protein S9 (S7)
  misc_feature (1)..(194): Homolog of NCBI NO: 6440857 NR Description: 40S ribosomal protein S9 [Chlamydomonas sp. HS-5]
  misc_feature (1)..(194): Homolog of NCBI NO: 15242241 NR Description: 40S ribosomal protein - like; protein id:
  misc_feature (1)..(193): Homolog of NCBI NO: 15242498 NR Description: 40S ribosomal protein S9-like
MVHVNFYRNYGKTFKKPRRPYEKERLDAELKLVGEYGLRAKRELYRVQYALSRIRNAARELLTLDEKNPRRIFEGAALLRRMNRYGLLTEEQNKLDYVLALTVDNFLQRRLQTIVFKNGMAKSIHHARVLIRQRHIRVGKQLVNIPSFMVRVDTEKHVDFSLTSPLGGGQPGRVKRKNQKKASGGGGDDGEEEED

SEQ ID NO: 62034 - protein, 114 aa, Triticum aestivum
  peptide (1)..(114): Ceres Seq. ID no. 12592835
  misc_feature (28)..(75): Pfam Name: S4 domain Pfam Description: S4 domain
  misc_feature (1)..(114): Homolog of NCBI NO: 27735416 NR Description: Similar to ribosomal protein S9 [Xenopus laevis]
  misc_feature (1)..(114): Homolog of NCBI NO: 13592067 NR Description: ribosomal protein S9 [Rattus norvegicus]
  misc_feature (1)..(113): Homolog of NCBI NO: 15294029 NR Description: 40S ribosomal protein S9 [Ictalurus punctatus]
  misc_feature (1)..(114): Homolog of NCBI NO: 14141193 NR Description: ribosomal protein S9; 40S ribosomal protein S9
  misc_feature (1)..(113): Homolog of NCBI NO: 1710780 NR Description: 40S ribosomal protein S9 (S7)
  misc_feature (1)..(114): Homolog of NCBI NO: 24661707 NR Description: Ribosomal protein S9 CG3395-PA
  misc_feature (1)..(114): Homolog of NCBI NO: 40741183 NR Description: RS9_PODAN 40S ribosomal protein S9 (S7)
  misc_feature (1)..(113): Homolog of NCBI NO: 6440857 NR Description: 40S ribosomal protein S9 [Chlamydomonas sp. HS-5]
  misc_feature (1)..(113): Homolog of NCBI NO: 15242241 NR Description: 40S ribosomal protein - like; protein id:
  misc_feature (1)..(112): Homolog of NCBI NO: 15242498 NR Description: 40S ribosomal protein S9-like
MNRYGLLTEEQNKLDYVLALTVDNFLQRRLQTIVFKNGMAKSIHHARVLIRQRHIRVGKQLVNIPSFMVRVDTEKHVDFSLTSPLGGGQPGRVKRKNQKKASGGGGDDGEEEED

SEQ ID NO: 62035 - DNA, 869 bp, Triticum aestivum
  misc_feature (1)..(869): Ceres Seq. ID no. 12587306
acccccatcccacatccaagacaagaagcgcctggagcttgccatggctgccaatccagatcgggaggtgtgccaccgggcagggagaggagggaagatgctgctgccggtgatggccgtcttggcggcggtggtgctggcgtcgctgccgtcggcggcggtggcgaccaactacacggtgggcgacgagaaggggtggaaccccaaggtggactacacctcctgggtgaagaagcaccgccccttctacaagggcgactggctcctgttcgagtaccagaatgggcggtcggacgtggtgcaggtggacgaggtcgggtacgacaactgcgacaaggagagcgccatcagcagccacagcaaggggaccagctacgcgttccagctcaaggaggccaaggactacttcttcatctgcagctacggctactgctactccggcatgaagctcgccgtcaccgccaagaagggccccgcctcttcctcccccgactccggctcatcctcctcctcctcctcctcgccggccgccaagtcatcctccaaatccgccgccccccccatcgccgcccgcaacgccgctcccctcgccgccgccgtgggcgccgcggccatgctactcaggatgctctgatcagttgatctggcttgcaattccgttctccattaagtccagtttggctcagatcttgtcagattttctcttctctgttaatttattcctccccctcctccttggttaagcttaaacattggttcttgtgcgcttgattgttccattttcctttttcttattttgtcgattttgatccgaatggtgtctggtcgatggttgtagtcgaggtgccaaattaaagattttaagtgtg

SEQ ID NO: 62036 - protein, 213 aa, Triticum aestivum
  peptide (1)..(213): Ceres Seq. ID no. 12587307
  misc_feature (12)..(132): Homolog of NCBI NO: 3023382 NR Description: Forkhead box protein G1A (Forkhead-related FKHL2) (Transcription factor BF-2) (Brain factor 2) (BF2) (CBF-2)
TPIPHPRQEAPGACHGCQSRSGGVPPGRERREDAAAGDGRLGGGGAGVAAVGGGGDQLHGGRREGVEPQGGLHLLGEEAPPLLQGRLAPVRVPEWAVGRGAGGRGRVRQLRQGERHQQPQQGDQLRVPAQGGQGLLLHLQLRLLLLRHEARRHRQEGPRLFLPRLRLILLLLLLAGRQVILQIRRPPHRRPQRRSPRRRRGRRGHATQDALIS

SEQ ID NO: 62037 - protein, 210 aa, Triticum aestivum
  peptide (1)..(210): Ceres Seq. ID no. 12587308
  misc_feature (66)..(148): Pfam Name: Plastocyanin-like domain Pfam Description: Plastocyanin-like domain
  misc_feature (37)..(171): Homolog of NCBI NO: 15242279 NR Description: putative protein
  misc_feature (40)..(163): Homolog of NCBI NO: 25282797 NR Description: blue copper-binding protein lamin - wild cabbage
  misc_feature (32)..(199): Homolog of NCBI NO: 38636764 NR Description: putative blue copper binding protein
  misc_feature (37)..(173): Homolog of NCBI NO: 21594180 NR Description: putative lamin [Arabidopsis thaliana]
  misc_feature (37)..(173): Homolog of NCBI NO: 15232035 NR Description: putative lamin; protein id: At3g01070.1,
  misc_feature (38)..(205): Homolog of NCBI NO: 4104058 NR Description: blue copper-binding protein homolog [Triticum
  misc_feature (34)..(198): Homolog of NCBI NO: 38346158 NR Description: OSJNBa0079A21.5 [Oryza sativa (japonica
  misc_feature (38)..(190): Homolog of NCBI NO: 13236660 NR Description: putative blue copper-binding protein [Oryza
  misc_feature (23)..(210): Homolog of NCBI NO: 34915266 NR Description: contains EST AU197337(E30403)~similar to blue
  misc_feature (23)..(210): Homolog of NCBI NO: 38175738 NR Description: blue copper-binding protein-like
PPSHIQDKKRLELAMAANPDREVCHRAGRGGKMLLPVMAVLAAVVLASLPSAAVATNYTVGDEKGWNPKVDYTSWVKKHRPFYKGDWLLFEYQNGRSDVVQVDEVGYDNCDKESAISSHSKGTSYAFQLKEAKDYFFICSYGYCYSGMKLAVTAKKGPASSSPDSGSSSSSSSSPAAKSSSKSAAPPIAARNAAPLAAAVGAAAMLLRML

SEQ ID NO: 62038 - protein, 196 aa, Triticum aestivum
  peptide (1)..(196): Ceres Seq. ID no. 12587309
  misc_feature (52)..(134): Pfam Name: Plastocyanin-like domain Pfam Description: Plastocyanin-like domain
  misc_feature (23)..(157): Homolog of NCBI NO: 15242279 NR Description: putative protein
  misc_feature (26)..(149): Homolog of NCBI NO: 25282797 NR Description: blue copper-binding protein lamin - wild cabbage
  misc_feature (18)..(185): Homolog of NCBI NO: 38636764 NR Description: putative blue copper binding protein
  misc_feature (23)..(159): Homolog of NCBI NO: 21594180 NR Description: putative lamin [Arabidopsis thaliana]
  misc_feature (23)..(159): Homolog of NCBI NO: 15232035 NR Description: putative lamin; protein id: At3g01070.1,
  misc_feature (24)..(191): Homolog of NCBI NO: 4104058 NR Description: blue copper-binding protein homolog [Triticum
  misc_feature (20)..(184): Homolog of NCBI NO: 38346158 NR Description: OSJNBa0079A21.5 [Oryza sativa (japonica
  misc_feature (24)..(176): Homolog of NCBI NO: 13236660 NR Description: putative blue copper-binding protein [Oryza
  misc_feature (9)..(196): Homolog of NCBI NO: 34915266 NR Description: contains EST AU197337(E30403)~similar to blue
  misc_feature (9)..(196): Homolog of NCBI NO: 38175738 NR Description: blue copper-binding protein-like
MAANPDREVCHRAGRGGKMLLPVMAVLAAVVLASLPSAAVATNYTVGDEKGWNPKVDYTSWVKKHRPFYKGDWLLFEYQNGRSDVVQVDEVGYDNCDKESAISSHSKGTSYAFQLKEAKDYFFICSYGYCYSGMKLAVTAKKGPASSSPDSGSSSSSSSSPAAKSSSKSAAPPIAARNAAPLAAAVGAAAMLLRML

SEQ ID NO: 62039 - DNA, 1039 bp, Triticum aestivum
  misc_feature (1)..(1039): Ceres Seq. ID no. 13596425
atcgcccccacctttttcatcgcactctacgagacccgcagcctcgtctcttcctcctctcacccgacccgatctcctcctaggtttcgctccccaccaccgcggaacgaaccggaaatggcggcgcggcacctcagatccggcctcccgctcctccaagcccgcctcgcggctaacgaatccgcggccgtcgctcaggtgtcgagggggcttgcaacggaggcggataagcctaaggagaacaagatcaaggttccaaaagctctgtatggtggcacgggcaactacgctagtgcgttgttccttgcagcagccaactcaaattcgttggaaaaagttgaatctgagattctcgatgttgtaggggcagccaagaagagccctatgttttctcaattcatgaaggacacatcagtgcctaaagaaaccagggtgaaggctataactgaaatattctctgaagccgggtttactgacatcacaaagaaattcttgtctgcactggcatccaatggaagactgaaatatgttgaacgcattgctgagagatttgttgatttgaccatggcacataggggggaggtgaaagttgttgtcaggactgttgttccacttcctgagaaggaggagaaagaacttaaggagaccttgcgtgatatccttgggaaagacaaaaccatcttggttgaacaaaagattgaccagagtatcatgggaggactggtgattgaatttgggcagaaggtgtttgacatgtcgatcaggactagggcgaagcaaatggaggcgttcttgaggcaaccctttgacatctaactgcctttcggatccagtgcagtggctgtgctgctgaaggttccctcgtgaaataaaagctttcctttacaagagaacggcactctgttttattttgtcttgtgggttaggaagaagcccactgaacaatctttaatttcctttctaccgaaaaaaacatggataaaaacatgaagagaggtcatggaaagtttttaattcaagtgtttgtaattttcggtcg

SEQ ID NO: 62040 - protein, 271 aa, Triticum aestivum
  peptide (1)..(271): Ceres Seq. ID no. 15221869
  misc_feature (93)..(265): Pfam Name: ATP synthase delta (OSCP) subunit Pfam Description: ATP synthase delta (OSCP) subunit
  misc_feature (56)..(266): Homolog of NCBI NO: 20302061 NR Description: ATP synthase, H+ transporting, mitochondrial F1
  misc_feature (56)..(267): Homolog of NCBI NO: 4502303 NR Description: ATP synthase, H+ transporting, mitochondrial F1
  misc_feature (56)..(267): Homolog of NCBI NO: 27806307 NR Description: ATP synthase, H+ transporting, mitochondrial F1
  misc_feature (42)..(270): Homolog of NCBI NO: 1655482 NR Description: delta subunit of mitochondrial F1-ATPase
  misc_feature (42)..(270): Homolog of NCBI NO: 15240628 NR Description: delta subunit of mitochondrial F1-ATPase
  misc_feature (42)..(270): Homolog of NCBI NO: 14190495 NR Description: AT5g13450/T22N19_100 [Arabidopsis thaliana]
  misc_feature (42)..(271): Homolog of NCBI NO: 23507248 NR Description: oligomycin sensitivity conferring protein [Silene
  misc_feature (65)..(270): Homolog of NCBI NO: 4774163 NR Description: F1-ATP synthase delta subunit [Ipomoea batatas]
  misc_feature (42)..(271): Homolog of NCBI NO: 23507246 NR Description: oligomycin sensitivity conferring protein [Silene
  misc_feature (65)..(270): Homolog of NCBI NO: 114682 NR Description: ATP synthase delta chain, mitochondrial precursor
IAPTFFIALYETRSLVSSSSHPTRSPPRFRSPPPRNEPEMAARHLRSGLPLLQARLAANESAAVAQVSRGLATEADKPKENKIKVPKALYGGTGNYASALFLAAANSNSLEKVESEILDVVGAAKKSPMFSQFMKDTSVPKETRVKAITEIFSEAGFTDITKKFLSALASNGRLKYVERIAERFVDLTMAHRGEVKVVVRTVVPLPEKEEKELKETLRDILGKDKTILVEQKIDQSIMGGLVIEFGQKVFDMSIRTRAKQMEAFLRQPFDI

SEQ ID NO: 62041 - protein, 232 aa, Triticum aestivum
  peptide (1)..(232): Ceres Seq. ID no. 15221870
  misc_feature (54)..(226): Pfam Name: ATP synthase delta (OSCP) subunit Pfam Description: ATP synthase delta (OSCP) subunit
  misc_feature (17)..(227): Homolog of NCBI NO: 20302061 NR Description: ATP synthase, H+ transporting, mitochondrial F1
  misc_feature (17)..(228): Homolog of NCBI NO: 4502303 NR Description: ATP synthase, H+ transporting, mitochondrial F1
  misc_feature (17)..(228): Homolog of NCBI NO: 27806307 NR Description: ATP synthase, H+ transporting, mitochondrial F1
  misc_feature (3)..(231): Homolog of NCBI NO: 1655482 NR Description: delta subunit of mitochondrial F1-ATPase
  misc_feature (3)..(231): Homolog of NCBI NO: 15240628 NR Description: delta subunit of mitochondrial F1-ATPase
  misc_feature (3)..(231): Homolog of NCBI NO: 14190495 NR Description: AT5g13450/T22N19_100 [Arabidopsis thaliana]
  misc_feature (3)..(232): Homolog of NCBI NO: 23507248 NR Description: oligomycin sensitivity conferring protein [Silene
  misc_feature (26)..(231): Homolog of NCBI NO: 4774163 NR Description: F1-ATP synthase delta subunit [Ipomoea batatas]
  misc_feature (3)..(232): Homolog of NCBI NO: 23507246 NR Description: oligomycin sensitivity conferring protein [Silene
  misc_feature (26)..(231): Homolog of NCBI NO: 114682 NR Description: ATP synthase delta chain, mitochondrial precursor
MAARHLRSGLPLLQARLAANESAAVAQVSRGLATEADKPKENKIKVPKALYGGTGNYASALFLAAANSNSLEKVESEILDVVGAAKKSPMFSQFMKDTSVPKETRVKAITEIFSEAGFTDITKKFLSALASNGRLKYVERIAERFVDLTMAHRGEVKVVVRTVVPLPEKEEKELKETLRDILGKDKTILVEQKIDQSIMGGLVIEFGQKVFDMSIRTRAKQMEAFLRQPFDI

SEQ ID NO: 62042 - protein, 143 aa, Triticum aestivum
  peptide (1)..(143): Ceres Seq. ID no. 15221871
  misc_feature (1)..(137): Pfam Name: ATP synthase delta (OSCP) subunit Pfam Description: ATP synthase delta (OSCP) subunit
  misc_feature (1)..(138): Homolog of NCBI NO: 20302061 NR Description: ATP synthase, H+ transporting, mitochondrial F1
  misc_feature (1)..(139): Homolog of NCBI NO: 4502303 NR Description: ATP synthase, H+ transporting, mitochondrial F1
  misc_feature (1)..(139): Homolog of NCBI NO: 27806307 NR Description: ATP synthase, H+ transporting, mitochondrial F1
  misc_feature (1)..(142): Homolog of NCBI NO: 1655482 NR Description: delta subunit of mitochondrial F1-ATPase
  misc_feature (1)..(142): Homolog of NCBI NO: 15240628 NR Description: delta subunit of mitochondrial F1-ATPase
  misc_feature (1)..(142): Homolog of NCBI NO: 14190495 NR Description: AT5g13450/T22N19_100 [Arabidopsis thaliana]
  misc_feature (1)..(143): Homolog of NCBI NO: 23507248 NR Description: oligomycin sensitivity conferring protein [Silene
  misc_feature (1)..(142): Homolog of NCBI NO: 4774163 NR Description: F1-ATP synthase delta subunit [Ipomoea batatas]
  misc_feature (1)..(143): Homolog of NCBI NO: 23507246 NR Description: oligomycin sensitivity conferring protein [Silene
  misc_feature (1)..(142): Homolog of NCBI NO: 114682 NR Description: ATP synthase delta chain, mitochondrial precursor
MFSQFMKDTSVPKETRVKAITEIFSEAGFTDITKKFLSALASNGRLKYVERIAERFVDLTMAHRGEVKVVVRTVVPLPEKEEKELKETLRDILGKDKTILVEQKIDQSIMGGLVIEFGQKVFDMSIRTRAKQMEAFLRQPFDI

SEQ ID NO: 62043 - DNA, 1407 bp, Triticum aestivum
  misc_feature (1)..(1407): Ceres Seq. ID no. 13596030
aaaataaaaagaatccccgcagcctcctcctatctcctcctcgcgcacacgccaagcgaccgaatcgccgccgcagccgcctagggcttcgccgccgtcgcagatccctacttccggccgtctgctgcgggtcctccgtgttcgtggctgctgtgccggcgccgacagaaatttccctgccgtcagattttgtgagtgttcgagcttctgcaatgggtggaagcaactatgatgacgactgggtgttgcccggtgctgacatcactcttgttcttgttggaaaacttggctatggcaagagtgcaactggcaatagtatccttggacgggaagcatttgtatcagaatactctcatgccagtgtgacaaacacttgtcagatgggaagcaccatgctgacggatggccgcaccatcaatgttattgatacaccaggattatttgacatgaccgtaactcctgaggatgctggcaaagaaattgttaagtgcatgaacatggctaaagatgggatacatgctgtgttgatggttttttctgctacgtctcgattttctcgagaagattctagtacaattgagactatcaaagtgttttttggagagaaaatcgttgatcacttggtcttagttttcacttatggagatttagttggtgaaaatttattgaagaacatgttaagtaatgccccagactatctgcagaaagttgttcagctatgcaaaaatagagtggttctttttgataacaagaccaaggaccctaggattcgaactaagcagctcgaaacgttgcttgatgtggttgattctgttagtgcaaataatggaggaaacccatttacagatcaaatgctcactcgccttaaggaggtgcatgatagagagaaggaggttcatgatgctctcggatattcagaggaccaaatatctgaattgaagaaggagatccacagaactcgggatgaacagcttgcaaacattactgccatggtggaggaaaagctgaatatcacggtggagaagctgcaagttcaactcatggaagaacagaatgcaaggctggaagcagagagggtggcggcggaggccaggctgaaatccgacgaggagatccgcaagctcaaggagaggctcgagaaggctcaggaggaaaacgaggagttccggaggctggcggcgaacaagtgcaccattctgtaaacagtagtctcttgggaaagagttgtcggatgtcttgttaataggagggggtgaacttaagtctgtctagtagcaacagatatactgtacttggttgcatcgtctcgtatattggtagaacttgaatgcttggggagtcggataactatatgttagtgacagttatacttgtcgtctcgtatattagtagcacttgcgacttgcg

SEQ ID NO: 62044 - protein, 399 aa, Triticum aestivum
  peptide (1)..(399): Ceres Seq. ID no. 13596031
  misc_feature (88)..(290): Pfam Name: AIG1 family Pfam Description: AIG1 family
  misc_feature (78)..(385): Homolog of NCBI NO: 15217724 NR Description: AIG1-related protein [Arabidopsis thaliana]
  misc_feature (89)..(399): Homolog of NCBI NO: 10092442 NR Description: disease resistance protein AIG1; 916-2572
  misc_feature (75)..(399): Homolog of NCBI NO: 15234871 NR Description: AIG1-related protein [Arabidopsis thaliana]
  misc_feature (89)..(399): Homolog of NCBI NO: 15217731 NR Description: AIG1 [Arabidopsis thaliana]
  misc_feature (111)..(396): Homolog of NCBI NO: 12324509 NR Description: AIG1-like protein, 5' partial; 1-1205
  misc_feature (71)..(396): Homolog of NCBI NO: 25373414 NR Description: hypothetical protein F12G12.21 - Arabidopsis
  misc_feature (71)..(396): Homolog of NCBI NO: 18399081 NR Description: expressed protein [Arabidopsis thaliana]
  misc_feature (71)..(396): Homolog of NCBI NO: 24417378 NR Description: unknown [Arabidopsis thaliana]
  misc_feature (71)..(399): Homolog of NCBI NO: 4097585 NR Description: NTGP4 [Nicotiana tabacum]
  misc_feature (77)..(389): Homolog of NCBI NO: 38346576 NR Description: OSJNBa0064D20.7 [Oryza sativa (japonica
NKKNPRSLLLSPPRAHAKRPNRRRSRLGLRRRRRSLLPAVCCGSSVFVAAVPAPTEISLPSDFVSVRASAMGGSNYDDDWVLPGADITLVLVGKLGYGKSATGNSILGREAFVSEYSHASVTNTCQMGSTMLTDGRTINVIDTPGLFDMTVTPEDAGKEIVKCMNMAKDGIHAVLMVFSATSRFSREDSSTIETIKVFFGEKIVDHLVLVFTYGDLVGENLLKNMLSNAPDYLQKVVQLCKNRVVLFDNKTKDPRIRTKQLETLLDVVDSVSANNGGNPFTDQMLTRLKEVHDREKEVHDALGYSEDQISELKKEIHRTRDEQLANITAMVEEKLNITVEKLQVQLMEEQNARLEAERVAAEARLKSDEEIRKLKERLEKAQEENEEFRRLAANKCTIL

SEQ ID NO: 62045 - protein, 329 aa, Triticum aestivum
  peptide (1)..(329): Ceres Seq. ID no. 13596032
  misc_feature (18)..(220): Pfam Name: AIG1 family Pfam Description: AIG1 family
  misc_feature (8)..(315): Homolog of NCBI NO: 15217724 NR Description: AIG1-related protein [Arabidopsis thaliana]
  misc_feature (19)..(329): Homolog of NCBI NO: 10092442 NR Description: disease resistance protein AIG1; 916-2572
  misc_feature (5)..(329): Homolog of NCBI NO: 15234871 NR Description: AIG1-related protein [Arabidopsis thaliana]
  misc_feature (19)..(329): Homolog of NCBI NO: 15217731 NR Description: AIG1 [Arabidopsis thaliana]
  misc_feature (41)..(326): Homolog of NCBI NO: 12324509 NR Description: AIG1-like protein, 5' partial; 1-1205
  misc_feature (1)..(326): Homolog of NCBI NO: 25373414 NR Description: hypothetical protein F12G12.21 - Arabidopsis
  misc_feature (1)..(326): Homolog of NCBI NO: 18399081 NR Description: expressed protein [Arabidopsis thaliana]
  misc_feature (1)..(326): Homolog of NCBI NO: 24417378 NR Description: unknown [Arabidopsis thaliana]
  misc_feature (1)..(329): Homolog of NCBI NO: 4097585 NR Description: NTGP4 [Nicotiana tabacum]
  misc_feature (7)..(319): Homolog of NCBI NO: 38346576 NR Description: OSJNBa0064D20.7 [Oryza sativa (japonica
MGGSNYDDDWVLPGADITLVLVGKLGYGKSATGNSILGREAFVSEYSHASVTNTCQMGSTMLTDGRTINVIDTPGLFDMTVTPEDAGKEIVKCMNMAKDGIHAVLMVFSATSRFSREDSSTIETIKVFFGEKIVDHLVLVFTYGDLVGENLLKNMLSNAPDYLQKVVQLCKNRVVLFDNKTKDPRIRTKQLETLLDVVDSVSANNGGNPFTDQMLTRLKEVHDREKEVHDALGYSEDQISELKKEIHRTRDEQLANITAMVEEKLNITVEKLQVQLMEEQNARLEAERVAAEARLKSDEEIRKLKERLEKAQEENEEFRRLAANKCTIL

SEQ ID NO: 62046 - protein, 273 aa, Triticum aestivum
  peptide (1)..(273): Ceres Seq. ID no. 13596033
  misc_feature (1)..(164): Pfam Name: AIG1 family Pfam Description: AIG1 family
  misc_feature (1)..(259): Homolog of NCBI NO: 15217724 NR Description: AIG1-related protein [Arabidopsis thaliana]
  misc_feature (1)..(273): Homolog of NCBI NO: 10092442 NR Description: disease resistance protein AIG1; 916-2572
  misc_feature (1)..(273): Homolog of NCBI NO: 15234871 NR Description: AIG1-related protein [Arabidopsis thaliana]
  misc_feature (1)..(273): Homolog of NCBI NO: 15217731 NR Description: AIG1 [Arabidopsis thaliana]
  misc_feature (1)..(270): Homolog of NCBI NO: 12324509 NR Description: AIG1-like protein, 5' partial; 1-1205
  misc_feature (1)..(270): Homolog of NCBI NO: 25373414 NR Description: hypothetical protein F12G12.21 - Arabidopsis
  misc_feature (1)..(270): Homolog of NCBI NO: 18399081 NR Description: expressed protein [Arabidopsis thaliana]
  misc_feature (1)..(270): Homolog of NCBI NO: 24417378 NR Description: unknown [Arabidopsis thaliana]
  misc_feature (1)..(273): Homolog of NCBI NO: 4097585 NR Description: NTGP4 [Nicotiana tabacum]
  misc_feature (1)..(263): Homolog of NCBI NO: 38346576 NR Description: OSJNBa0064D20.7 [Oryza sativa (japonica
MGSTMLTDGRTINVIDTPGLFDMTVTPEDAGKEIVKCMNMAKDGIHAVLMVFSATSRFSREDSSTIETIKVFFGEKIVDHLVLVFTYGDLVGENLLKNMLSNAPDYLQKVVQLCKNRVVLFDNKTKDPRIRTKQLETLLDVVDSVSANNGGNPFTDQMLTRLKEVHDREKEVHDALGYSEDQISELKKEIHRTRDEQLANITAMVEEKLNITVEKLQVQLMEEQNARLEAERVAAEARLKSDEEIRKLKERLEKAQEENEEFRRLAANKCTIL

SEQ ID NO: 62047 - DNA, 1080 bp, Triticum aestivum
  misc_feature (1)..(1080): Ceres Seq. ID no. 13583327
taatcgaaaacattttcatcccgcgggacgcgccatgaagaccagctcctcgtcgcaggcgctcttcccggccgcctcgtcgctgtgcaccccgtacctcctcctcgtgcccctcggcctcctcgccgcggtggtcgtcatccccagcctcggctcctcccacgtccgctccgacggcctcggcgtgctctgccccagcctcggcaccgatggctactccgtcgcgtcgggagccgagaaggtcgtctccacggcggcggcggcggcgcagccggagttccggctgctcggcggggtgctgaccacgccgaagcggcgcgagcggcgggacatcgtgcggctggcgtacgcgctgcagccgccggtgccggcgtacgcgcgggtggacgtgcgcttcgtgttctgcggcgtggacgacccggtggaccggatgctggtggcgctggaggccgcgcggcacggcgacgtcctcctgctcaactgcaccgagaacatgaacgacggcaagacccaccagtatttctcctccgtgccgcgggtgttngcgggcgcgccctacgactacgtgatgaagaccgacgacgacacgtacctgcgcgtggccgccatggccgaggagctccggcccaagccccgcgacgacgtctacctcggctacggcttcgccgtcggcgacgaccccatgcagttcatgcacggcatggggtacgtcgtctcgtgggacgtcgcgacctgggtgtccgccaacgaggagatcctccggcacaacgacacccacggccccgagggcctcctcttcggcaagtggctcaacatcgggcgccggggcaagaaccggtacagcctcaggccaaggatgtacgacctcaactgggacatggacaacttccggccggacaccgtcgccgtgcacatgatcaaggacaaccgccggtgggcggctgccttcagatacttcaacgtcaccgccgggatcaggccgtccaacctgtaccacttgccctgatcgatcaaggggtttatattttccatttcttaagtaaactcgccgtgacgtggttgattgtgccacgaaagtgc

SEQ ID NO: 62048 - protein, 334 aa, Triticum aestivum
  peptide (1)..(334): Ceres Seq. ID no. 13583328
  misc_feature (108)..(279): Pfam Name: Galactosyltransferase Pfam Description: Galactosyltransferase
  misc_feature (81)..(330): Homolog of NCBI NO: 14719291 NR Description: unknown [Zea mays]
  misc_feature (95)..(330): Homolog of NCBI NO: 18092341 NR Description: hypothetical protein [Zea mays]
  misc_feature (76)..(334): Homolog of NCBI NO: 21537037 NR Description: unknown [Arabidopsis thaliana]
  misc_feature (76)..(334): Homolog of NCBI NO: 15242148 NR Description: expressed protein [Arabidopsis thaliana]
  misc_feature (181)..(181): Xaa is any aa, unknown or other
NRKHFHPAGRAMKTSSSSQALFPAASSLCTPYLLLVPLGLLAAVVVIPSLGSSHVRSDGLGVLCPSLGTDGYSVASGAEKVVSTAAAAAQPEFRLLGGVLTTPKRRERRDIVRLAYALQPPVPAYARVDVRFVFCGVDDPVDRMLVALEAARHGDVLLLNCTENMNDGKTHQYFSSVPRVXAGAPYDYVMKTDDDTYLRVAAMAEELRPKPRDDVYLGYGFAVGDDPMQFMHGMGYVVSWDVATWVSANEEILRHNDTHGPEGLLFGKWLNIGRRGKNRYSLRPRMYDLNWDMDNFRPDTVAVHMIKDNRRWAAAFRYFNVTAGIRPSNLYHLP

SEQ ID NO: 62049 - protein, 323 aa, Triticum aestivum
  peptide (1)..(323): Ceres Seq. ID no. 13583329
  misc_feature (97)..(268): Pfam Name: Galactosyltransferase Pfam Description: Galactosyltransferase
  misc_feature (70)..(319): Homolog of NCBI NO: 14719291 NR Description: unknown [Zea mays]
  misc_feature (84)..(319): Homolog of NCBI NO: 18092341 NR Description: hypothetical protein [Zea mays]
  misc_feature (65)..(323): Homolog of NCBI NO: 21537037 NR Description: unknown [Arabidopsis thaliana]
  misc_feature (65)..(323): Homolog of NCBI NO: 15242148 NR Description: expressed protein [Arabidopsis thaliana]
  misc_feature (170)..(170): Xaa is any aa, unknown or other
MKTSSSSQALFPAASSLCTPYLLLVPLGLLAAVVVIPSLGSSHVRSDGLGVLCPSLGTDGYSVASGAEKVVSTAAAAAQPEFRLLGGVLTTPKRRERRDIVRLAYALQPPVPAYARVDVRFVFCGVDDPVDRMLVALEAARHGDVLLLNCTENMNDGKTHQYFSSVPRVXAGAPYDYVMKTDDDTYLRVAAMAEELRPKPRDDVYLGYGFAVGDDPMQFMHGMGYVVSWDVATWVSANEEILRHNDTHGPEGLLFGKWLNIGRRGKNRYSLRPRMYDLNWDMDNFRPDTVAVHMIKDNRRWAAAFRYFNVTAGIRPSNLYHLP

SEQ ID NO: 62050 - protein, 191 aa, Triticum aestivum
  peptide (1)..(191): Ceres Seq. ID no. 13583330
  misc_feature (1)..(136): Pfam Name: Galactosyltransferase Pfam Description: Galactosyltransferase
  misc_feature (1)..(187): Homolog of NCBI NO: 14719291 NR Description: unknown [Zea mays]
  misc_feature (1)..(187): Homolog of NCBI NO: 18092341 NR Description: hypothetical protein [Zea mays]
  misc_feature (1)..(191): Homolog of NCBI NO: 21537037 NR Description: unknown [Arabidopsis thaliana]
  misc_feature (1)..(191): Homolog of NCBI NO: 15242148 NR Description: expressed protein [Arabidopsis thaliana]
  misc_feature (38)..(38): Xaa is any aa, unknown or other
MLVALEAARHGDVLLLNCTENMNDGKTHQYFSSVPRVXAGAPYDYVMKTDDDTYLRVAAMAEELRPKPRDDVYLGYGFAVGDDPMQFMHGMGYVVSWDVATWVSANEEILRHNDTHGPEGLLFGKWLNIGRRGKNRYSLRPRMYDLNWDMDNFRPDTVAVHMIKDNRRWAAAFRYFNVTAGIRPSNLYHLP

SEQ ID NO: 62051 - DNA, 1780 bp, Triticum aestivum
  misc_feature (1)..(1780): Ceres Seq. ID no. 13596458
acaggatactctccccccctccccactgccgcaccaacacgccagtctcggcgacgccaaaccctcgcccgctctccagaaacccccctatggccgccaccggcgctgccgcgcccgcgcccgcggccgtgcagccgccgcggcagttcaagctcgacccgcagagcgagctccgcgtggaggtgctcccggacgcgaccctccgcgtgcgcctcgtctccggcacggcggagatcttcggcaccgagctcccgcccgagggctggctcaccatcccgccccgctccaagatcgccattttcacgtggcacggcgcgacggtggagctggacggggtcagcgagagcgagtacacgtccgacgagacgccgatggtaatttatgtcaacacgcatgcgattctcgatgcacggagggcgagggcgagggcagcgcagggaggcgacttggaggcctcacagggacctagagtgattgttgtggggccaactgattctggaaaaagcactctgtgcaaaatgctccttagctgggctgccaaactgggatggaagcctacatatgtggatttagatattggccagggttccataaccatacctggatgtatttctgctacaccaatagagaaacccatagatatagttgatgggattcctttggagatgccgcttgcatacttttatggccatccaaatccaagtattaatccagatgtttacaaagcgctcatgagagagctagctcaaacattagagacacagttctctgggaatgctgaatctagggcggccggtatggttattaacacaatggggtgggttgaaggccttggctatgagttacttcttaatgcaattgacatcttcaaggctaatgtagtgctggtattgggacaggagaagctctggaagatgttaaaagatgcagtacaaagtaagcccaatatcgatgtcgtaaaacttcataaatctgagggtgttgtcctaaggaattcaaaatatcgtcaaaagactaggagctttcgtatcaaggagtacttttatgggattgcaaacgatctggcaccacattcaaatgtagtcaactttagtgatgtttctgttttcagaattggtagtggacatcaagctccacggtcagctttaccaattggtgcagagcctgtggcagatcccactcggcttgttgctgtcaacatcagcactgatatggtccacacagtgcttgctgtttcttatgcgaaggaacctgatgaaataatttcgagcaacgttgccggattcatccatgtcacagatgttgacatccaaaggaagaagctgacgtacatcgcgccttgcccaggagacctgccaagcaggctgttaatcgcgagctccctgacatggtacgagcaggcttgacccggttcgaggttggacattgtaggtaggtaaccagatggctgatgacatgttgtaacgccgaaatggatactctgtgcatttgataactggaacactgctggtaaagctgaaaagctgaatgggttggacgatatctcaggcatcttgctgcgaagctttctgctgacttgcttatgctttctatgctgctgtggcggcgaagatacaaatagttaggtcaatgaaagattggtgtgctcttttgtacgctgttgggaactaagatatactagaagacgagtcctttggcctcttctcaactgtatccagatataaacatcggaactagttattactagaagaacgtccgtgcgttgcaatggggccacatt

SEQ ID NO: 62052 - protein, 467 aa, Triticum aestivum
  peptide (1)..(467): Ceres Seq. ID no. 13596459
  misc_feature (47)..(382): Homolog of NCBI NO: 19114653 NR Description: putative cleaveage/polyadenylation factor
  misc_feature (47)..(462): Homolog of NCBI NO: 39580303 NR Description: Hypothetical protein CBG23604 [Caenorhabditis
  misc_feature (47)..(462): Homolog of NCBI NO: 39590654 NR Description: Hypothetical protein CBG09862 [Caenorhabditis
  misc_feature (47)..(465): Homolog of NCBI NO: 19922174 NR Description: CG5970-PA [Drosophila melanogaster]
  misc_feature (47)..(462): Homolog of NCBI NO: 17553760 NR Description: ATP GTP-binding protein like (47.6 kD)
  misc_feature (44)..(465): Homolog of NCBI NO: 19527056 NR Description: ATP/GTP-binding protein [Mus musculus]
  misc_feature (44)..(465): Homolog of NCBI NO: 5803029 NR Description: ATP/GTP-binding protein [Homo sapiens]
  misc_feature (47)..(464): Homolog of NCBI NO: 10176985 NR Description: ATP/GTP-binding protein-like [Arabidopsis
  misc_feature (47)..(464): Homolog of NCBI NO: 15242523 NR Description: ATP/GTP-binding protein -related [Arabidopsis
  misc_feature (25)..(465): Homolog of NCBI NO: 15229328 NR Description: expressed protein [Arabidopsis thaliana]
RILSPPPHCRTNTPVSATPNPRPLSRNPPMAATGAAAPAPAAVQPPRQFKLDPQSELRVEVLPDATLRVRLVSGTAEIFGTELPPEGWLTIPPRSKIAIFTWHGATVELDGVSESEYTSDETPMVIYVNTHAILDARRARARAAQGGDLEASQGPRVIVVGPTDSGKSTLCKMLLSWAAKLGWKPTYVDLDIGQGSITIPGCISATPIEKPIDIVDGIPLEMPLAYFYGHPNPSINPDVYKALMRELAQTLETQFSGNAESRAAGMVINTMGWVEGLGYELLLNAIDIFKANVVLVLGQEKLWKMLKDAVQSKPNIDVVKLHKSEGVVLRNSKYRQKTRSFRIKEYFYGIANDLAPHSNVVNFSDVSVFRIGSGHQAPRSALPIGAEPVADPTRLVAVNISTDMVHTVLAVSYAKEPDEIISSNVAGFIHVTDVDIQRKKLTYIAPCPGDLPSRLLIASSLTWYEQA

SEQ ID NO: 62053 - protein, 438 aa, Triticum aestivum
  peptide (1)..(438): Ceres Seq. ID no. 13596460
  misc_feature (18)..(353): Homolog of NCBI NO: 19114653 NR Description: putative cleaveage/polyadenylation factor
  misc_feature (18)..(433): Homolog of NCBI NO: 39580303 NR Description: Hypothetical protein CBG23604 [Caenorhabditis
  misc_feature (18)..(433): Homolog of NCBI NO: 39590654 NR Description: Hypothetical protein CBG09862 [Caenorhabditis
  misc_feature (18)..(436): Homolog of NCBI NO: 19922174 NR Description: CG5970-PA [Drosophila melanogaster]
  misc_feature (18)..(433): Homolog of NCBI NO: 17553760 NR Description: ATP GTP-binding protein like (47.6 kD)
  misc_feature (15)..(436): Homolog of NCBI NO: 19527056 NR Description: ATP/GTP-binding protein [Mus musculus]
  misc_feature (15)..(436): Homolog of NCBI NO: 5803029 NR Description: ATP/GTP-binding protein [Homo sapiens]
  misc_feature (18)..(435): Homolog of NCBI NO: 10176985 NR Description: ATP/GTP-binding protein-like [Arabidopsis
  misc_feature (18)..(435): Homolog of NCBI NO: 15242523 NR Description: ATP/GTP-binding protein -related [Arabidopsis
  misc_feature (1)..(436): Homolog of NCBI NO: 15229328 NR Description: expressed protein [Arabidopsis thaliana]
MAATGAAAPAPAAVQPPRQFKLDPQSELRVEVLPDATLRVRLVSGTAEIFGTELPPEGWLTIPPRSKIAIFTWHGATVELDGVSESEYTSDETPMVIYVNTHAILDARRARARAAQGGDLEASQGPRVIVVGPTDSGKSTLCKMLLSWAAKLGWKPTYVDLDIGQGSITIPGCISATPIEKPIDIVDGIPLEMPLAYFYGHPNPSINPDVYKALMRELAQTLETQFSGNAESRAAGMVINTMGWVEGLGYELLLNAIDIFKANVVLVLGQEKLWKMLKDAVQSKPNIDVVKLHKSEGVVLRNSKYRQKTRSFRIKEYFYGIANDLAPHSNVVNFSDVSVFRIGSGHQAPRSALPIGAEPVADPTRLVAVNISTDMVHTVLAVSYAKEPDEIISSNVAGFIHVTDVDIQRKKLTYIAPCPGDLPSRLLIASSLTWYEQA

SEQ ID NO: 62054 - protein, 344 aa, Triticum aestivum
  peptide (1)..(344): Ceres Seq. ID no. 13596461
  misc_feature (1)..(259): Homolog of NCBI NO: 19114653 NR Description: putative cleaveage/polyadenylation factor
  misc_feature (1)..(339): Homolog of NCBI NO: 39580303 NR Description: Hypothetical protein CBG23604 [Caenorhabditis
  misc_feature (1)..(339): Homolog of NCBI NO: 39590654 NR Description: Hypothetical protein CBG09862 [Caenorhabditis
  misc_feature (1)..(342): Homolog of NCBI NO: 19922174 NR Description: CG5970-PA [Drosophila melanogaster]
  misc_feature (1)..(339): Homolog of NCBI NO: 17553760 NR Description: ATP GTP-binding protein like (47.6 kD)
  misc_feature (1)..(342): Homolog of NCBI NO: 19527056 NR Description: ATP/GTP-binding protein [Mus musculus]
  misc_feature (1)..(342): Homolog of NCBI NO: 5803029 NR Description: ATP/GTP-binding protein [Homo sapiens]
  misc_feature (1)..(341): Homolog of NCBI NO: 10176985 NR Description: ATP/GTP-binding protein-like [Arabidopsis
  misc_feature (1)..(341): Homolog of NCBI NO: 15242523 NR Description: ATP/GTP-binding protein -related [Arabidopsis
  misc_feature (1)..(342): Homolog of NCBI NO: 15229328 NR Description: expressed protein [Arabidopsis thaliana]
MVIYVNTHAILDARRARARAAQGGDLEASQGPRVIVVGPTDSGKSTLCKMLLSWAAKLGWKPTYVDLDIGQGSITIPGCISATPIEKPIDIVDGIPLEMPLAYFYGHPNPSINPDVYKALMRELAQTLETQFSGNAESRAAGMVINTMGWVEGLGYELLLNAIDIFKANVVLVLGQEKLWKMLKDAVQSKPNIDVVKLHKSEGVVLRNSKYRQKTRSFRIKEYFYGIANDLAPHSNVVNFSDVSVFRIGSGHQAPRSALPIGAEPVADPTRLVAVNISTDMVHTVLAVSYAKEPDEIISSNVAGFIHVTDVDIQRKKLTYIAPCPGDLPSRLLIASSLTWYEQA

SEQ ID NO: 62055 - DNA, 986 bp, Triticum aestivum
  misc_feature (1)..(986): Ceres Seq. ID no. 13596426
cccgatacagctccccccatccaaaacccaccgaagtaaaaccgacgagacaaggaccaaacaccaaaatgctctcatccaccgctctccggccgctgtcgccggcgacggcaacgacgcccgcgtacccagccaccgctactgctactgctaccgccaccgtcacctcggccacgcccgggcgacgctcggttgcggtgcgcgtgctgcgggactacggctcgatcccgaagcgggagcccttcagctccagccgcagcatcctcgacgagttcttcaagcaggagaagcctctcgtccagcgcaccaaggaccacatcacagattattgcacgacccttgagggtgatgattgctgcagctgctgggatgcctattttgaactcaacaaactcgagcaagagctaccgcaagaagaaatttcaaggatggtgaaggactcgcggtcagacccgaggtaccttataagcagcatccaccaccggtcagacctacggaagaagatggccgagaaagctcacaattcggcgccatcaaactccccggggcaaacagcgaagccgaggcctttccccgtccccgacgggctgccgaaaacgcaggaagagatcgacgaggatgaggaggccctcatgccggagtctccttacacgaggctgctcagaaggatggggaggtttcccgactggtatacccctcgcccagaccatgagaccgactgaatcacgccatgaaccagccttgccttccagatgtacagcctgaagctctgttctcctggcatcgagcatggaaccttggattgcctgttgcctgcttagttggtttttgctgagtggataaatggaactatgtaatggtgcgtatgtttttgtggtgtttagttcttcgctttagattcagataacaccctttttgccgttttcgtatgatatctgctatgtatatctgtatatatatgtttgggaatagagttcttgactgcc

SEQ ID NO: 62056 - protein, 239 aa, Triticum aestivum
  peptide (1)..(239): Ceres Seq. ID no. 13596427
  misc_feature (75)..(239): Homolog of NCBI NO: 18397956 NR Description: expressed protein [Arabidopsis thaliana]
RYSSPHPKPTEVKPTRQGPNTKMLSSTALRPLSPATATTPAYPATATATATATVTSATPGRRSVAVRVLRDYGSIPKREPFSSSRSILDEFFKQEKPLVQRTKDHITDYCTTLEGDDCCSCWDAYFELNKLEQELPQEEISRMVKDSRSDPRYLISSIHHRSDLRKKMAEKAHNSAPSNSPGQTAKPRPFPVPDGLPKTQEEIDEDEEALMPESPYTRLLRRMGRFPDWYTPRPDHETD

SEQ ID NO: 62057 - protein, 217 aa, Triticum aestivum
  peptide (1)..(217): Ceres Seq. ID no. 13596428
  misc_feature (53)..(217): Homolog of NCBI NO: 18397956 NR Description: expressed protein [Arabidopsis thaliana]
MLSSTALRPLSPATATTPAYPATATATATATVTSATPGRRSVAVRVLRDYGSIPKREPFSSSRSILDEFFKQEKPLVQRTKDHITDYCTTLEGDDCCSCWDAYFELNKLEQELPQEEISRMVKDSRSDPRYLISSIHHRSDLRKKMAEKAHNSAPSNSPGQTAKPRPFPVPDGLPKTQEEIDEDEEALMPESPYTRLLRRMGRFPDWYTPRPDHETD

SEQ ID NO: 62058 - DNA, 656 bp, Triticum aestivum
  misc_feature (1)..(656): Ceres Seq. ID no. 13583388
cctaatcgaaaaaatcaaggaaaaaacttttaaaaaaagagcacaaaatcgttcctcattctccatctactccaccaaacctcaatccccatctctctccccctaggctctccttcgccgtcggtcgggctccctctccgacacgccgccgtcgatacatccacccgaggcatggcgacggcgttcaaggcgttcgtgaacagccccgtcggccccaagaccacccacttctggggccccgtcgctaactggggcttcgtcctcgcgggtttggttgacttgaacaagcctcctgagatgatatctggcaatatgacagccgccatgtgtgtgtattctgggctctttatgaggttcgcgtggatggtacagccccggaactacttgctcctggcatgccatgcctccaacgaaaccgttcagctctatcatttatctcgctgtgctagggctcaggggtatctggattccaagaaagagccggaggcccaacagtaaagggtgtggtgtttctgaagtcggaggagccttgactccgcagccagcctttcaataagtaaaatttgtttctgaagctttgcaatgcccttcatgagaaaaaacctatacagtggaaatttctatttctatgatactcatgcctgcaatgtggcctt

SEQ ID NO: 62059 - protein, 108 aa, Triticum aestivum
  peptide (1)..(108): Ceres Seq. ID no. 13583389
  misc_feature (1)..(105): Pfam Name: Uncharacterised protein family (UPF0041) Pfam Description: Uncharacterised protein family (UPF0041)
  misc_feature (17)..(85): Homolog of NCBI NO: 12852283 NR Description: unnamed protein product [Mus musculus]
  misc_feature (17)..(95): Homolog of NCBI NO: 20983406 NR Description: similar to Brain protein 44-like protein (Protein
  misc_feature (1)..(84): Homolog of NCBI NO: 19075237 NR Description: conserved hypothetical protein
  misc_feature (17)..(85): Homolog of NCBI NO: 9055178 NR Description: brain protein 44-like; apoptosis-regulating basic
  misc_feature (17)..(85): Homolog of NCBI NO: 12852262 NR Description: unnamed protein product [Mus musculus]
  misc_feature (17)..(85): Homolog of NCBI NO: 7706369 NR Description: brain protein 44-like; HSPC040 protein [Homo
  misc_feature (17)..(85): Homolog of NCBI NO: 4929727 NR Description: CGI-129 protein [Homo sapiens]
  misc_feature (17)..(104): Homolog of NCBI NO: 39591631 NR Description: Hypothetical protein CBG18071 [Caenorhabditis
  misc_feature (17)..(104): Homolog of NCBI NO: 17554512 NR Description: Uncharacterised protein family (UPF0041)
  misc_feature (1)..(105): Homolog of NCBI NO: 15241266 NR Description: expressed protein [Arabidopsis thaliana]
MATAFKAFVNSPVGPKTTHFWGPVANWGFVLAGLVDLNKPPEMISGNMTAAMCVYSGLFMRFAWMVQPRNYLLLACHASNETVQLYHLSRCARAQGYLDSKKEPEAQQ

SEQ ID NO: 62060 - protein, 66 aa, Triticum aestivum
  peptide (1)..(66): Ceres Seq. ID no. 13583390
  misc_feature (1)..(63): Pfam Name: Uncharacterised protein family (UPF0041) Pfam Description: Uncharacterised protein family (UPF0041)
  misc_feature (1)..(43): Homolog of NCBI NO: 12852283 NR Description: unnamed protein product [Mus musculus]
  misc_feature (1)..(53): Homolog of NCBI NO: 20983406 NR Description: similar to Brain protein 44-like protein (Protein
  misc_feature (1)..(42): Homolog of NCBI NO: 19075237 NR Description: conserved hypothetical protein
  misc_feature (1)..(43): Homolog of NCBI NO: 9055178 NR Description: brain protein 44-like; apoptosis-regulating basic
  misc_feature (1)..(43): Homolog of NCBI NO: 12852262 NR Description: unnamed protein product [Mus musculus]
  misc_feature (1)..(43): Homolog of NCBI NO: 7706369 NR Description: brain protein 44-like; HSPC040 protein [Homo
  misc_feature (1)..(43): Homolog of NCBI NO: 4929727 NR Description: CGI-129 protein [Homo sapiens]
  misc_feature (1)..(62): Homolog of NCBI NO: 39591631 NR Description: Hypothetical protein CBG18071 [Caenorhabditis
  misc_feature (1)..(62): Homolog of NCBI NO: 17554512 NR Description: Uncharacterised protein family (UPF0041)
  misc_feature (1)..(63): Homolog of NCBI NO: 15241266 NR Description: expressed protein [Arabidopsis thaliana]
MISGNMTAAMCVYSGLFMRFAWMVQPRNYLLLACHASNETVQLYHLSRCARAQGYLDSKKEPEAQQ

SEQ ID NO: 62061 - protein, 61 aa, Triticum aestivum
  peptide (1)..(61): Ceres Seq. ID no. 13583391
  misc_feature (1)..(58): Pfam Name: Uncharacterised protein family (UPF0041) Pfam Description: Uncharacterised protein family (UPF0041)
  misc_feature (1)..(38): Homolog of NCBI NO: 12852283 NR Description: unnamed protein product [Mus musculus]
  misc_feature (1)..(48): Homolog of NCBI NO: 20983406 NR Description: similar to Brain protein 44-like protein (Protein
  misc_feature (1)..(37): Homolog of NCBI NO: 19075237 NR Description: conserved hypothetical protein
  misc_feature (1)..(38): Homolog of NCBI NO: 9055178 NR Description: brain protein 44-like; apoptosis-regulating basic
  misc_feature (1)..(38): Homolog of NCBI NO: 12852262 NR Description: unnamed protein product [Mus musculus]
  misc_feature (1)..(38): Homolog of NCBI NO: 7706369 NR Description: brain protein 44-like; HSPC040 protein [Homo
  misc_feature (1)..(38): Homolog of NCBI NO: 4929727 NR Description: CGI-129 protein [Homo sapiens]
  misc_feature (1)..(57): Homolog of NCBI NO: 39591631 NR Description: Hypothetical protein CBG18071 [Caenorhabditis
  misc_feature (1)..(57): Homolog of NCBI NO: 17554512 NR Description: Uncharacterised protein family (UPF0041)
  misc_feature (1)..(58): Homolog of NCBI NO: 15241266 NR Description: expressed protein [Arabidopsis thaliana]
MTAAMCVYSGLFMRFAWMVQPRNYLLLACHASNETVQLYHLSRCARAQGYLDSKKEPEAQQ

SEQ ID NO: 62062 - DNA, 1774 bp, Triticum aestivum
  misc_feature (1)..(1774): Ceres Seq. ID no. 14316039
ggagggttcttgcagtattatcgctatccagctcgtgagtcggctatcgtcaatggcggcctctgcaaagatcgccacggagtttctcaaggatccactgatctggttgttcctcgcctcgctggctttcgtcattctgcagaggcggcggctgggcagcgcgccatttcctccgggtccgaagccgctgccagtcatcggcaacatgacgttagtggaccagctgacccaccgcggcctagcggcgctagcgaagcactacggcgggctgctgcaccttcgcctcggcaggctccacgtcttcgcggtgtcgacgccggagtacgcgcgcgaggtgctgcacgtgcaggacgccgccttctcgaaccgcccggccaccatcgccgtcgtctacctcacctacggccgctccgacatggcgttcgcgcacaacggcgcctactggcgccagatgcgcaagctctgcgtcaccaagatcttcagccgccgccgcgccgagacgtggctcgccgtgcgcgacgggtacggggcgctggcccgcgccgtcggcaggcgcagcggcgaggccgtcaacctcggcgagctcatcttcaacctcaccgtcggtgtcatcttccgcgccgccttcagcacccgcgacgaggatgggctcgacgagttcatcgccatcctccaggagttctccagcctcctaggattgttccacatcggtgacttcttcccgtggctcggctgggtgggccggcggggcttcaaccgccgcctccgcacggggcgcggcgctctcgataaatttatcgacaggatcatcgacgagcacatgaggaggggcaagaacgccgccgaccccgacgccgacttggtagacggcctgctcgcgtttctcgccgaggcaaacccaatcagcgggaagcacagagaggacgccctccgcttcacccgcgataacgtcagggccatgattatggacatgttgtttggtgggccagagacagtggggtccatgaccgagtgggcgatggcagagatgatgcgtagcccagacgacctacgacggctgcagcaggagctcgccaatgtgctggggctcgaccgtaccgtggatgagcccgacctcgacaagctccctttcctcagatgtgtcgtcaaggagacgctccgcatgcacccgcccatcccactgctcctccacgagtctgctaaagactgcgtcgtcggtggctactttgtgcccaaaggctcccgcgtgttggtgaatgcatgggcgatcaaccgtgaccccggggcctggaaggacggcgacacgttccgaccttcgcggttcatgcccggcgagcgagaggccgccgggctggacctcaagggtggctgctacgagttcttgccgtttgggtccggacggcgctcctgccctgcgcaggggcttggccaacatgcggtggagttcgctgtcgcgcagctcgcgcacggattcaactgggagctgcccgatggcatgaagcccgcggagcttgacatgggtgacatctttggcctcaccgcattacgtgccacgcggctctacgccgtgccaccacaccacgcctcacatgccccatgtaagtattgcctcacatgccccatgtaagtatcgcaccagacttgttccttgtaaccgttggtccgttcattgtgtaccccgatctgcttggtttgttttggacttgatctccgagtcctaattcgcaagaagagactttctatcaataaagagcacggtcatagatgtggatcc

SEQ ID NO: 62063 - protein, 541 aa, Triticum aestivum
  peptide (1)..(541): Ceres Seq. ID no. 14316040
  misc_feature (57)..(520): Pfam Name: Cytochrome P450 Pfam Description: Cytochrome P450
  misc_feature (33)..(524): Homolog of NCBI NO: 5002354 NR Description: ferulate-5-hydroxylase
  misc_feature (36)..(524): Homolog of NCBI NO: 6688937 NR Description: ferulate-5-hydroxylase [Populus balsamifera
  misc_feature (29)..(524): Homolog of NCBI NO: 10197654 NR Description: cytochrome p450-dependent monooxygenase [Brassica
  misc_feature (31)..(524): Homolog of NCBI NO: 10197652 NR Description: cytochrome p450-dependent monooxygenase [Brassica
  misc_feature (31)..(524): Homolog of NCBI NO: 10197650 NR Description: cytochrome p450-dependent monooxygenase [Brassica
  misc_feature (32)..(524): Homolog of NCBI NO: 5731998 NR Description: aldehyde 5-hydroxylase [Liquidambar styraciflua]
  misc_feature (18)..(524): Homolog of NCBI NO: 15234332 NR Description: cytochrome P450 84A1 / ferulate-5-hydroxylase
  misc_feature (18)..(524): Homolog of NCBI NO: 12578901 NR Description: ferulate-5-hydroxylase [Arabidopsis thaliana]
  misc_feature (18)..(524): Homolog of NCBI NO: 12578893 NR Description: ferulate-5-hydroxylase [Arabidopsis thaliana]
  misc_feature (24)..(541): Homolog of NCBI NO: 27476080 NR Description: Hypothetical protein [Oryza sativa (japonica
EGSCSIIAIQLVSRLSSMAASAKIATEFLKDPLIWLFLASLAFVILQRRRLGSAPFPPGPKPLPVIGNMTLVDQLTHRGLAALAKHYGGLLHLRLGRLHVFAVSTPEYAREVLHVQDAAFSNRPATIAVVYLTYGRSDMAFAHNGAYWRQMRKLCVTKIFSRRRAETWLAVRDGYGALARAVGRRSGEAVNLGELIFNLTVGVIFRAAFSTRDEDGLDEFIAILQEFSSLLGLFHIGDFFPWLGWVGRRGFNRRLRTGRGALDKFIDRIIDEHMRRGKNAADPDADLVDGLLAFLAEANPISGKHREDALRFTRDNVRAMIMDMLFGGPETVGSMTEWAMAEMMRSPDDLRRLQQELANVLGLDRTVDEPDLDKLPFLRCVVKETLRMHPPIPLLLHESAKDCVVGGYFVPKGSRVLVNAWAINRDPGAWKDGDTFRPSRFMPGEREAAGLDLKGGCYEFLPFGSGRRSCPAQGLGQHAVEFAVAQLAHGFNWELPDGMKPAELDMGDIFGLTALRATRLYAVPPHHASHAPCKYCLTCPM

SEQ ID NO: 62064 - protein, 524 aa, Triticum aestivum
  peptide (1)..(524): Ceres Seq. ID no. 14316041
  misc_feature (40)..(503): Pfam Name: Cytochrome P450 Pfam Description: Cytochrome P450
  misc_feature (16)..(507): Homolog of NCBI NO: 5002354 NR Description: ferulate-5-hydroxylase
  misc_feature (19)..(507): Homolog of NCBI NO: 6688937 NR Description: ferulate-5-hydroxylase [Populus balsamifera
  misc_feature (12)..(507): Homolog of NCBI NO: 10197654 NR Description: cytochrome p450-dependent monooxygenase [Brassica
  misc_feature (14)..(507): Homolog of NCBI NO: 10197652 NR Description: cytochrome p450-dependent monooxygenase [Brassica
  misc_feature (14)..(507): Homolog of NCBI NO: 10197650 NR Description: cytochrome p450-dependent monooxygenase [Brassica
  misc_feature (15)..(507): Homolog of NCBI NO: 5731998 NR Description: aldehyde 5-hydroxylase [Liquidambar styraciflua]
  misc_feature (1)..(507): Homolog of NCBI NO: 15234332 NR Description: cytochrome P450 84A1 / ferulate-5-hydroxylase
  misc_feature (1)..(507): Homolog of NCBI NO: 12578901 NR Description: ferulate-5-hydroxylase [Arabidopsis thaliana]
  misc_feature (1)..(507): Homolog of NCBI NO: 12578893 NR Description: ferulate-5-hydroxylase [Arabidopsis thaliana]
  misc_feature (7)..(524): Homolog of NCBI NO: 27476080 NR Description: Hypothetical protein [Oryza sativa (japonica
MAASAKIATEFLKDPLIWLFLASLAFVILQRRRLGSAPFPPGPKPLPVIGNMTLVDQLTHRGLAALAKHYGGLLHLRLGRLHVFAVSTPEYAREVLHVQDAAFSNRPATIAVVYLTYGRSDMAFAHNGAYWRQMRKLCVTKIFSRRRAETWLAVRDGYGALARAVGRRSGEAVNLGELIFNLTVGVIFRAAFSTRDEDGLDEFIAILQEFSSLLGLFHIGDFFPWLGWVGRRGFNRRLRTGRGALDKFIDRIIDEHMRRGKNAADPDADLVDGLLAFLAEANPISGKHREDALRFTRDNVRAMIMDMLFGGPETVGSMTEWAMAEMMRSPDDLRRLQQELANVLGLDRTVDEPDLDKLPFLRCVVKETLRMHPPIPLLLHESAKDCVVGGYFVPKGSRVLVNAWAINRDPGAWKDGDTFRPSRFMPGEREAAGLDLKGGCYEFLPFGSGRRSCPAQGLGQHAVEFAVAQLAHGFNWELPDGMKPAELDMGDIFGLTALRATRLYAVPPHHASHAPCKYCLTCPM

SEQ ID NO: 62065 - protein, 473 aa, Triticum aestivum
  peptide (1)..(473): Ceres Seq. ID no. 14316042
  misc_feature (1)..(452): Pfam Name: Cytochrome P450 Pfam Description: Cytochrome P450
  misc_feature (1)..(456): Homolog of NCBI NO: 5002354 NR Description: ferulate-5-hydroxylase
  misc_feature (1)..(456): Homolog of NCBI NO: 6688937 NR Description: ferulate-5-hydroxylase [Populus balsamifera
  misc_feature (1)..(456): Homolog of NCBI NO: 10197654 NR Description: cytochrome p450-dependent monooxygenase [Brassica
  misc_feature (1)..(456): Homolog of NCBI NO: 10197652 NR Description: cytochrome p450-dependent monooxygenase [Brassica
  misc_feature (1)..(456): Homolog of NCBI NO: 10197650 NR Description: cytochrome p450-dependent monooxygenase [Brassica
  misc_feature (1)..(456): Homolog of NCBI NO: 5731998 NR Description: aldehyde 5-hydroxylase [Liquidambar styraciflua]
  misc_feature (1)..(456): Homolog of NCBI NO: 15234332 NR Description: cytochrome P450 84A1 / ferulate-5-hydroxylase
  misc_feature (1)..(456): Homolog of NCBI NO: 12578901 NR Description: ferulate-5-hydroxylase [Arabidopsis thaliana]
  misc_feature (1)..(456): Homolog of NCBI NO: 12578893 NR Description: ferulate-5-hydroxylase [Arabidopsis thaliana]
  misc_feature (1)..(473): Homolog of NCBI NO: 27476080 NR Description: Hypothetical protein [Oryza sativa (japonica
MTLVDQLTHRGLAALAKHYGGLLHLRLGRLHVFAVSTPEYAREVLHVQDAAFSNRPATIAVVYLTYGRSDMAFAHNGAYWRQMRKLCVTKIFSRRRAETWLAVRDGYGALARAVGRRSGEAVNLGELIFNLTVGVIFRAAFSTRDEDGLDEFIAILQEFSSLLGLFHIGDFFPWLGWVGRRGFNRRLRTGRGALDKFIDRIIDEHMRRGKNAADPDADLVDGLLAFLAEANPISGKHREDALRFTRDNVRAMIMDMLFGGPETVGSMTEWAMAEMMRSPDDLRRLQQELANVLGLDRTVDEPDLDKLPFLRCVVKETLRMHPPIPLLLHESAKDCVVGGYFVPKGSRVLVNAWAINRDPGAWKDGDTFRPSRFMPGEREAAGLDLKGGCYEFLPFGSGRRSCPAQGLGQHAVEFAVAQLAHGFNWELPDGMKPAELDMGDIFGLTALRATRLYAVPPHHASHAPCKYCLTCPM

SEQ ID NO: 62066 - DNA, 1748 bp, Triticum aestivum
  misc_feature (1)..(1748): Ceres Seq. ID no. 13596034
atacaatttctccattcgtctcctactctcctctcccatccctcgccccccctcctcgccgcaagctctaatccccccaagattagctccaacgaacacgaattactgtggattagtgcgaggctttggccgcggcaaatctggggcggggcggttggaagagtcgcggccgaattgtttggtcgagcagatgatgacggcgaacgcgaaactccagaagcaggcgctgctgccgccgcgtagcccgttcccgacggcagcgtcgccgtccccgtacgcagaccatggcccgatcgcccggccacagggcgccacgcaccaccgctttggccatggccacggccatgggcatcaccagcgcacgtcgtctgagagcatcattgaggagcagccgtcgtggctcgacgacctgctcgacgagcctgagacgcccgtgcgccgcgcggggcaccgcaggtcgtcgagcgactcttttgctctgttcgacggaagcgctgcctccggcgcatttgccaatggttttgatgagattgggggaggagggcaggccgcgccatggggtggcgtgcaggagtactatgccaagccaagctcatacgggaggccgcagggccggccgtgggaacaaggcatgccgaatttggcaggttacaggccagggccgccggtgctggtgagggagaagctgggtgggcatcacgggccactgagtgcgtcgagggatcatgaacatgccatggacaaaagagctcttgatgaacttggggcagagaggaaggatggtgtgctgccaaagtatgcacaatcggaggcggacaccaagcgtgctaaacagcaatatgctcagaggtctcgtgttcgaaaactccagtatattgccgagcttgagggtaaagtccaatcattacagtcagaagggatagaagtgtctgctgaaatggagtttcttactcaacaaaatataatgctagacttggaaaacaaagccttgaagcaaaggctggagagtatagcacaggagcaagtaattaaacgtgttcaacaggagatgtttgagcgggaaattggtcgtctaaggtcattgtatcagcagcagcaacagacaccacagcctcctactcttggtcgtagtaacagcagagaccttgactcgcagtttgcaagcatgtctttgaaacaaaaagaccccaactctgggcgtgacgccgtctctgggcctcttcgtacttagttctttcagcctttttttctcgtgagttccaaaccactcctagaccactcttttgtggctgtgaattcgcgtcaagaatccttcaaggaatgcatcaggaaaggagcagcacatttggaattgtgcccctatcacttggtgaataactctggaaaggctaataactgtggatctgatcttcattctttgggaatatgcacctggtggtcatcctcagctcactgccattgttgatgctcgaccagtcggaggtgtttagtgttttatttgtagctctggatgctgttcgtgcatccctgtaccatttcggatcctagggttctaatttgttcctgtggtcttgtttctctatgttgtcttcttcatgcatcttagtcataatctgcattgcttcgtcagtggaatgtggagcactagttagcatctgatacagatgtttttaaatgtgccacatccttgagaactcatttgttttatcgttggtgattcaataaggtagtgcaaataaggtattagc

SEQ ID NO: 62067 - protein, 409 aa, Triticum aestivum
  peptide (1)..(409): Ceres Seq. ID no. 15221743
  misc_feature (281)..(329): Pfam Name: bZIP transcription factor Pfam Description: bZIP transcription factor
  misc_feature (117)..(164): Homolog of NCBI NO: 25403436 NR Description: protein F15O4.49 [imported] - Arabidopsis
  misc_feature (246)..(370): Homolog of NCBI NO: 25403436 NR Description: protein F15O4.49 [imported] - Arabidopsis
  misc_feature (101)..(164): Homolog of NCBI NO: 18399693 NR Description: bZIP family transcription factor [Arabidopsis
  misc_feature (246)..(370): Homolog of NCBI NO: 18399693 NR Description: bZIP family transcription factor [Arabidopsis
  misc_feature (73)..(167): Homolog of NCBI NO: 25404190 NR Description: hypothetical protein T18I24.3 [imported] -
  misc_feature (264)..(376): Homolog of NCBI NO: 25404190 NR Description: hypothetical protein T18I24.3 [imported] -
  misc_feature (73)..(167): Homolog of NCBI NO: 30696210 NR Description: bZIP family transcription factor [Arabidopsis
  misc_feature (264)..(376): Homolog of NCBI NO: 30696210 NR Description: bZIP family transcription factor [Arabidopsis
  misc_feature (73)..(167): Homolog of NCBI NO: 28393180 NR Description: putative bZIP family transcription factor
  misc_feature (264)..(404): Homolog of NCBI NO: 28393180 NR Description: putative bZIP family transcription factor
YNFSIRLLLSSPIPRPPSSPQALIPPRLAPTNTNYCGLVRGFGRGKSGAGRLEESRPNCLVEQMMTANAKLQKQALLPPRSPFPTAASPSPYADHGPIARPQGATHHRFGHGHGHGHHQRTSSESIIEEQPSWLDDLLDEPETPVRRAGHRRSSSDSFALFDGSAASGAFANGFDEIGGGGQAAPWGGVQEYYAKPSSYGRPQGRPWEQGMPNLAGYRPGPPVLVREKLGGHHGPLSASRDHEHAMDKRALDELGAERKDGVLPKYAQSEADTKRAKQQYAQRSRVRKLQYIAELEGKVQSLQSEGIEVSAEMEFLTQQNIMLDLENKALKQRLESIAQEQVIKRVQQEMFEREIGRLRSLYQQQQQTPQPPTLGRSNSRDLDSQFASMSLKQKDPNSGRDAVSGPLRT

SEQ ID NO: 62068 - protein, 346 aa, Triticum aestivum
  peptide (1)..(346): Ceres Seq. ID no. 15221744
  misc_feature (218)..(266): Pfam Name: bZIP transcription factor Pfam Description: bZIP transcription factor
  misc_feature (54)..(101): Homolog of NCBI NO: 25403436 NR Description: protein F15O4.49 [imported] - Arabidopsis
  misc_feature (183)..(307): Homolog of NCBI NO: 25403436 NR Description: protein F15O4.49 [imported] - Arabidopsis
  misc_feature (38)..(101): Homolog of NCBI NO: 18399693 NR Description: bZIP family transcription factor [Arabidopsis
  misc_feature (183)..(307): Homolog of NCBI NO: 18399693 NR Description: bZIP family transcription factor [Arabidopsis
  misc_feature (10)..(104): Homolog of NCBI NO: 25404190 NR Description: hypothetical protein T18I24.3 [imported] -
  misc_feature (201)..(313): Homolog of NCBI NO: 25404190 NR Description: hypothetical protein T18I24.3 [imported] -
  misc_feature (10)..(104): Homolog of NCBI NO: 30696210 NR Description: bZIP family transcription factor [Arabidopsis
  misc_feature (201)..(313): Homolog of NCBI NO: 30696210 NR Description: bZIP family transcription factor [Arabidopsis
  misc_feature (10)..(104): Homolog of NCBI NO: 28393180 NR Description: putative bZIP family transcription factor
  misc_feature (201)..(341): Homolog of NCBI NO: 28393180 NR Description: putative bZIP family transcription factor
MMTANAKLQKQALLPPRSPFPTAASPSPYADHGPIARPQGATHHRFGHGHGHGHHQRTSSESIIEEQPSWLDDLLDEPETPVRRAGHRRSSSDSFALFDGSAASGAFANGFDEIGGGGQAAPWGGVQEYYAKPSSYGRPQGRPWEQGMPNLAGYRPGPPVLVREKLGGHHGPLSASRDHEHAMDKRALDELGAERKDGVLPKYAQSEADTKRAKQQYAQRSRVRKLQYIAELEGKVQSLQSEGIEVSAEMEFLTQQNIMLDLENKALKQRLESIAQEQVIKRVQQEMFEREIGRLRSLYQQQQQTPQPPTLGRSNSRDLDSQFASMSLKQKDPNSGRDAVSGPLRT

SEQ ID NO: 62069 - protein, 345 aa, Triticum aestivum
  peptide (1)..(345): Ceres Seq. ID no. 15221745
  misc_feature (217)..(265): Pfam Name: bZIP transcription factor Pfam Description: bZIP transcription factor
  misc_feature (53)..(100): Homolog of NCBI NO: 25403436 NR Description: protein F15O4.49 [imported] - Arabidopsis
  misc_feature (182)..(306): Homolog of NCBI NO: 25403436 NR Description: protein F15O4.49 [imported] - Arabidopsis
  misc_feature (37)..(100): Homolog of NCBI NO: 18399693 NR Description: bZIP family transcription factor [Arabidopsis
  misc_feature (182)..(306): Homolog of NCBI NO: 18399693 NR Description: bZIP family transcription factor [Arabidopsis
  misc_feature (9)..(103): Homolog of NCBI NO: 25404190 NR Description: hypothetical protein T18I24.3 [imported] -
  misc_feature (200)..(312): Homolog of NCBI NO: 25404190 NR Description: hypothetical protein T18I24.3 [imported] -
  misc_feature (9)..(103): Homolog of NCBI NO: 30696210 NR Description: bZIP family transcription factor [Arabidopsis
  misc_feature (200)..(312): Homolog of NCBI NO: 30696210 NR Description: bZIP family transcription factor [Arabidopsis
  misc_feature (9)..(103): Homolog of NCBI NO: 28393180 NR Description: putative bZIP family transcription factor
  misc_feature (200)..(340): Homolog of NCBI NO: 28393180 NR Description: putative bZIP family transcription factor
MTANAKLQKQALLPPRSPFPTAASPSPYADHGPIARPQGATHHRFGHGHGHGHHQRTSSESIIEEQPSWLDDLLDEPETPVRRAGHRRSSSDSFALFDGSAASGAFANGFDEIGGGGQAAPWGGVQEYYAKPSSYGRPQGRPWEQGMPNLAGYRPGPPVLVREKLGGHHGPLSASRDHEHAMDKRALDELGAERKDGVLPKYAQSEADTKRAKQQYAQRSRVRKLQYIAELEGKVQSLQSEGIEVSAEMEFLTQQNIMLDLENKALKQRLESIAQEQVIKRVQQEMFEREIGRLRSLYQQQQQTPQPPTLGRSNSRDLDSQFASMSLKQKDPNSGRDAVSGPLRT

SEQ ID NO: 62070 - DNA, 2179 bp, Triticum aestivum
  misc_feature (1)..(2179): Ceres Seq. ID no. 14303627
acacccagcaaccaccaccacccgtctcctctcctctcctctcctcctcgtcttcctccttcggcctcctcctttgcagctaacggaaccgaagaaagcctttcgttgacatggctgctttcatcctcttcctctgcttgctcgtgccgctcgtcctcgcgtgcgccgtccgcgccaggaagggcgccgccgggcgggcgtcgtcgggcggcggcggcaaaaagggcggcaccagcctgccgctgccgccggggtcgatggggtggccgtacgtgggcgagaccacgcagctctactcctccaagaaccccaacgtcttcttcgccaggaagcggaacaagtacgggcccatcttcaagacgcacatcctcgggtgcccctgcgtcatggtgtccagcccggaggccgccaagttcgtgctcgtcactcaggcgcacctcttcaagcctaccttcccggccagcaaggagcggatgctgggcccccaggccatcttcttccagcagggggactaccatgcccacctccgccgtctcgtctcacgcgccttctctcccgaggccatccgcggttccgtccctgccatcgaggctatcgccctccgctccctcggctcctgggaagacctgcaagtcaacaccttccaagagatgaagacttacgctctgaatgtggcattgctgtccatcttcggcgaggaggagatgcagtacatcgaggagctgaagcagtgctacctgacgctggagaaggggtacaactcgatgccggtgaacctgccgggcacgctgttccacaaggccatgaaggcccgaaagcggctgggcgccattgtggcccacatcatctccgcccggcgcgagcgcgagcgcgggagcgacctcctgggctccttcatggacggccgcgaggcgctcaccgacgaccagatcgccgacaacgccatcggcgtcatcttcgccgcgcgcgacaccaccgccagcgtgctcacgtggatggtcaagttcctcggcgacaaccccgccgtcctcaaagccgtcaccgaagagcacgctgagatcgcgagggagaaggcgttgtccggcgagccactgtcgtgggccgacacgcggcggatgcggatgacgggccgggtgatccaggagacgatgcgggtggcgtccatcctctccttcaccttcagggaggccgtggaggacgtggagtaccaagggtacctgattcccaagggctggaaagtgcttcccctgttccggaacatccaccacaaccccgaccacttcccctcccctgaaaagttcgatccttcacgattcgaggtggcccccaagcccaacacgttcatgccgttcgggaacgggacccactcgtgccccggcaacgagctggccaagctggagatgctcgtcctctgccaccacctcgccaccaagtacagatggtccacctccaagtccgagagcggcgtccagttcggccccttcgccctccccatcaacggcctccccatgaccttcacccgcaaggacgacaagaacaaagcctgagccatccatccatccatccatccatcgcctcctcctcgttcccaaagggaaatcaacagcgcgatagaggcgacggcgtggcacatgcgagcgagctggatcggctccgtccgtgtccgtgccggtcgccgtcggaggggacacttgtagccgtgggcgccgcggcgggagcgggagcgggctggcggaggccgatcggagagagcacgggccgtcaaagtcctttgtacagattcttcagccaggaccatgacggctgggcgagacaagaccaagaaaaatcccactcttcaaaaacacacacacgtaggcattctcagctagggagatccggcgccacaaagaagtggcgccgaactgtaaaaccaaccattttttatccttttttccttcagatttttatttttttggcaacacctatactagtataggaggaggagagaagacagcagactgacaggccctgattgggatgtaagataggctgcccgcctgaaagcaggctggcagctaggccgaataatcaatggatcgatcgctcgcggcaaagggccaaaaggaggcccccgggagagcgacccctctgtattgtttgttacacgtcaatgcagctggaaatggctttcttgtgg

SEQ ID NO: 62071 - protein, 478 aa, Triticum aestivum
  peptide (1)..(478): Ceres Seq. ID no. 14303628
  misc_feature (46)..(467): Pfam Name: Cytochrome P450 Pfam Description: Cytochrome P450
  misc_feature (1)..(474): Homolog of NCBI NO: 18419825 NR Description: rotundifolia3 (rot3) [Arabidopsis thaliana]
  misc_feature (45)..(471): Homolog of NCBI NO: 13021856 NR Description: ent-kaurenoic acid hydroxylase [Arabidopsis
  misc_feature (45)..(471): Homolog of NCBI NO: 15225685 NR Description: ent-kaurenoic acid oxidase / cytochrome P450
  misc_feature (10)..(444): Homolog of NCBI NO: 9294629 NR Description: cytochrome P450 [Arabidopsis thaliana]
  misc_feature (43)..(470): Homolog of NCBI NO: 15227033 NR Description: cytochrome p450 family [Arabidopsis thaliana]
  misc_feature (10)..(471): Homolog of NCBI NO: 18402179 NR Description: cytochrome P450, putative [Arabidopsis thaliana]
  misc_feature (6)..(443): Homolog of NCBI NO: 30694744 NR Description: cytochrome P450 family [Arabidopsis thaliana]
  misc_feature (39)..(443): Homolog of NCBI NO: 7430728 NR Description: cytochrome P450 - Arabidopsis thaliana
  misc_feature (6)..(472): Homolog of NCBI NO: 30694740 NR Description: cytochrome P450 family [Arabidopsis thaliana]
  misc_feature (39)..(474): Homolog of NCBI NO: 18415271 NR Description: cytochrome P450 family [Arabidopsis thaliana]
MAAFILFLCLLVPLVLACAVRARKGAAGRASSGGGGKKGGTSLPLPPGSMGWPYVGETTQLYSSKNPNVFFARKRNKYGPIFKTHILGCPCVMVSSPEAAKFVLVTQAHLFKPTFPASKERMLGPQAIFFQQGDYHAHLRRLVSRAFSPEAIRGSVPAIEAIALRSLGSWEDLQVNTFQEMKTYALNVALLSIFGEEEMQYIEELKQCYLTLEKGYNSMPVNLPGTLFHKAMKARKRLGAIVAHIISARRERERGSDLLGSFMDGREALTDDQIADNAIGVIFAARDTTASVLTWMVKFLGDNPAVLKAVTEEHAEIAREKALSGEPLSWADTRRMRMTGRVIQETMRVASILSFTFREAVEDVEYQGYLIPKGWKVLPLFRNIHHNPDHFPSPEKFDPSRFEVAPKPNTFMPFGNGTHSCPGNELAKLEMLVLCHHLATKYRWSTSKSESGVQFGPFALPINGLPMTFTRKDDKNKA

SEQ ID NO: 62072 - protein, 429 aa, Triticum aestivum
  peptide (1)..(429): Ceres Seq. ID no. 14303629
  misc_feature (1)..(418): Pfam Name: Cytochrome P450 Pfam Description: Cytochrome P450
  misc_feature (1)..(425): Homolog of NCBI NO: 18419825 NR Description: rotundifolia3 (rot3) [Arabidopsis thaliana]
  misc_feature (1)..(422): Homolog of NCBI NO: 13021856 NR Description: ent-kaurenoic acid hydroxylase [Arabidopsis
  misc_feature (1)..(422): Homolog of NCBI NO: 15225685 NR Description: ent-kaurenoic acid oxidase / cytochrome P450
  misc_feature (1)..(395): Homolog of NCBI NO: 9294629 NR Description: cytochrome P450 [Arabidopsis thaliana]
  misc_feature (1)..(421): Homolog of NCBI NO: 15227033 NR Description: cytochrome p450 family [Arabidopsis thaliana]
  misc_feature (1)..(422): Homolog of NCBI NO: 18402179 NR Description: cytochrome P450, putative [Arabidopsis thaliana]
  misc_feature (1)..(394): Homolog of NCBI NO: 30694744 NR Description: cytochrome P450 family [Arabidopsis thaliana]
  misc_feature (1)..(394): Homolog of NCBI NO: 7430728 NR Description: cytochrome P450 - Arabidopsis thaliana
  misc_feature (1)..(423): Homolog of NCBI NO: 30694740 NR Description: cytochrome P450 family [Arabidopsis thaliana]
  misc_feature (1)..(425): Homolog of NCBI NO: 18415271 NR Description: cytochrome P450 family [Arabidopsis thaliana]
MGWPYVGETTQLYSSKNPNVFFARKRNKYGPIFKTHILGCPCVMVSSPEAAKFVLVTQAHLFKPTFPASKERMLGPQAIFFQQGDYHAHLRRLVSRAFSPEAIRGSVPAIEAIALRSLGSWEDLQVNTFQEMKTYALNVALLSIFGEEEMQYIEELKQCYLTLEKGYNSMPVNLPGTLFHKAMKARKRLGAIVAHIISARRERERGSDLLGSFMDGREALTDDQIADNAIGVIFAARDTTASVLTWMVKFLGDNPAVLKAVTEEHAEIAREKALSGEPLSWADTRRMRMTGRVIQETMRVASILSFTFREAVEDVEYQGYLIPKGWKVLPLFRNIHHNPDHFPSPEKFDPSRFEVAPKPNTFMPFGNGTHSCPGNELAKLEMLVLCHHLATKYRWSTSKSESGVQFGPFALPINGLPMTFTRKDDKNKA

SEQ ID NO: 62073 - protein, 386 aa, Triticum aestivum
  peptide (1)..(386): Ceres Seq. ID no. 14303630
  misc_feature (1)..(375): Pfam Name: Cytochrome P450 Pfam Description: Cytochrome P450
  misc_feature (1)..(382): Homolog of NCBI NO: 18419825 NR Description: rotundifolia3 (rot3) [Arabidopsis thaliana]
  misc_feature (1)..(379): Homolog of NCBI NO: 13021856 NR Description: ent-kaurenoic acid hydroxylase [Arabidopsis
  misc_feature (1)..(379): Homolog of NCBI NO: 15225685 NR Description: ent-kaurenoic acid oxidase / cytochrome P450
  misc_feature (1)..(352): Homolog of NCBI NO: 9294629 NR Description: cytochrome P450 [Arabidopsis thaliana]
  misc_feature (1)..(378): Homolog of NCBI NO: 15227033 NR Description: cytochrome p450 family [Arabidopsis thaliana]
  misc_feature (1)..(379): Homolog of NCBI NO: 18402179 NR Description: cytochrome P450, putative [Arabidopsis thaliana]
  misc_feature (1)..(351): Homolog of NCBI NO: 30694744 NR Description: cytochrome P450 family [Arabidopsis thaliana]
  misc_feature (1)..(351): Homolog of NCBI NO: 7430728 NR Description: cytochrome P450 - Arabidopsis thaliana
  misc_feature (1)..(380): Homolog of NCBI NO: 30694740 NR Description: cytochrome P450 family [Arabidopsis thaliana]
  misc_feature (1)..(382): Homolog of NCBI NO: 18415271 NR Description: cytochrome P450 family [Arabidopsis thaliana]
MVSSPEAAKFVLVTQAHLFKPTFPASKERMLGPQAIFFQQGDYHAHLRRLVSRAFSPEAIRGSVPAIEAIALRSLGSWEDLQVNTFQEMKTYALNVALLSIFGEEEMQYIEELKQCYLTLEKGYNSMPVNLPGTLFHKAMKARKRLGAIVAHIISARRERERGSDLLGSFMDGREALTDDQIADNAIGVIFAARDTTASVLTWMVKFLGDNPAVLKAVTEEHAEIAREKALSGEPLSWADTRRMRMTGRVIQETMRVASILSFTFREAVEDVEYQGYLIPKGWKVLPLFRNIHHNPDHFPSPEKFDPSRFEVAPKPNTFMPFGNGTHSCPGNELAKLEMLVLCHHLATKYRWSTSKSESGVQFGPFALPINGLPMTFTRKDDKNKA

SEQ ID NO: 62074 - DNA, 1577 bp, Triticum aestivum
  misc_feature (1)..(1577): Ceres Seq. ID no. 13596512
ccttccccttctcctctccaactgctagatctagagtagccccgttaaagcccaaacaaaaaccccgccgcgagatctgcgcatctcgccacaccaccaccacgacggccatggcggcgccgcgcgtcctcctcctcctcgccgccgcggccatcctcgccgtcgcctccctcggggacgcttcgggcgagggcccccgcgggcgcaagctgctggtgctcgtcgacgatctggccgtccgctcatcccactcggccttcttcggctcgcttcaggcccgcgggctagatctggagttccgcctcgccgacgaccccaagctctcgctccaccgctacggtcagtacctctacgacggcctcgtcctcttcgccccatcgaccccgcgtttcggcggatcggtggaccagaatgctgttctggagtttatcgatgctgggcacgatatgattctggcagcagatcattcggcttcagatctgatccgcggcatcgcgacggagtgtggggttgactttgatgaggacccggaagcaatggttattgaccacatcaattatgcctccagtgaggttgaaggtgaccacaccttgattgctggcgatgacctgattcagtcagatgtgatattgggatccaaaaagattgaggctcctgttctgttccgagggattgcgcatgcggctaatccatccaacagcttggttttaaaggttctatctgcctcgccatcagcgtattcagcaaacccggaggctaagctggcatccgttccatctctcacagggtcggccatatcactggtttctgttatgcaggctaggaataatgctcgtgtgttaatatctggatcactggatttgtttagcaacaggttcctaaagtctggtgtgcagaaggctggcagcaaaatgagccatgacaaagctggaaatgaacaatttgtgacagagacgagcaaatgggtcttccatgagaggggtcatctgaaggcagtgaatgtgatgcaccataaggttggggagacaaatgagcctagcatgtaccgcatcaatgatgacttggaatactcagttgagatatatgaatggtctggtacaagttggaagccatatgttgctgatgatgttcagattcagtttttcatgatgagcccttatgttctgaaaaatatgtcaactgacaaatcggctgtatattcagcatccttcaaagttccagatgtttatggagttttccagttcaaggttgagtaccaaaggcttggatacactggcctctctcttgcaaagcagattccagtccgtccatacaggcatgacgagtatgagaggttcataacttcagcgtttccatactatgctgcctcattttcaacaatgggagccttcttcatattctcagttgcgtacctgtatcacaaatagatagctcatcaagtagtggaagtaaatcaaggcggtgatggaattgtgatgtcataagcatggtgatcttaggtgcaattttatggaaccatctttttgtagcgccaatctgtagtacctttatttttaagaaatgggcttctccctgcc

SEQ ID NO: 62075 - protein, 474 aa, Triticum aestivum
  peptide (1)..(474): Ceres Seq. ID no. 15221911
  misc_feature (61)..(474): Pfam Name: Dolichyl-diphosphooligosaccharide-protein Pfam Description: Dolichyl-diphosphooligosaccharide-protein
  misc_feature (40)..(474): Homolog of NCBI NO: 6681153 NR Description: dolichyl-di-phosphooligosaccharide-protein
  misc_feature (52)..(474): Homolog of NCBI NO: 30584753 NR Description: Homo sapiens
  misc_feature (52)..(474): Homolog of NCBI NO: 21104416 NR Description: dolichyl-diphosphooligosaccharide-protein
  misc_feature (52)..(474): Homolog of NCBI NO: 20070197 NR Description: dolichyl-diphosphooligosaccharide-protein
  misc_feature (39)..(474): Homolog of NCBI NO: 27728696 NR Description: dolichyl-diphosphooligosaccharide--protein
  misc_feature (61)..(474): Homolog of NCBI NO: 8843726 NR Description: dolichyl-di-phosphooligosaccharide-protein
  misc_feature (61)..(474): Homolog of NCBI NO: 14334506 NR Description: putative
  misc_feature (61)..(474): Homolog of NCBI NO: 21553942 NR Description: dolichyl-di-phosphooligosaccharide-protein
  misc_feature (61)..(474): Homolog of NCBI NO: 18425101 NR Description: dolichyl-di-phosphooligosaccharide-protein
  misc_feature (37)..(474): Homolog of NCBI NO: 38175467 NR Description: putative dolichyl-di-phosphooligosaccharide-
FPFSSPTARSRVAPLKPKQKPRREICASRHTTTTTAMAAPRVLLLLAAAAILAVASLGDASGEGPRGRKLLVLVDDLAVRSSHSAFFGSLQARGLDLEFRLADDPKLSLHRYGQYLYDGLVLFAPSTPRFGGSVDQNAVLEFIDAGHDMILAADHSASDLIRGIATECGVDFDEDPEAMVIDHINYASSEVEGDHTLIAGDDLIQSDVILGSKKIEAPVLFRGIAHAANPSNSLVLKVLSASPSAYSANPEAKLASVPSLTGSAISLVSVMQARNNARVLISGSLDLFSNRFLKSGVQKAGSKMSHDKAGNEQFVTETSKWVFHERGHLKAVNVMHHKVGETNEPSMYRINDDLEYSVEIYEWSGTSWKPYVADDVQIQFFMMSPYVLKNMSTDKSAVYSASFKVPDVYGVFQFKVEYQRLGYTGLSLAKQIPVRPYRHDEYERFITSAFPYYAASFSTMGAFFIFSVAYLYHK

SEQ ID NO: 62076 - protein, 438 aa, Triticum aestivum
  peptide (1)..(438): Ceres Seq. ID no. 15221912
  misc_feature (25)..(438): Pfam Name: Dolichyl-diphosphooligosaccharide-protein Pfam Description: Dolichyl-diphosphooligosaccharide-protein
  misc_feature (4)..(438): Homolog of NCBI NO: 6681153 NR Description: dolichyl-di-phosphooligosaccharide-protein
  misc_feature (16)..(438): Homolog of NCBI NO: 30584753 NR Description: Homo sapiens
  misc_feature (16)..(438): Homolog of NCBI NO: 21104416 NR Description: dolichyl-diphosphooligosaccharide-protein
  misc_feature (16)..(438): Homolog of NCBI NO: 20070197 NR Description: dolichyl-diphosphooligosaccharide-protein
  misc_feature (3)..(438): Homolog of NCBI NO: 27728696 NR Description: dolichyl-diphosphooligosaccharide--protein
  misc_feature (25)..(438): Homolog of NCBI NO: 8843726 NR Description: dolichyl-di-phosphooligosaccharide-protein
  misc_feature (25)..(438): Homolog of NCBI NO: 14334506 NR Description: putative
  misc_feature (25)..(438): Homolog of NCBI NO: 21553942 NR Description: dolichyl-di-phosphooligosaccharide-protein
  misc_feature (25)..(438): Homolog of NCBI NO: 18425101 NR Description: dolichyl-di-phosphooligosaccharide-protein
  misc_feature (1)..(438): Homolog of NCBI NO: 38175467 NR Description: putative dolichyl-di-phosphooligosaccharide-
MAAPRVLLLLAAAAILAVASLGDASGEGPRGRKLLVLVDDLAVRSSHSAFFGSLQARGLDLEFRLADDPKLSLHRYGQYLYDGLVLFAPSTPRFGGSVDQNAVLEFIDAGHDMILAADHSASDLIRGIATECGVDFDEDPEAMVIDHINYASSEVEGDHTLIAGDDLIQSDVILGSKKIEAPVLFRGIAHAANPSNSLVLKVLSASPSAYSANPEAKLASVPSLTGSAISLVSVMQARNNARVLISGSLDLFSNRFLKSGVQKAGSKMSHDKAGNEQFVTETSKWVFHERGHLKAVNVMHHKVGETNEPSMYRINDDLEYSVEIYEWSGTSWKPYVADDVQIQFFMMSPYVLKNMSTDKSAVYSASFKVPDVYGVFQFKVEYQRLGYTGLSLAKQIPVRPYRHDEYERFITSAFPYYAASFSTMGAFFIFSVAYLYHK

SEQ ID NO: 62077 - protein, 326 aa, Triticum aestivum
  peptide (1)..(326): Ceres Seq. ID no. 15221913
  misc_feature (1)..(326): Pfam Name: Dolichyl-diphosphooligosaccharide-protein Pfam Description: Dolichyl-diphosphooligosaccharide-protein
  misc_feature (1)..(326): Homolog of NCBI NO: 6681153 NR Description: dolichyl-di-phosphooligosaccharide-protein
  misc_feature (1)..(326): Homolog of NCBI NO: 30584753 NR Description: Homo sapiens
  misc_feature (1)..(326): Homolog of NCBI NO: 21104416 NR Description: dolichyl-diphosphooligosaccharide-protein
  misc_feature (1)..(326): Homolog of NCBI NO: 20070197 NR Description: dolichyl-diphosphooligosaccharide-protein
  misc_feature (1)..(326): Homolog of NCBI NO: 27728696 NR Description: dolichyl-diphosphooligosaccharide--protein
  misc_feature (1)..(326): Homolog of NCBI NO: 8843726 NR Description: dolichyl-di-phosphooligosaccharide-protein
  misc_feature (1)..(326): Homolog of NCBI NO: 14334506 NR Description: putative
  misc_feature (1)..(326): Homolog of NCBI NO: 21553942 NR Description: dolichyl-di-phosphooligosaccharide-protein
  misc_feature (1)..(326): Homolog of NCBI NO: 18425101 NR Description: dolichyl-di-phosphooligosaccharide-protein
  misc_feature (1)..(326): Homolog of NCBI NO: 38175467 NR Description: putative dolichyl-di-phosphooligosaccharide-
MILAADHSASDLIRGIATECGVDFDEDPEAMVIDHINYASSEVEGDHTLIAGDDLIQSDVILGSKKIEAPVLFRGIAHAANPSNSLVLKVLSASPSAYSANPEAKLASVPSLTGSAISLVSVMQARNNARVLISGSLDLFSNRFLKSGVQKAGSKMSHDKAGNEQFVTETSKWVFHERGHLKAVNVMHHKVGETNEPSMYRINDDLEYSVEIYEWSGTSWKPYVADDVQIQFFMMSPYVLKNMSTDKSAVYSASFKVPDVYGVFQFKVEYQRLGYTGLSLAKQIPVRPYRHDEYERFITSAFPYYAASFSTMGAFFIFSVAYLYHK

SEQ ID NO: 62078 - DNA, 613 bp, Triticum aestivum
  misc_feature (1)..(613): Ceres Seq. ID no. 13654722
acaataaccacaaccacagccagcaagatctagtcaaagaaacacatcaatccagagcgtccaccagagtcactaacttgtccagccgcagcaatggcggtgcggtggccatcgcccgccgtggccgcgttgtggatcggcgcgagcctcctagtcctgtgcacgctcatggcgtcgtcggcgtcagcccaggcgccgccgccacaggtgcgtaaggtgcccaagggcagcaacctggtggtgatcaagccgggggtcgggaagcgcaacagcaagttcacctgcaccgacaccaagaagaagcggcccgggtgcgaggccacctgccccagccgctgccccaaagagtgcctcgtcctctgcccatcctgcatgaccttctgcctgtgtgacttctacgcgggggcgtcgtgcggcgacccgcgcttcaccggcggcgacggcaacaacttctacttccacggcaagaagaaccaggacttctgcatcctctccgacgacgacctccacatcaacgcgcacttcatcggcaaccacaaccccgcgacgagccgcgacttcacctggatccaggccnnngntgtcatgttcgcccaccaccgcctccacctcg

SEQ ID NO: 62079 - protein, 173 aa, Triticum aestivum
  peptide (1)..(173): Ceres Seq. ID no. 13654723
  misc_feature (49)..(170): Homolog of NCBI NO: 7484468 NR Description: late embryonic abundant protein EMB7 - white
  misc_feature (36)..(172): Homolog of NCBI NO: 11994465 NR Description: contains similarity to late embryogenesis
  misc_feature (36)..(172): Homolog of NCBI NO: 30685319 NR Description: late embryogenesis abundant protein -related
  misc_feature (15)..(172): Homolog of NCBI NO: 4514637 NR Description: root cap protein 2 [Zea mays]
  misc_feature (8)..(172): Homolog of NCBI NO: 21741738 NR Description: OSJNBa0073L04.18 [Oryza sativa (japonica
  misc_feature (15)..(172): Homolog of NCBI NO: 34905934 NR Description: similar to root cap protein
  misc_feature (9)..(172): Homolog of NCBI NO: 34905940 NR Description: similar to root cap protein
  misc_feature (20)..(172): Homolog of NCBI NO: 4514635 NR Description: root cap protein 1 [Zea mays]
  misc_feature (16)..(172): Homolog of NCBI NO: 34905930 NR Description: similar to root cap protein
  misc_feature (9)..(172): Homolog of NCBI NO: 34905936 NR Description: similar to root cap protein
  misc_feature (162)..(162): Xaa is any aa, unknown or other
  misc_feature (163)..(163): Xaa is any aa, unknown or other
MAVRWPSPAVAALWIGASLLVLCTLMASSASAQAPPPQVRKVPKGSNLVVIKPGVGKRNSKFTCTDTKKKRPGCEATCPSRCPKECLVLCPSCMTFCLCDFYAGASCGDPRFTGGDGNNFYFHGKKNQDFCILSDDDLHINAHFIGNHNPATSRDFTWIQAXXVMFAHHRLHL

SEQ ID NO: 62080 - protein, 148 aa, Triticum aestivum
  peptide (1)..(148): Ceres Seq. ID no. 13654724
  misc_feature (24)..(145): Homolog of NCBI NO: 7484468 NR Description: late embryonic abundant protein EMB7 - white
  misc_feature (11)..(147): Homolog of NCBI NO: 11994465 NR Description: contains similarity to late embryogenesis
  misc_feature (11)..(147): Homolog of NCBI NO: 30685319 NR Description: late embryogenesis abundant protein -related
  misc_feature (1)..(147): Homolog of NCBI NO: 4514637 NR Description: root cap protein 2 [Zea mays]
  misc_feature (1)..(147): Homolog of NCBI NO: 21741738 NR Description: OSJNBa0073L04.18 [Oryza sativa (japonica
  misc_feature (1)..(147): Homolog of NCBI NO: 34905934 NR Description: similar to root cap protein
  misc_feature (1)..(147): Homolog of NCBI NO: 34905940 NR Description: similar to root cap protein
  misc_feature (1)..(147): Homolog of NCBI NO: 4514635 NR Description: root cap protein 1 [Zea mays]
  misc_feature (1)..(147): Homolog of NCBI NO: 34905930 NR Description: similar to root cap protein
  misc_feature (1)..(147): Homolog of NCBI NO: 34905936 NR Description: similar to root cap protein
  misc_feature (137)..(137): Xaa is any aa, unknown or other
  misc_feature (138)..(138): Xaa is any aa, unknown or other
MASSASAQAPPPQVRKVPKGSNLVVIKPGVGKRNSKFTCTDTKKKRPGCEATCPSRCPKECLVLCPSCMTFCLCDFYAGASCGDPRFTGGDGNNFYFHGKKNQDFCILSDDDLHINAHFIGNHNPATSRDFTWIQAXXVMFAHHRLHL

SEQ ID NO: 62081 - DNA, 1074 bp, Triticum aestivum
  misc_feature (1)..(1074): Ceres Seq. ID no. 13582893
aaacataccacgcctccccgccaccttcggaacgccacagcgcacagcccatccccatccccatccaccaccgcgcgctctccgacggccatcgaacgccatggcgctcctcctcccccgcacggcgcggctcgcgctcctctccgccggccctcgagcctactcctccaccgtcggcgcggcgggaacagcggcgccggcgccgtacggtggcggggcgcccgcgccggcgccgatgccgaaggccgcggagttcgtggtgtccaaggtggacgatctgatgaactgggcccggcggggctcgatctggcccatgacgttcggcctcgcgtgctgcgccgtggagatgatgcacgccggcgccgcccgctacgacttcgaccgcttcggcgtcatcttccgcccctcgccgcgccagtccgactgcatgatcgtcgccggcacgctcaccaacaagatggcgcccgcgctccgcaaggtttatgaccagatgccagagcctcggtgggtgatctcgatgggcagctgcgccaatggcggcggatactaccactactcatactccgtcgtgcgtgggtgcgaccggatcgttcccgtggacatctacgtccctgggtgccctccaacagctgaagctctcctgtatggcgttctccagttgcagaagaagatcaacaggcgcaaggatttccttcactggtgggagaagtgaattagcactttggaccatcaggttcatgaggatgcagctcttctacgtattgttgggacgttgggttctttcgtttctgtttggtggaataagcgaagcatgtgcttcctggtccgtggtaattggtaagtaagtagcttgtgtcttgtgtgtgctgggtgggttcctaccttgcttcacaggccatgaaaaagctacgtactggtggttgtggttgaacaggtgatgcttatggtttaccccagtctgtactggtatattgtatatctgtacagtacatgctggtggttgaacagttgatgcttctggaattgtatgtgttctatgcaattgtgataatgtacactgttggggttgtgtgt

SEQ ID NO: 62082 - protein, 236 aa, Triticum aestivum
  peptide (1)..(236): Ceres Seq. ID no. 13582894
  misc_feature (114)..(221): Pfam Name: NADH ubiquinone oxidoreductase, 20 Kd subunit Pfam Description: NADH ubiquinone oxidoreductase, 20 Kd subunit
  misc_feature (79)..(236): Homolog of NCBI NO: 11466592 NR Description: NADH dehydrogenase subunit 10 [Rhodomonas salina]
  misc_feature (76)..(236): Homolog of NCBI NO: 34328788 NR Description: NADH:ubiquinone oxidoreductase subunit 10;
  misc_feature (26)..(236): Homolog of NCBI NO: 34862315 NR Description: similar to NADH dehydrogenase (ubiquinone) Fe-S
  misc_feature (35)..(234): Homolog of NCBI NO: 2499328 NR Description: NADH-ubiquinone oxidoreductase 20 kDa subunit,
  misc_feature (65)..(236): Homolog of NCBI NO: 9652190 NR Description: NADH-ubiquinone oxidoreductase subunit PSST
  misc_feature (26)..(236): Homolog of NCBI NO: 9652180 NR Description: NADH-ubiquinone oxidoreductase subunit PSST
  misc_feature (34)..(236): Homolog of NCBI NO: 11277624 NR Description: NADH2 dehydrogenase (ubiquinone) (EC 1.6.5.3)
  misc_feature (28)..(236): Homolog of NCBI NO: 15239782 NR Description: NADH dehydrogenase (ubiquinone) [Arabidopsis
  misc_feature (28)..(236): Homolog of NCBI NO: 1171866 NR Description: NADH-ubiquinone oxidoreductase 20 kDa subunit,
  misc_feature (37)..(236): Homolog of NCBI NO: 34910678 NR Description: putative NADH dehydrogenase (ubiquinone) chain
NIPRLPATFGTPQRTAHPHPHPPPRALRRPSNAMALLLPRTARLALLSAGPRAYSSTVGAAGTAAPAPYGGGAPAPAPMPKAAEFVVSKVDDLMNWARRGSIWPMTFGLACCAVEMMHAGAARYDFDRFGVIFRPSPRQSDCMIVAGTLTNKMAPALRKVYDQMPEPRWVISMGSCANGGGYYHYSYSVVRGCDRIVPVDIYVPGCPPTAEALLYGVLQLQKKINRRKDFLHWWEK

SEQ ID NO: 62083 - protein, 203 aa, Triticum aestivum
  peptide (1)..(203): Ceres Seq. ID no. 13582895
  misc_feature (81)..(188): Pfam Name: NADH ubiquinone oxidoreductase, 20 Kd subunit Pfam Description: NADH ubiquinone oxidoreductase, 20 Kd subunit
  misc_feature (46)..(203): Homolog of NCBI NO: 11466592 NR Description: NADH dehydrogenase subunit 10 [Rhodomonas salina]
  misc_feature (43)..(203): Homolog of NCBI NO: 34328788 NR Description: NADH:ubiquinone oxidoreductase subunit 10;
  misc_feature (1)..(203): Homolog of NCBI NO: 34862315 NR Description: similar to NADH dehydrogenase (ubiquinone) Fe-S
  misc_feature (2)..(201): Homolog of NCBI NO: 2499328 NR Description: NADH-ubiquinone oxidoreductase 20 kDa subunit,
  misc_feature (32)..(203): Homolog of NCBI NO: 9652190 NR Description: NADH-ubiquinone oxidoreductase subunit PSST
  misc_feature (1)..(203): Homolog of NCBI NO: 9652180 NR Description: NADH-ubiquinone oxidoreductase subunit PSST
  misc_feature (1)..(203): Homolog of NCBI NO: 11277624 NR Description: NADH2 dehydrogenase (ubiquinone) (EC 1.6.5.3)
  misc_feature (1)..(203): Homolog of NCBI NO: 15239782 NR Description: NADH dehydrogenase (ubiquinone) [Arabidopsis
  misc_feature (1)..(203): Homolog of NCBI NO: 1171866 NR Description: NADH-ubiquinone oxidoreductase 20 kDa subunit,
  misc_feature (4)..(203): Homolog of NCBI NO: 34910678 NR Description: putative NADH dehydrogenase (ubiquinone) chain
MALLLPRTARLALLSAGPRAYSSTVGAAGTAAPAPYGGGAPAPAPMPKAAEFVVSKVDDLMNWARRGSIWPMTFGLACCAVEMMHAGAARYDFDRFGVIFRPSPRQSDCMIVAGTLTNKMAPALRKVYDQMPEPRWVISMGSCANGGGYYHYSYSVVRGCDRIVPVDIYVPGCPPTAEALLYGVLQLQKKINRRKDFLHWWEK

SEQ ID NO: 62084 - protein, 161 aa, Triticum aestivum
  peptide (1)..(161): Ceres Seq. ID no. 13582896
KHTTPPRHLRNATAHSPSPSPSTTARSPTAIERHGAPPPPHGAARAPLRRPSSLLLHRRRGGNSGAGAVRWRGARAGADAEGRGVRGVQGGRSDELGPAGLDLAHDVRPRVLRRGDDARRRRPLRLRPLRRHLPPLAAPVRLHDRRRHAHQQDGARAPQGL

SEQ ID NO: 62085 - DNA, 1712 bp, Triticum aestivum
  misc_feature (1)..(1712): Ceres Seq. ID no. 15169670
tttccttcttctccccaccccgcgcggcgcctcctctcctctcttcccctcccccctcgccgccgccgccgccgccagcgcctcctccaccaccgctcgtcctcctatacacaggtgcggaggaggagatgttggtgctcttcgagacgcccgcggggttcgccctcttcaaggtgctggacgaggggaagctcagcagcgtcgaggatctgtggaaggactttgcctcgtcggacaaagcaaggaaggtggttgagctgaaggctttcaacaagtttgaaaatacttctgatgctctttcagccgcaactttgctgattgatagcaagcccagcaagggtctgcgcaagttcctgcagaagcactgtgatggtgaaacattggctgttgctgattccaaacttgggaatgccatcaaagaaaagctgcaaattgattgccttcacaactctgctgttatggaactgatgagagggctgaggaaccagctcactgaacttatgtctggactagctgagcatgatctaggtccaatgagcctaggattgtcccacagcttgtctaggtataaactcaagttcagccctgaaaaggttgatactatgatcattcaggccattggcttgttggatgatcttgacaaggagcttaacacttacgctatgagggtccgtgaatggtacggttggcactttccggagctcacaaaaattgttgcagataacatccattatgcgaaagctgtgaagatgatgggcaatcgtgttaatgcagttaaccttgacttctctgagatacttccagaagaagtggaagcagagctgaaggaggcagctgtaatttccatgggaacagaagtcaatgatcttgacctctcaaacattagggaactgtgtgatcaagtcctggctctttctgagtacagagcccagctctatgactatctaaaaagtagaatgaataccattgctcccaacttgactgcacttgttggtgaacttgttggcgctcgccttatttcccatggtggtagtttgatgaatctggcgaagcagcctggcagcacgattcagattctgggggcagagaaggccttattcagagctctgaagacaaagcatgctacaccaaagtatggtctcatctatcatgcatcattaattggacaggcggctcccaagcacaagggaaagatctctcgttcgcttgctgctaagagtgcacttgccataagatatgacgcccttgctgacggtgacgataactccatgggtcttgaaagcaggatcaagcttgaaacacggctccgagttcttgagggtaaagaacttgggaggtctgctggttctacgaaaggaaagcccaagatagaagcgtatgaaaaggaccggaagggtggtggtgctctgatcactcccgctaaaacttacaactcagcagcagatcttgtgcttggacaaaccactgaagaaacgccaaagaagtcagaagttgcttcaaagaagaggaagcaccaagaggaagaacctactgcggaggcagctgaagaggatggcgagcaggagaaagagaagtccaagaagaagaagaagaaatccaaggacatcgaggagacccccgcagccgtcaccgacgctagcgagaagaagaagaaaaagaagagcaaggaggccgaggagacccctgcagccgacgccgacggcgagaagaag

SEQ ID NO: 62086 - protein, 570 aa, Triticum aestivum
  peptide (1)..(570): Ceres Seq. ID no. 15169671
  misc_feature (293)..(441): Pfam Name: Putative snoRNA binding domain Pfam Description: Putative snoRNA binding domain
  misc_feature (43)..(561): Homolog of NCBI NO: 39794520 NR Description: Unknown (protein for MGC:75641) [Silurana
  misc_feature (43)..(464): Homolog of NCBI NO: 25083410 NR Description: SAR DNA-binding protein - like [Arabidopsis
  misc_feature (43)..(474): Homolog of NCBI NO: 2811028 NR Description: Hypothetical protein At5g27120
  misc_feature (43)..(569): Homolog of NCBI NO: 15240445 NR Description: SAR DNA-binding protein, putative [Arabidopsis
  misc_feature (43)..(569): Homolog of NCBI NO: 33945887 NR Description: SAR DNA-binding protein-like protein
  misc_feature (43)..(569): Homolog of NCBI NO: 15229884 NR Description: SAR DNA-binding protein, putative [Arabidopsis
  misc_feature (43)..(569): Homolog of NCBI NO: 7451352 NR Description: SAR DNA-binding protein 2 - garden pea
  misc_feature (43)..(569): Homolog of NCBI NO: 7451353 NR Description: SAR DNA-binding protein-1 - garden pea
  misc_feature (43)..(569): Homolog of NCBI NO: 13623892 NR Description: MAR-binding protein [Nicotiana tabacum]
  misc_feature (43)..(521): Homolog of NCBI NO: 3288883 NR Description: SAR DNA binding protein [Oryza sativa]
SFFSPPRAAPPLLSSPPPSPPPPPPAPPPPPLVLLYTGAEEEMLVLFETPAGFALFKVLDEGKLSSVEDLWKDFASSDKARKVVELKAFNKFENTSDALSAATLLIDSKPSKGLRKFLQKHCDGETLAVADSKLGNAIKEKLQIDCLHNSAVMELMRGLRNQLTELMSGLAEHDLGPMSLGLSHSLSRYKLKFSPEKVDTMIIQAIGLLDDLDKELNTYAMRVREWYGWHFPELTKIVADNIHYAKAVKMMGNRVNAVNLDFSEILPEEVEAELKEAAVISMGTEVNDLDLSNIRELCDQVLALSEYRAQLYDYLKSRMNTIAPNLTALVGELVGARLISHGGSLMNLAKQPGSTIQILGAEKALFRALKTKHATPKYGLIYHASLIGQAAPKHKGKISRSLAAKSALAIRYDALADGDDNSMGLESRIKLETRLRVLEGKELGRSAGSTKGKPKIEAYEKDRKGGGALITPAKTYNSAADLVLGQTTEETPKKSEVASKKRKHQEEEPTAEAAEEDGEQEKEKSKKKKKKSKDIEETPAAVTDASEKKKKKKSKEAEETPAADADGEKK

SEQ ID NO: 62087 - protein, 528 aa, Triticum aestivum
  peptide (1)..(528): Ceres Seq. ID no. 15169672
  misc_feature (251)..(399): Pfam Name: Putative snoRNA binding domain Pfam Description: Putative snoRNA binding domain
  misc_feature (1)..(519): Homolog of NCBI NO: 39794520 NR Description: Unknown (protein for MGC:75641) [Silurana
  misc_feature (1)..(422): Homolog of NCBI NO: 25083410 NR Description: SAR DNA-binding protein - like [Arabidopsis
  misc_feature (1)..(432): Homolog of NCBI NO: 2811028 NR Description: Hypothetical protein At5g27120
  misc_feature (1)..(527): Homolog of NCBI NO: 15240445 NR Description: SAR DNA-binding protein, putative [Arabidopsis
  misc_feature (1)..(527): Homolog of NCBI NO: 33945887 NR Description: SAR DNA-binding protein-like protein
  misc_feature (1)..(527): Homolog of NCBI NO: 15229884 NR Description: SAR DNA-binding protein, putative [Arabidopsis
  misc_feature (1)..(527): Homolog of NCBI NO: 7451352 NR Description: SAR DNA-binding protein 2 - garden pea
  misc_feature (1)..(527): Homolog of NCBI NO: 7451353 NR Description: SAR DNA-binding protein-1 - garden pea
  misc_feature (1)..(527): Homolog of NCBI NO: 13623892 NR Description: MAR-binding protein [Nicotiana tabacum]
  misc_feature (1)..(479): Homolog of NCBI NO: 3288883 NR Description: SAR DNA binding protein [Oryza sativa]
MLVLFETPAGFALFKVLDEGKLSSVEDLWKDFASSDKARKVVELKAFNKFENTSDALSAATLLIDSKPSKGLRKFLQKHCDGETLAVADSKLGNAIKEKLQIDCLHNSAVMELMRGLRNQLTELMSGLAEHDLGPMSLGLSHSLSRYKLKFSPEKVDTMIIQAIGLLDDLDKELNTYAMRVREWYGWHFPELTKIVADNIHYAKAVKMMGNRVNAVNLDFSEILPEEVEAELKEAAVISMGTEVNDLDLSNIRELCDQVLALSEYRAQLYDYLKSRMNTIAPNLTALVGELVGARLISHGGSLMNLAKQPGSTIQILGAEKALFRALKTKHATPKYGLIYHASLIGQAAPKHKGKISRSLAAKSALAIRYDALADGDDNSMGLESRIKLETRLRVLEGKELGRSAGSTKGKPKIEAYEKDRKGGGALITPAKTYNSAADLVLGQTTEETPKKSEVASKKRKHQEEEPTAEAAEEDGEQEKEKSKKKKKKSKDIEETPAAVTDASEKKKKKKSKEAEETPAADADGEKK

SEQ ID NO: 62088 - protein, 418 aa, Triticum aestivum
  peptide (1)..(418): Ceres Seq. ID no. 15169673
  misc_feature (141)..(289): Pfam Name: Putative snoRNA binding domain Pfam Description: Putative snoRNA binding domain
  misc_feature (1)..(409): Homolog of NCBI NO: 39794520 NR Description: Unknown (protein for MGC:75641) [Silurana
  misc_feature (1)..(312): Homolog of NCBI NO: 25083410 NR Description: SAR DNA-binding protein - like [Arabidopsis
  misc_feature (1)..(322): Homolog of NCBI NO: 2811028 NR Description: Hypothetical protein At5g27120
  misc_feature (1)..(417): Homolog of NCBI NO: 15240445 NR Description: SAR DNA-binding protein, putative [Arabidopsis
  misc_feature (1)..(417): Homolog of NCBI NO: 33945887 NR Description: SAR DNA-binding protein-like protein
  misc_feature (1)..(417): Homolog of NCBI NO: 15229884 NR Description: SAR DNA-binding protein, putative [Arabidopsis
  misc_feature (1)..(417): Homolog of NCBI NO: 7451352 NR Description: SAR DNA-binding protein 2 - garden pea
  misc_feature (1)..(417): Homolog of NCBI NO: 7451353 NR Description: SAR DNA-binding protein-1 - garden pea
  misc_feature (1)..(417): Homolog of NCBI NO: 13623892 NR Description: MAR-binding protein [Nicotiana tabacum]
  misc_feature (1)..(369): Homolog of NCBI NO: 3288883 NR Description: SAR DNA binding protein [Oryza sativa]
MELMRGLRNQLTELMSGLAEHDLGPMSLGLSHSLSRYKLKFSPEKVDTMIIQAIGLLDDLDKELNTYAMRVREWYGWHFPELTKIVADNIHYAKAVKMMGNRVNAVNLDFSEILPEEVEAELKEAAVISMGTEVNDLDLSNIRELCDQVLALSEYRAQLYDYLKSRMNTIAPNLTALVGELVGARLISHGGSLMNLAKQPGSTIQILGAEKALFRALKTKHATPKYGLIYHASLIGQAAPKHKGKISRSLAAKSALAIRYDALADGDDNSMGLESRIKLETRLRVLEGKELGRSAGSTKGKPKIEAYEKDRKGGGALITPAKTYNSAADLVLGQTTEETPKKSEVASKKRKHQEEEPTAEAAEEDGEQEKEKSKKKKKKSKDIEETPAAVTDASEKKKKKKSKEAEETPAADADGEKK

SEQ ID NO: 62089 - DNA, 1470 bp, Triticum aestivum
  misc_feature (1)..(1470): Ceres Seq. ID no. 12613795
agcggcgttccagtgtgtgtgtgtcacccacgacacgacgcctcccctaaacctccgcgtcgccattcccccctccagcccgccgcgatggccggaggcggcggcaagccgttcggggacaacgtgttcgccggccacgcggccgccggcgccgcggcgatcagcgcctccgcggtcgccgtccaccccctcgacaccgtcaagagcctcctccagttgagcgcggcggggcagaagcagaagatggagatccgccatgcggtggaccggctcatgcacgtctccggccctgcaggtctttacagtggcattggatggtcaatattaggtaaactgcctggtttgggagcgcgttttgggacctatgagcttttaacagccttctataaagatggcagggaggacaaccatgttaattattctgaggcaatgttggctggcataactgctggtgctgtagaggcatttgtgtgcacaccatttgaacttctcaaacttcggtcccaagttggttctgccatacctatgaaagctacgaaccctgctaatgttgtacaggagtcgtttccactgctttccaagctattacctggtcatgtccctgacatgagagtatggaatggcagtgtcagtctgttgtccaatctttccccaaagcatcctgacatgatgggtgccctgaaacagcacccatggatgctgactggctctgggaagcccccgttaccctctgatgttcaggtgccttcgagagtgatagcacttgaaggatggggtgctttatggagaggacttaggccaggggtagcccgagactgtgtctttagtggaatgttcttttcttgttggcaattcatacatacagcgatgcttacttggtagtctgttaacatgaaccctgaacccaggaatttagaagaagcaggtcctgtaccccctttagcttctagtcttgctgcaggcttctctggagttgtagcagctgctgcttcacatacttttgatactgccaaaagtcgttcacagtgcactgtgatacctaagtatatagcaatggagaggaggtttcttaaatggagagcaccaggaatgtggatagagagagtgacgggaacatcacctgctgataggaatgttctatttcgtggcattggactacggatggcgcgcagtggaatcgcatcttttgtacttgttgggtcctactatttagccgtagatcagctcttgtagatggcagtcagagaaatcattaatgaaattcaaacacctaaactatgtggtacctttttcgtctgaacaaccagagaagaggtaactatgtggtaactttttcgtctcttccagtcttaattggagttgagtgctccaggatagaattttggttactaatgtaaatgtttataacaaacagaattgaaggttcgcctttggttttgttgcttgtgttgaagagatattaagtgtttt

SEQ ID NO: 62090 - protein, 293 aa, Triticum aestivum
  peptide (1)..(293): Ceres Seq. ID no. 12613796
  misc_feature (37)..(169): Homolog of NCBI NO: 40746736 NR Description: hypothetical protein AN1299.2 [Aspergillus
  misc_feature (49)..(177): Homolog of NCBI NO: 3378495 NR Description: Mitochondrial carrier protein [Ribes nigrum]
  misc_feature (43)..(85): Homolog of NCBI NO: 7485091 NR Description: hypothetical protein - Arabidopsis thaliana
  misc_feature (91)..(140): Homolog of NCBI NO: 7485091 NR Description: hypothetical protein - Arabidopsis thaliana
  misc_feature (131)..(275): Homolog of NCBI NO: 7485091 NR Description: hypothetical protein - Arabidopsis thaliana
  misc_feature (43)..(85): Homolog of NCBI NO: 25343854 NR Description: hypothetical protein dl3547c [imported] -
  misc_feature (91)..(140): Homolog of NCBI NO: 25343854 NR Description: hypothetical protein dl3547c [imported] -
  misc_feature (131)..(293): Homolog of NCBI NO: 25343854 NR Description: hypothetical protein dl3547c [imported] -
  misc_feature (43)..(293): Homolog of NCBI NO: 18414359 NR Description: mitochondrial carrier protein family
  misc_feature (35)..(293): Homolog of NCBI NO: 38344448 NR Description: OSJNBa0038O10.20 [Oryza sativa (japonica
SGVPVCVCHPRHDASPKPPRRHSPLQPAAMAGGGGKPFGDNVFAGHAAAGAAAISASAVAVHPLDTVKSLLQLSAAGQKQKMEIRHAVDRLMHVSGPAGLYSGIGWSILGKLPGLGARFGTYELLTAFYKDGREDNHVNYSEAMLAGITAGAVEAFVCTPFELLKLRSQVGSAIPMKATNPANVVQESFPLLSKLLPGHVPDMRVWNGSVSLLSNLSPKHPDMMGALKQHPWMLTGSGKPPLPSDVQVPSRVIALEGWGALWRGLRPGVARDCVFSGMFFSCWQFIHTAMLTW

SEQ ID NO: 62091 - protein, 264 aa, Triticum aestivum
  peptide (1)..(264): Ceres Seq. ID no. 12613797
  misc_feature (8)..(140): Homolog of NCBI NO: 40746736 NR Description: hypothetical protein AN1299.2 [Aspergillus
  misc_feature (20)..(148): Homolog of NCBI NO: 3378495 NR Description: Mitochondrial carrier protein [Ribes nigrum]
  misc_feature (14)..(56): Homolog of NCBI NO: 7485091 NR Description: hypothetical protein - Arabidopsis thaliana
  misc_feature (62)..(111): Homolog of NCBI NO: 7485091 NR Description: hypothetical protein - Arabidopsis thaliana
  misc_feature (102)..(246): Homolog of NCBI NO: 7485091 NR Description: hypothetical protein - Arabidopsis thaliana
  misc_feature (14)..(56): Homolog of NCBI NO: 25343854 NR Description: hypothetical protein dl3547c [imported] -
  misc_feature (62)..(111): Homolog of NCBI NO: 25343854 NR Description: hypothetical protein dl3547c [imported] -
  misc_feature (102)..(264): Homolog of NCBI NO: 25343854 NR Description: hypothetical protein dl3547c [imported] -
  misc_feature (14)..(264): Homolog of NCBI NO: 18414359 NR Description: mitochondrial carrier protein family
  misc_feature (6)..(264): Homolog of NCBI NO: 38344448 NR Description: OSJNBa0038O10.20 [Oryza sativa (japonica
MAGGGGKPFGDNVFAGHAAAGAAAISASAVAVHPLDTVKSLLQLSAAGQKQKMEIRHAVDRLMHVSGPAGLYSGIGWSILGKLPGLGARFGTYELLTAFYKDGREDNHVNYSEAMLAGITAGAVEAFVCTPFELLKLRSQVGSAIPMKATNPANVVQESFPLLSKLLPGHVPDMRVWNGSVSLLSNLSPKHPDMMGALKQHPWMLTGSGKPPLPSDVQVPSRVIALEGWGALWRGLRPGVARDCVFSGMFFSCWQFIHTAMLTW

SEQ ID NO: 62092 - protein, 212 aa, Triticum aestivum
  peptide (1)..(212): Ceres Seq. ID no. 12613798
  misc_feature (1)..(137): Homolog of NCBI NO: 28193150 NR Description: unnamed protein product [Homo sapiens]
  misc_feature (1)..(103): Homolog of NCBI NO: 21358457 NR Description: CG1907-PA [Drosophila melanogaster]
  misc_feature (1)..(88): Homolog of NCBI NO: 40746736 NR Description: hypothetical protein AN1299.2 [Aspergillus
  misc_feature (1)..(96): Homolog of NCBI NO: 3378495 NR Description: Mitochondrial carrier protein [Ribes nigrum]
  misc_feature (10)..(59): Homolog of NCBI NO: 7485091 NR Description: hypothetical protein - Arabidopsis thaliana
  misc_feature (50)..(194): Homolog of NCBI NO: 7485091 NR Description: hypothetical protein - Arabidopsis thaliana
  misc_feature (10)..(59): Homolog of NCBI NO: 25343854 NR Description: hypothetical protein dl3547c [imported] -
  misc_feature (50)..(212): Homolog of NCBI NO: 25343854 NR Description: hypothetical protein dl3547c [imported] -
  misc_feature (1)..(212): Homolog of NCBI NO: 18414359 NR Description: mitochondrial carrier protein family
  misc_feature (1)..(212): Homolog of NCBI NO: 38344448 NR Description: OSJNBa0038O10.20 [Oryza sativa (japonica
MEIRHAVDRLMHVSGPAGLYSGIGWSILGKLPGLGARFGTYELLTAFYKDGREDNHVNYSEAMLAGITAGAVEAFVCTPFELLKLRSQVGSAIPMKATNPANVVQESFPLLSKLLPGHVPDMRVWNGSVSLLSNLSPKHPDMMGALKQHPWMLTGSGKPPLPSDVQVPSRVIALEGWGALWRGLRPGVARDCVFSGMFFSCWQFIHTAMLTW

SEQ ID NO: 62093 - DNA, 1597 bp, Triticum aestivum
  misc_feature (1)..(1597): Ceres Seq. ID no. 14302251
acgcaagtgcaccgaacgacggtcgtcgtggcctgttcgggctcgcaaatccccacacgccactcctcctcgtccccgtagaaaaggacacgcgtagccttcgtccacggctccacgaggcagaggcagcagccgcggcactcgagcaagcaagcttttgtactctgctccagtcatccgtcgtctccctttccgccgagatgcagcgccggctcccggcgctcctccgccgcgcagcgggcgcggggcccgcgcgccggtggctctccgcctcgtcctccctcctcttcgacgacacccaggagcagttcaaggagagcgtgcaccggttcgcgcaggagcacatcgcgccgcacgccgccgccatcgacgcctccaaccacttccccaaggagaagaatctgtggaagctcatgggggacttcaacctgcacggcctcacctcgccagaggagtacggagggctcgggctcggttacatgtaccactgcatcgccatggaggagatcagcagggcgtccgggtcggtcggcctttcctacggtgcacactcaaatctctgcatcaaccagctggtccgtcatggcagccctgcccaaaaggaaaagtatttgccgaagcttatcagtggggagcatattggggcattggcgatgagtgaaccaaactctggctctgatgttgtcagtatgaagtgcaaagctgagaaagtagatggcggctatgtcattaacgggaacaagatgtggtgcacaaatggtccgtctgctcagacattggttgtttacgcgaaaacagatataactgctggatcgaaaggaataactgcattcataattgagaagggaatgcccgggttcagtactgcccagaagttggacaaacttggcatgcgaggaagtgacacatgtgagcttgtctttgagaactgctttgtgcctcaagagaatgttcttggtgaagaagggaaaggtgtttatgtcatgatgtctggtcttgatctggaaagacttgtattagctgggggccctattgggctcatgcaggcatgccttgatgttgttcttccttatgttcgacaaagggagcaatttggccgtccgattggtgaatttcagttcttacaggggaaaatggcagatatgtacacctccttgcaatcatcaagatcatttgtatactcagttgccagggactgtgataatggcaaagttgaccgtaaggattgtgcaggagtgatcctctttgctgctgaaagggcaacacaagttgcacttgaggcaatccagtgtcttggtggcaatggatacataaatgagtacccaactggccgtctcctgagagatgcaaaactgtttgagattggagctggcactagtgagatcagaagaatgataattggtcgtgaactgttcaaagaggactgagattattcttctggaagccagctatcagtgcatattctaacttgaggaggtgagcaggattagaccattagtgaactgtccctgatgttcaatgtttgatgatgttctatccaatccttctcatacttctgtacatgtccaacattcttgcaaataaagttcaatcttct

SEQ ID NO: 62094 - protein, 474 aa, Triticum aestivum
  peptide (1)..(474): Ceres Seq. ID no. 14302252
  misc_feature (322)..(471): Pfam Name: Acyl-CoA dehydrogenase, C-terminal domain Pfam Description: Acyl-CoA dehydrogenase, C-terminal domain
  misc_feature (101)..(473): Homolog of NCBI NO: 23500935 NR Description: isovaleryl-CoA dehydrogenase [Brucella suis 1330]
  misc_feature (88)..(473): Homolog of NCBI NO: 23056088 NR Description: hypothetical protein [Geobacter metallireducens]
  misc_feature (89)..(471): Homolog of NCBI NO: 22963587 NR Description: hypothetical protein [Rhodopseudomonas palustris]
  misc_feature (91)..(472): Homolog of NCBI NO: 25453062 NR Description: Isovaleryl-CoA dehydrogenase 1, mitochondrial
  misc_feature (91)..(473): Homolog of NCBI NO: 25453061 NR Description: Isovaleryl-CoA dehydrogenase 2, mitochondrial
  misc_feature (85)..(474): Homolog of NCBI NO: 25090618 NR Description: Isovaleryl-CoA dehydrogenase, mitochondrial
  misc_feature (85)..(474): Homolog of NCBI NO: 17064982 NR Description: isovaleryl-CoA-dehydrogenase precursor (IVD)
  misc_feature (85)..(474): Homolog of NCBI NO: 15230664 NR Description: isovaleryl-CoA-dehydrogenase precursor (IVD)
  misc_feature (89)..(473): Homolog of NCBI NO: 5869967 NR Description: auxin binding protein (ABP44); isovaleryl-CoA
  misc_feature (89)..(473): Homolog of NCBI NO: 5869965 NR Description: Isovaleryl-CoA Dehydrogenase; auxin binding
ASAPNDGRRGLFGLANPHTPLLLVPVEKDTRSLRPRLHEAEAAAAALEQASFCTLLQSSVVSLSAEMQRRLPALLRRAAGAGPARRWLSASSSLLFDDTQEQFKESVHRFAQEHIAPHAAAIDASNHFPKEKNLWKLMGDFNLHGLTSPEEYGGLGLGYMYHCIAMEEISRASGSVGLSYGAHSNLCINQLVRHGSPAQKEKYLPKLISGEHIGALAMSEPNSGSDVVSMKCKAEKVDGGYVINGNKMWCTNGPSAQTLVVYAKTDITAGSKGITAFIIEKGMPGFSTAQKLDKLGMRGSDTCELVFENCFVPQENVLGEEGKGVYVMMSGLDLERLVLAGGPIGLMQACLDVVLPYVRQREQFGRPIGEFQFLQGKMADMYTSLQSSRSFVYSVARDCDNGKVDRKDCAGVILFAAERATQVALEAIQCLGGNGYINEYPTGRLLRDAKLFEIGAGTSEIRRMIIGRELFKED

SEQ ID NO: 62095 - protein, 408 aa, Triticum aestivum
  peptide (1)..(408): Ceres Seq. ID no. 14302253
  misc_feature (256)..(405): Pfam Name: Acyl-CoA dehydrogenase, C-terminal domain Pfam Description: Acyl-CoA dehydrogenase, C-terminal domain
  misc_feature (35)..(407): Homolog of NCBI NO: 23500935 NR Description: isovaleryl-CoA dehydrogenase [Brucella suis 1330]
  misc_feature (22)..(407): Homolog of NCBI NO: 23056088 NR Description: hypothetical protein [Geobacter metallireducens]
  misc_feature (23)..(405): Homolog of NCBI NO: 22963587 NR Description: hypothetical protein [Rhodopseudomonas palustris]
  misc_feature (25)..(406): Homolog of NCBI NO: 25453062 NR Description: Isovaleryl-CoA dehydrogenase 1, mitochondrial
  misc_feature (25)..(407): Homolog of NCBI NO: 25453061 NR Description: Isovaleryl-CoA dehydrogenase 2, mitochondrial
  misc_feature (19)..(408): Homolog of NCBI NO: 25090618 NR Description: Isovaleryl-CoA dehydrogenase, mitochondrial
  misc_feature (19)..(408): Homolog of NCBI NO: 17064982 NR Description: isovaleryl-CoA-dehydrogenase precursor (IVD)
  misc_feature (19)..(408): Homolog of NCBI NO: 15230664 NR Description: isovaleryl-CoA-dehydrogenase precursor (IVD)
  misc_feature (23)..(407): Homolog of NCBI NO: 5869967 NR Description: auxin binding protein (ABP44); isovaleryl-CoA
  misc_feature (23)..(407): Homolog of NCBI NO: 5869965 NR Description: Isovaleryl-CoA Dehydrogenase; auxin binding
MQRRLPALLRRAAGAGPARRWLSASSSLLFDDTQEQFKESVHRFAQEHIAPHAAAIDASNHFPKEKNLWKLMGDFNLHGLTSPEEYGGLGLGYMYHCIAMEEISRASGSVGLSYGAHSNLCINQLVRHGSPAQKEKYLPKLISGEHIGALAMSEPNSGSDVVSMKCKAEKVDGGYVINGNKMWCTNGPSAQTLVVYAKTDITAGSKGITAFIIEKGMPGFSTAQKLDKLGMRGSDTCELVFENCFVPQENVLGEEGKGVYVMMSGLDLERLVLAGGPIGLMQACLDVVLPYVRQREQFGRPIGEFQFLQGKMADMYTSLQSSRSFVYSVARDCDNGKVDRKDCAGVILFAAERATQVALEAIQCLGGNGYINEYPTGRLLRDAKLFEIGAGTSEIRRMIIGRELFKED

SEQ ID NO: 62096 - protein, 337 aa, Triticum aestivum
  peptide (1)..(337): Ceres Seq. ID no. 14302254
  misc_feature (185)..(334): Pfam Name: Acyl-CoA dehydrogenase, C-terminal domain Pfam Description: Acyl-CoA dehydrogenase, C-terminal domain
  misc_feature (1)..(336): Homolog of NCBI NO: 23500935 NR Description: isovaleryl-CoA dehydrogenase [Brucella suis 1330]
  misc_feature (1)..(336): Homolog of NCBI NO: 23056088 NR Description: hypothetical protein [Geobacter metallireducens]
  misc_feature (1)..(334): Homolog of NCBI NO: 22963587 NR Description: hypothetical protein [Rhodopseudomonas palustris]
  misc_feature (1)..(335): Homolog of NCBI NO: 25453062 NR Description: Isovaleryl-CoA dehydrogenase 1, mitochondrial
  misc_feature (1)..(336): Homolog of NCBI NO: 25453061 NR Description: Isovaleryl-CoA dehydrogenase 2, mitochondrial
  misc_feature (1)..(337): Homolog of NCBI NO: 25090618 NR Description: Isovaleryl-CoA dehydrogenase, mitochondrial
  misc_feature (1)..(337): Homolog of NCBI NO: 17064982 NR Description: isovaleryl-CoA-dehydrogenase precursor (IVD)
  misc_feature (1)..(337): Homolog of NCBI NO: 15230664 NR Description: isovaleryl-CoA-dehydrogenase precursor (IVD)
  misc_feature (1)..(336): Homolog of NCBI NO: 5869967 NR Description: auxin binding protein (ABP44); isovaleryl-CoA
  misc_feature (1)..(336): Homolog of NCBI NO: 5869965 NR Description: Isovaleryl-CoA Dehydrogenase; auxin binding
MGDFNLHGLTSPEEYGGLGLGYMYHCIAMEEISRASGSVGLSYGAHSNLCINQLVRHGSPAQKEKYLPKLISGEHIGALAMSEPNSGSDVVSMKCKAEKVDGGYVINGNKMWCTNGPSAQTLVVYAKTDITAGSKGITAFIIEKGMPGFSTAQKLDKLGMRGSDTCELVFENCFVPQENVLGEEGKGVYVMMSGLDLERLVLAGGPIGLMQACLDVVLPYVRQREQFGRPIGEFQFLQGKMADMYTSLQSSRSFVYSVARDCDNGKVDRKDCAGVILFAAERATQVALEAIQCLGGNGYINEYPTGRLLRDAKLFEIGAGTSEIRRMIIGRELFKED

SEQ ID NO: 62097 - DNA, 1717 bp, Triticum aestivum
  misc_feature (1)..(1717): Ceres Seq. ID no. 13596035
cccaaacccaaacacaggcccatcatctcctggtcccgacctcgcactccccatcccagcatccaactccagctccacctcgccgccgcccccaccatgtacggcgtcggcgtcggcggcggcggaggcgggttcaacgcgccgtccacggcctccgggcggcgcaaaaaccaggaggacgacgacgacgaggaggaggaggagaccggcgacggccgcgtcctcgaggcgtgggagcgcgcctacgccgacgaccgctcgtgggaggcgctgcaggaggacgagtccggcctgctccgccccatcgacaccaagaacctcgtccactcgcagtaccgccgccgcctcctgctccgctccgcggccgccgcggcccgcatccagaagggcctcatccgctacctctacatcgtcatcgacctctccaaggcagcttcagaaatggattatcgccctagtcgaatggctgttgttgctaagtgtgctgaggcattcataagggaattcttcgatcagaatcccttgagccatgttgggttagtgacaattaaagatggcatttctcatcgacttacggagattggagggagtccagagtcacagattaacgcattgatgggcaagcttgagtgttctggtgattcatctctgcagaatgctctagaacttgtcaatggttacttgaaccagattccttcctatggtcacaaggaagtattatttttgtactccgcactgaatacatgtgatcctggtgatatcatggagacaatagaaaaatgcaagaaatccaaagttagatgttcggttattgggcttgctgcagaaattttcatttgcaagcatctctgtgaagagactggtggatcatatacggttgcactagacgagtcccacttcaaggaattgctgcttgaacatgctcctccaccacctgccattgcagagtatgctgcagctaatttgattaagatgggttttccacagaggggagcagaggatcttatctccatctgctcttgtcataagaaaattaaatctggtgctgaaggttacatatgtcccagatgcaaagttaatgtctgtgagcttccgacggagtgccgaacatgtggtctaacacttgttagttctccacatctggcacgatcctatcaccatctcttccctgtagcgccatttgatgaggtgacgttcaaattaggtcaaaagggaggacaaaattgttttggctgccagcagagtctcattaacaccggtggccagtctaatatccatgtctgctgtccaaaatgcaagcaccacttctgcttcgactgtgatatttacatccatgagagcttgcataactgccccggttgcgagagtcagtgcagttcatctcggtagagacgccgccatcatgtgcattgttcaggtgttgatccttttttttgagtcggagctacgcattgttgtaagctttctggtgccctgacgttgatgacagtattgctggacaatcgaacggtgtacagataacacctggcatccttttgttggcacctcttgttagattgtgctagctagttaagctattgatgcagttagaggtggaggtgctgagagtagagcgttgcgttgagaagagacttgaggaatgtacgacgtgaagaatggaaacctggtagctcttgctgttttttctgaagcaagatcaatatatgttattttcttc

SEQ ID NO: 62098 - protein, 462 aa, Triticum aestivum
  peptide (1)..(462): Ceres Seq. ID no. 13596036
  misc_feature (59)..(397): Pfam Name: Ssl1-like Pfam Description: Ssl1-like
  misc_feature (63)..(454): Homolog of NCBI NO: 28278887 NR Description: Similar to general transcription factor IIH,
  misc_feature (63)..(454): Homolog of NCBI NO: 16740713 NR Description: Gtf2h2 protein [Mus musculus]
  misc_feature (63)..(454): Homolog of NCBI NO: 34853502 NR Description: similar to general transcription factor IIH
  misc_feature (63)..(454): Homolog of NCBI NO: 40353046 NR Description: Unknown (protein for MGC:75049) [Homo sapiens]
  misc_feature (63)..(454): Homolog of NCBI NO: 627651 NR Description: transcription factor BTF2 chain p44 - human
  misc_feature (63)..(454): Homolog of NCBI NO: 6681762 NR Description: general transcription factor IIH, polypeptide 2,
  misc_feature (78)..(461): Homolog of NCBI NO: 3327882 NR Description: SSL1 [Schizosaccharomyces pombe]
  misc_feature (55)..(461): Homolog of NCBI NO: 19075300 NR Description: tfiih subunit p47 [Schizosaccharomyces pombe]
  misc_feature (49)..(461): Homolog of NCBI NO: 28828471 NR Description: similar to Homo sapiens (Human). TFIIH basal factor complex p44 subunit (Basic transcription factor 2 44 kDa
  misc_feature (52)..(456): Homolog of NCBI NO: 30679101 NR Description: basic transcripion factor 2, 44kD subunit
PKPKHRPIISWSRPRTPHPSIQLQLHLAAAPTMYGVGVGGGGGGFNAPSTASGRRKNQEDDDDEEEEETGDGRVLEAWERAYADDRSWEALQEDESGLLRPIDTKNLVHSQYRRRLLLRSAAAAARIQKGLIRYLYIVIDLSKAASEMDYRPSRMAVVAKCAEAFIREFFDQNPLSHVGLVTIKDGISHRLTEIGGSPESQINALMGKLECSGDSSLQNALELVNGYLNQIPSYGHKEVLFLYSALNTCDPGDIMETIEKCKKSKVRCSVIGLAAEIFICKHLCEETGGSYTVALDESHFKELLLEHAPPPPAIAEYAAANLIKMGFPQRGAEDLISICSCHKKIKSGAEGYICPRCKVNVCELPTECRTCGLTLVSSPHLARSYHHLFPVAPFDEVTFKLGQKGGQNCFGCQQSLINTGGQSNIHVCCPKCKHHFCFDCDIYIHESLHNCPGCESQCSSSR

SEQ ID NO: 62099 - protein, 430 aa, Triticum aestivum
  peptide (1)..(430): Ceres Seq. ID no. 13596037
  misc_feature (27)..(365): Pfam Name: Ssl1-like Pfam Description: Ssl1-like
  misc_feature (31)..(422): Homolog of NCBI NO: 28278887 NR Description: Similar to general transcription factor IIH,
  misc_feature (31)..(422): Homolog of NCBI NO: 16740713 NR Description: Gtf2h2 protein [Mus musculus]
  misc_feature (31)..(422): Homolog of NCBI NO: 34853502 NR Description: similar to general transcription factor IIH
  misc_feature (31)..(422): Homolog of NCBI NO: 40353046 NR Description: Unknown (protein for MGC:75049) [Homo sapiens]
  misc_feature (31)..(422): Homolog of NCBI NO: 627651 NR Description: transcription factor BTF2 chain p44 - human
  misc_feature (31)..(422): Homolog of NCBI NO: 6681762 NR Description: general transcription factor IIH, polypeptide 2,
  misc_feature (46)..(429): Homolog of NCBI NO: 3327882 NR Description: SSL1 [Schizosaccharomyces pombe]
  misc_feature (23)..(429): Homolog of NCBI NO: 19075300 NR Description: tfiih subunit p47 [Schizosaccharomyces pombe]
  misc_feature (17)..(429): Homolog of NCBI NO: 28828471 NR Description: similar to Homo sapiens (Human). TFIIH basal factor complex p44 subunit (Basic transcription factor 2 44 kDa
  misc_feature (20)..(424): Homolog of NCBI NO: 30679101 NR Description: basic transcripion factor 2, 44kD subunit
MYGVGVGGGGGGFNAPSTASGRRKNQEDDDDEEEEETGDGRVLEAWERAYADDRSWEALQEDESGLLRPIDTKNLVHSQYRRRLLLRSAAAAARIQKGLIRYLYIVIDLSKAASEMDYRPSRMAVVAKCAEAFIREFFDQNPLSHVGLVTIKDGISHRLTEIGGSPESQINALMGKLECSGDSSLQNALELVNGYLNQIPSYGHKEVLFLYSALNTCDPGDIMETIEKCKKSKVRCSVIGLAAEIFICKHLCEETGGSYTVALDESHFKELLLEHAPPPPAIAEYAAANLIKMGFPQRGAEDLISICSCHKKIKSGAEGYICPRCKVNVCELPTECRTCGLTLVSSPHLARSYHHLFPVAPFDEVTFKLGQKGGQNCFGCQQSLINTGGQSNIHVCCPKCKHHFCFDCDIYIHESLHNCPGCESQCSSSR

SEQ ID NO: 62100 - protein, 315 aa, Triticum aestivum
  peptide (1)..(315): Ceres Seq. ID no. 13596038
  misc_feature (1)..(250): Pfam Name: Ssl1-like Pfam Description: Ssl1-like
  misc_feature (1)..(307): Homolog of NCBI NO: 28278887 NR Description: Similar to general transcription factor IIH,
  misc_feature (1)..(307): Homolog of NCBI NO: 16740713 NR Description: Gtf2h2 protein [Mus musculus]
  misc_feature (1)..(307): Homolog of NCBI NO: 34853502 NR Description: similar to general transcription factor IIH
  misc_feature (1)..(307): Homolog of NCBI NO: 40353046 NR Description: Unknown (protein for MGC:75049) [Homo sapiens]
  misc_feature (1)..(307): Homolog of NCBI NO: 627651 NR Description: transcription factor BTF2 chain p44 - human
  misc_feature (1)..(307): Homolog of NCBI NO: 6681762 NR Description: general transcription factor IIH, polypeptide 2,
  misc_feature (1)..(314): Homolog of NCBI NO: 3327882 NR Description: SSL1 [Schizosaccharomyces pombe]
  misc_feature (1)..(314): Homolog of NCBI NO: 19075300 NR Description: tfiih subunit p47 [Schizosaccharomyces pombe]
  misc_feature (1)..(314): Homolog of NCBI NO: 28828471 NR Description: similar to Homo sapiens (Human). TFIIH basal factor complex p44 subunit (Basic transcription factor 2 44 kDa
  misc_feature (1)..(309): Homolog of NCBI NO: 30679101 NR Description: basic transcripion factor 2, 44kD subunit
MDYRPSRMAVVAKCAEAFIREFFDQNPLSHVGLVTIKDGISHRLTEIGGSPESQINALMGKLECSGDSSLQNALELVNGYLNQIPSYGHKEVLFLYSALNTCDPGDIMETIEKCKKSKVRCSVIGLAAEIFICKHLCEETGGSYTVALDESHFKELLLEHAPPPPAIAEYAAANLIKMGFPQRGAEDLISICSCHKKIKSGAEGYICPRCKVNVCELPTECRTCGLTLVSSPHLARSYHHLFPVAPFDEVTFKLGQKGGQNCFGCQQSLINTGGQSNIHVCCPKCKHHFCFDCDIYIHESLHNCPGCESQCSSSR

SEQ ID NO: 62101 - DNA, 1489 bp, Triticum aestivum
  misc_feature (1)..(1489): Ceres Seq. ID no. 13595870
atctccatcaactccttccccaagccgcaacctgccgcaaatctccgcctcccctccccttccgacccgcccaggccgcagcagagcgccatgtcgtcctcccctacccccgcgccagacgccggcgccgccgcgatggccgtcgacgactcgtcggagaccgaccagctcgactccatgtccacggaggacatcgtccgggccacccgcctcctcgacaacgaggtccgcgtcctcaaggacgagctgcagcggaacaacctggagctcgagaacgtcaaggacaagatcaaggagaaccaggagaagataaagctcaacaagcagctgccctacctcgtcggcaacatcgtcgagattttggaaatgaaccctgaagatgaggctgaagaggatggtgctaatatagatctggactcacagaggaaaggaaaatgtgttgttcttaagacatccacaagacagactatattccttcctgtgatcgggctagttgaccctgacaacctcaagcctggtgatttggttggagtcaacaaggacagctacttgatattagacacgctaccttcggagtatgactctcgagtaaaggcaatggaggtagatgaaaagcctacggaggattataatgacattggcggccttgagaaagagattcaggaactcgttgaagctatagtgttgccaatgacacacaaggagcaatttcagaagttgggaatccgtcccccgaaaggagttcttttatatggaccacctgggacgggaaagacgttgatggctcgtgcatgtgctgcacaaaccaatgcaacctttctgaaacttgctggtccgcagctagtccagatgttcatcggtgatggggcaaagcttgtccgagatgcctttgagttggcaaaggagaaggccccctgcatcatttttattgatgagattgatgcaattggaacaaagcgttttgacagtgaagtgagtggtgacagagaagtgcaacgaactatgttggagttgctgaatcagctagatggatttagcagtgatgagaggataaaggtgatagctgcaaccaatcgtgcagatattctcgatcctgctttactccgttctggtcgcctggacagaaagattgagttccctcatccgacggaagaagcaagagctcggattttgcaaattcactcaagaaagatgaacgtacatcctgatgtcaactttgaggagctggctcgttcaactgatgatttcaacggtgcacaactgaaggctgtttgtgtggaagctggcatgcttgctctacgcagggacgctacagaggtgatccatgaagatttcaacgaaggcattatccaagtgcaagcaaagaagaagtccagcttgaattattacgcttagtttcccttgagtaatcagaacgcttggtcctgtgatggccgctgtttgtaacactcggctaccatttttatttggagtatagtttaagtctcgg

SEQ ID NO: 62102 - protein, 464 aa, Triticum aestivum
  peptide (1)..(464): Ceres Seq. ID no. 15221675
  misc_feature (247)..(434): Pfam Name: ATPase family associated with various cellular Pfam Description: ATPase family associated with various cellular
  misc_feature (46)..(464): Homolog of NCBI NO: 3024431 NR Description: 26S protease regulatory subunit 6A homolog
  misc_feature (43)..(464): Homolog of NCBI NO: 15217431 NR Description: 26S protease regulatory subunit 6A [Arabidopsis
  misc_feature (43)..(464): Homolog of NCBI NO: 5669047 NR Description: 19S proteasome regulatory complex subunit S6A
  misc_feature (43)..(464): Homolog of NCBI NO: 23197864 NR Description: 26S proteasome AAA-ATPase subunit RPT5a
  misc_feature (43)..(464): Homolog of NCBI NO: 1729860 NR Description: 26S PROTEASE REGULATORY SUBUNIT 6A HOMOLOG
  misc_feature (43)..(464): Homolog of NCBI NO: 15230005 NR Description: 26S proteasome AAA-ATPase subunit RPT5a
  misc_feature (43)..(464): Homolog of NCBI NO: 3024434 NR Description: 26S PROTEASE REGULATORY SUBUNIT 6A HOMOLOG
  misc_feature (43)..(464): Homolog of NCBI NO: 12697589 NR Description: Tat binding protein like protein [Brassica rapa]
  misc_feature (33)..(464): Homolog of NCBI NO: 1174613 NR Description: 26S PROTEASE REGULATORY SUBUNIT 6A HOMOLOG
  misc_feature (33)..(464): Homolog of NCBI NO: 17297989 NR Description: 26S proteasome regulatory particle triple-A
ISINSFPKPQPAANLRLPSPSDPPRPQQSAMSSSPTPAPDAGAAAMAVDDSSETDQLDSMSTEDIVRATRLLDNEVRVLKDELQRNNLELENVKDKIKENQEKIKLNKQLPYLVGNIVEILEMNPEDEAEEDGANIDLDSQRKGKCVVLKTSTRQTIFLPVIGLVDPDNLKPGDLVGVNKDSYLILDTLPSEYDSRVKAMEVDEKPTEDYNDIGGLEKEIQELVEAIVLPMTHKEQFQKLGIRPPKGVLLYGPPGTGKTLMARACAAQTNATFLKLAGPQLVQMFIGDGAKLVRDAFELAKEKAPCIIFIDEIDAIGTKRFDSEVSGDREVQRTMLELLNQLDGFSSDERIKVIAATNRADILDPALLRSGRLDRKIEFPHPTEEARARILQIHSRKMNVHPDVNFEELARSTDDFNGAQLKAVCVEAGMLALRRDATEVIHEDFNEGIIQVQAKKKSSLNYYA

SEQ ID NO: 62103 - protein, 434 aa, Triticum aestivum
  peptide (1)..(434): Ceres Seq. ID no. 15221676
  misc_feature (217)..(404): Pfam Name: ATPase family associated with various cellular Pfam Description: ATPase family associated with various cellular
  misc_feature (16)..(434): Homolog of NCBI NO: 3024431 NR Description: 26S protease regulatory subunit 6A homolog
  misc_feature (13)..(434): Homolog of NCBI NO: 15217431 NR Description: 26S protease regulatory subunit 6A [Arabidopsis
  misc_feature (13)..(434): Homolog of NCBI NO: 5669047 NR Description: 19S proteasome regulatory complex subunit S6A
  misc_feature (13)..(434): Homolog of NCBI NO: 23197864 NR Description: 26S proteasome AAA-ATPase subunit RPT5a
  misc_feature (13)..(434): Homolog of NCBI NO: 1729860 NR Description: 26S PROTEASE REGULATORY SUBUNIT 6A HOMOLOG
  misc_feature (13)..(434): Homolog of NCBI NO: 15230005 NR Description: 26S proteasome AAA-ATPase subunit RPT5a
  misc_feature (13)..(434): Homolog of NCBI NO: 3024434 NR Description: 26S PROTEASE REGULATORY SUBUNIT 6A HOMOLOG
  misc_feature (13)..(434): Homolog of NCBI NO: 12697589 NR Description: Tat binding protein like protein [Brassica rapa]
  misc_feature (3)..(434): Homolog of NCBI NO: 1174613 NR Description: 26S PROTEASE REGULATORY SUBUNIT 6A HOMOLOG
  misc_feature (3)..(434): Homolog of NCBI NO: 17297989 NR Description: 26S proteasome regulatory particle triple-A
MSSSPTPAPDAGAAAMAVDDSSETDQLDSMSTEDIVRATRLLDNEVRVLKDELQRNNLELENVKDKIKENQEKIKLNKQLPYLVGNIVEILEMNPEDEAEEDGANIDLDSQRKGKCVVLKTSTRQTIFLPVIGLVDPDNLKPGDLVGVNKDSYLILDTLPSEYDSRVKAMEVDEKPTEDYNDIGGLEKEIQELVEAIVLPMTHKEQFQKLGIRPPKGVLLYGPPGTGKTLMARACAAQTNATFLKLAGPQLVQMFIGDGAKLVRDAFELAKEKAPCIIFIDEIDAIGTKRFDSEVSGDREVQRTMLELLNQLDGFSSDERIKVIAATNRADILDPALLRSGRLDRKIEFPHPTEEARARILQIHSRKMNVHPDVNFEELARSTDDFNGAQLKAVCVEAGMLALRRDATEVIHEDFNEGIIQVQAKKKSSLNYYA

SEQ ID NO: 62104 - protein, 419 aa, Triticum aestivum
  peptide (1)..(419): Ceres Seq. ID no. 15221677
  misc_feature (202)..(389): Pfam Name: ATPase family associated with various cellular Pfam Description: ATPase family associated with various cellular
  misc_feature (1)..(419): Homolog of NCBI NO: 3024431 NR Description: 26S protease regulatory subunit 6A homolog
  misc_feature (1)..(419): Homolog of NCBI NO: 15217431 NR Description: 26S protease regulatory subunit 6A [Arabidopsis
  misc_feature (1)..(419): Homolog of NCBI NO: 5669047 NR Description: 19S proteasome regulatory complex subunit S6A
  misc_feature (1)..(419): Homolog of NCBI NO: 23197864 NR Description: 26S proteasome AAA-ATPase subunit RPT5a
  misc_feature (1)..(419): Homolog of NCBI NO: 1729860 NR Description: 26S PROTEASE REGULATORY SUBUNIT 6A HOMOLOG
  misc_feature (1)..(419): Homolog of NCBI NO: 15230005 NR Description: 26S proteasome AAA-ATPase subunit RPT5a
  misc_feature (1)..(419): Homolog of NCBI NO: 3024434 NR Description: 26S PROTEASE REGULATORY SUBUNIT 6A HOMOLOG
  misc_feature (1)..(419): Homolog of NCBI NO: 12697589 NR Description: Tat binding protein like protein [Brassica rapa]
  misc_feature (1)..(419): Homolog of NCBI NO: 1174613 NR Description: 26S PROTEASE REGULATORY SUBUNIT 6A HOMOLOG
  misc_feature (1)..(419): Homolog of NCBI NO: 17297989 NR Description: 26S proteasome regulatory particle triple-A
MAVDDSSETDQLDSMSTEDIVRATRLLDNEVRVLKDELQRNNLELENVKDKIKENQEKIKLNKQLPYLVGNIVEILEMNPEDEAEEDGANIDLDSQRKGKCVVLKTSTRQTIFLPVIGLVDPDNLKPGDLVGVNKDSYLILDTLPSEYDSRVKAMEVDEKPTEDYNDIGGLEKEIQELVEAIVLPMTHKEQFQKLGIRPPKGVLLYGPPGTGKTLMARACAAQTNATFLKLAGPQLVQMFIGDGAKLVRDAFELAKEKAPCIIFIDEIDAIGTKRFDSEVSGDREVQRTMLELLNQLDGFSSDERIKVIAATNRADILDPALLRSGRLDRKIEFPHPTEEARARILQIHSRKMNVHPDVNFEELARSTDDFNGAQLKAVCVEAGMLALRRDATEVIHEDFNEGIIQVQAKKKSSLNYYA

SEQ ID NO: 62105 - DNA, 640 bp, Triticum aestivum
  misc_feature (1)..(640): Ceres Seq. ID no. 12584637
aaaattacccgaccaattcggccattcccacttgccctaagaacaaggcgaaaaagtagcgcaccacaccaatggcgactcctggggatggcgaggacgcgccgccgccgccgccggtgagcgcggcgggggctggaggcagcttgatcgcgaagctgcgggagcaatggaggagcacgaaagagcacgcggagacgtacccgtacgtgtggggctcctacatcctcgtctacggcgggctcggcgcgtacatcacctggcgatggtgcaagctccgccgcaccgaggaccgcgtccgcgccctccaggcccgcctccgccagctcgccgccgccgaggagtcgcagggcgcttccgctgctaccccacctcctcccctgcagcagcccccgccgccgacgacgactgggccgggcaagcccccctccccgccgtgaagagtaaggccccttaggcaacttcttgacatgaaatgttacagaacaatccctgcatcgttcgagatcgaggcattccttgcctctgtttactctatgatcctggacctaaagaaacggtgggatctcgccccccaaaaagttggaaggtcaattctgtgtccatactggagatcattctggagaaggtttaaattgttgtg

SEQ ID NO: 62106 - protein, 121 aa, Triticum aestivum
  peptide (1)..(121): Ceres Seq. ID no. 12584638
  misc_feature (1)..(98): Homolog of NCBI NO: 18415932 NR Description: expressed protein
  misc_feature (2)..(121): Homolog of NCBI NO: 34908496 NR Description: P0489B03.24 [Oryza sativa (japonica
MATPGDGEDAPPPPPVSAAGAGGSLIAKLREQWRSTKEHAETYPYVWGSYILVYGGLGAYITWRWCKLRRTEDRVRALQARLRQLAAAEESQGASAATPPPPLQQPPPPTTTGPGKPPSPP

SEQ ID NO: 62107 - protein, 95 aa, Triticum aestivum
  peptide (1)..(95): Ceres Seq. ID no. 12584639
MEEHERARGDVPVRVGLLHPRLRRARRVHHLAMVQAPPHRGPRPRPPGPPPPARRRRGVAGRFRCYPTSSPAAAPAADDDWAGQAPLPAVKSKAP

SEQ ID NO: 62108 - protein, 63 aa, Triticum aestivum
  peptide (1)..(63): Ceres Seq. ID no. 12584640
MVQAPPHRGPRPRPPGPPPPARRRRGVAGRFRCYPTSSPAAAPAADDDWAGQAPLPAVKSKAP

SEQ ID NO: 62109 - DNA, 2092 bp, Triticum aestivum
  misc_feature (1)..(2092): Ceres Seq. ID no. 13590645
ctctctccacaccacaagccgccgccaccgcccgctgggaggggaatagaaatcgtgtgtatcgtagggttgcgcgaatcgccgtctccagcaaccaatccccaaccctcgagctatctaactatcccgatcccgatctcctaccatggtgtccgatgccagcaagaagaaagccgcgcagaagaaggccgccgccgccgcaaagaggggagccaagtccagcgccgctgcctcgtcctcgtcggcgtcgtcagcggccgataaggccgccaatggcatagcggcccttaacttatccgatcggacatgtaccggggtcctggcttcgcatccgctctcccgtgatatccacattgagtccctttcattaacatttcatggacatgaccttattgtggattcagaattggagcttaactacgggaggcggtatggtttgctcggcttaaatggttgtgggaaatctacccttctcaccgcaataggctgcagggaactccccattcctgaacacatggacatacatcatcttactcgtgagattgaggcttctgacatgtctgcgctgcaagctgttatctgttgtgatgaagaaagagtgaagttggaaaaggaagctgaaattttggctgcacaggatgatggtggcggtgaagctttggatcttgtatatgagcggttagaagcaatggatgcatcaactgctgaaaagcgtgctgctgagatattgtttggtctaggttttgacaagcaaatgcaagcaaagccaacacgagatttttctgggggttggcgtatgaggattgcattggcaagggcgctgttcatgaacccgaccatccttttgcttgatgagccaaccaaccatcttgatctcgaggcttgtgtctggctggaagagaaattaaagaattttgagcgtatacttgttgttatctcgcattcccaagattttctaaatggagtgtgcactaacatcatccacatgcagaacaagaccctcaagttatatactggaaattatgaccagtatgttcaaactcgctctgagcttgaagagaatcaaatgaagcagtacaaatgggaacaggaacagatagctaatatgaaggagtacattgcacgatttggtcatggatctgcgaagcttgctcgtcaggctcagagcaaagagaagactcttgcaaagatggagcgtggtggtcttgctgagaaggttgtcaatgacaggattcttgtattccgctttacagatgttggcaaactcccaccaccagtgctgcagtttgctgatgtcacatttggttacactccggataatctcatctacaagaaccttgacttcggtgttgaccttgactcgagagttgcactggtcggtcccaatggggctggtaagagcacacttctgaagctcatgacaggtgacctatctccgttggatggcatggtcagacgccacaaccacctacgcattgcacaattccatcaacatctcactgagaagctggacctggacatgccggccctgcagtacatgatgagggagtaccctgggaatgaagaggagaagatgagagctgcaattggcaagtttggcctgtcaggaaaggcacaggtgatgccaatgaaaaacctgtctgatgggcagaaggcccgtgtcatttttgcttggctagcatttaggcagccacagatgctgttgcttgatgagccgacaaatcatcttgacattgagaccattgactcacttgctgaggcactgaaggaatgggacggggggttggtcctggtgagccatgacttcaggctgatcaatcaggttgctcaagagatctgggtctgtgagaaccaggcggtgactaggtgggaaggcgatatcatggatttcaagcaacacttgaagaaaagggctggtctctagattttctgtcttttcattctctcggctctttggagatctagacaaccccaaagttttgcctgtatcagaaaagtttccatcatttagcgtgacaagtatgagtactattgtatcgcttaaaacatatcttctctacactattttaccagacgatccgtgtttaattcc

SEQ ID NO: 62110 - protein, 592 aa, Triticum aestivum
  peptide (1)..(592): Ceres Seq. ID no. 15220989
  misc_feature (93)..(284): Pfam Name: ABC transporter Pfam Description: ABC transporter
  misc_feature (53)..(589): Homolog of NCBI NO: 23956078 NR Description: ATP-binding cassette, sub-family F (GCN20),
  misc_feature (53)..(589): Homolog of NCBI NO: 27707592 NR Description: similar to ATP-binding cassette, sub-family F,
  misc_feature (5)..(589): Homolog of NCBI NO: 27881506 NR Description: ATP-binding cassette, sub-family F, member 2
  misc_feature (5)..(589): Homolog of NCBI NO: 10947137 NR Description: ATP-binding cassette, sub-family F, member 2
  misc_feature (5)..(589): Homolog of NCBI NO: 10179834 NR Description: iron inhibited ABC transporter 2 [Homo sapiens]
  misc_feature (1)..(589): Homolog of NCBI NO: 28502799 NR Description: Similar to ATP-binding cassette, sub-family F
  misc_feature (1)..(591): Homolog of NCBI NO: 28436765 NR Description: Similar to ATP-binding cassette, sub-family F
  misc_feature (1)..(545): Homolog of NCBI NO: 7573600 NR Description: ABC transporter homolog [Populus nigra]
  misc_feature (1)..(592): Homolog of NCBI NO: 15239436 NR Description: ABC transporter family protein [Arabidopsis
  misc_feature (1)..(592): Homolog of NCBI NO: 28071305 NR Description: putative ABC transporter [Oryza sativa (japonica
MVSDASKKKAAQKKAAAAAKRGAKSSAAASSSSASSAADKAANGIAALNLSDRTCTGVLASHPLSRDIHIESLSLTFHGHDLIVDSELELNYGRRYGLLGLNGCGKSTLLTAIGCRELPIPEHMDIHHLTREIEASDMSALQAVICCDEERVKLEKEAEILAAQDDGGGEALDLVYERLEAMDASTAEKRAAEILFGLGFDKQMQAKPTRDFSGGWRMRIALARALFMNPTILLLDEPTNHLDLEACVWLEEKLKNFERILVVISHSQDFLNGVCTNIIHMQNKTLKLYTGNYDQYVQTRSELEENQMKQYKWEQEQIANMKEYIARFGHGSAKLARQAQSKEKTLAKMERGGLAEKVVNDRILVFRFTDVGKLPPPVLQFADVTFGYTPDNLIYKNLDFGVDLDSRVALVGPNGAGKSTLLKLMTGDLSPLDGMVRRHNHLRIAQFHQHLTEKLDLDMPALQYMMREYPGNEEEKMRAAIGKFGLSGKAQVMPMKNLSDGQKARVIFAWLAFRQPQMLLLDEPTNHLDIETIDSLAEALKEWDGGLVLVSHDFRLINQVAQEIWVCENQAVTRWEGDIMDFKQHLKKRAGL

SEQ ID NO: 62111 - protein, 469 aa, Triticum aestivum; identical to SEQ ID NO: 60957
  peptide (1)..(469): Ceres Seq. ID no. 15220990
  misc_feature (1)..(161): Pfam Name: ABC transporter Pfam Description: ABC transporter
  misc_feature (1)..(466): Homolog of NCBI NO: 23956078 NR Description: ATP-binding cassette, sub-family F (GCN20),
  misc_feature (1)..(466): Homolog of NCBI NO: 27707592 NR Description: similar to ATP-binding cassette, sub-family F,
  misc_feature (1)..(466): Homolog of NCBI NO: 27881506 NR Description: ATP-binding cassette, sub-family F, member 2
  misc_feature (1)..(466): Homolog of NCBI NO: 10947137 NR Description: ATP-binding cassette, sub-family F, member 2
  misc_feature (1)..(466): Homolog of NCBI NO: 10179834 NR Description: iron inhibited ABC transporter 2 [Homo sapiens]
  misc_feature (1)..(466): Homolog of NCBI NO: 28502799 NR Description: Similar to ATP-binding cassette, sub-family F
  misc_feature (1)..(468): Homolog of NCBI NO: 28436765 NR Description: Similar to ATP-binding cassette, sub-family F
  misc_feature (1)..(422): Homolog of NCBI NO: 7573600 NR Description: ABC transporter homolog [Populus nigra]
  misc_feature (1)..(469): Homolog of NCBI NO: 15239436 NR Description: ABC transporter family protein [Arabidopsis
  misc_feature (1)..(469): Homolog of NCBI NO: 28071305 NR Description: putative ABC transporter [Oryza sativa (japonica

SEQ ID NO: 62112 - protein, 455 aa, Triticum aestivum; identical to SEQ ID NO: 60958
  peptide (1)..(455): Ceres Seq. ID no. 15220991
  misc_feature (1)..(147): Pfam Name: ABC transporter Pfam Description: ABC transporter
  misc_feature (1)..(452): Homolog of NCBI NO: 23956078 NR Description: ATP-binding cassette, sub-family F (GCN20),
  misc_feature (1)..(452): Homolog of NCBI NO: 27707592 NR Description: similar to ATP-binding cassette, sub-family F,
  misc_feature (1)..(452): Homolog of NCBI NO: 27881506 NR Description: ATP-binding cassette, sub-family F, member 2
  misc_feature (1)..(452): Homolog of NCBI NO: 10947137 NR Description: ATP-binding cassette, sub-family F, member 2
  misc_feature (1)..(452): Homolog of NCBI NO: 10179834 NR Description: iron inhibited ABC transporter 2 [Homo sapiens]
  misc_feature (1)..(452): Homolog of NCBI NO: 28502799 NR Description: Similar to ATP-binding cassette, sub-family F
  misc_feature (1)..(454): Homolog of NCBI NO: 28436765 NR Description: Similar to ATP-binding cassette, sub-family F
  misc_feature (1)..(408): Homolog of NCBI NO: 7573600 NR Description: ABC transporter homolog [Populus nigra]
  misc_feature (1)..(455): Homolog of NCBI NO: 15239436 NR Description: ABC transporter family protein [Arabidopsis
  misc_feature (1)..(455): Homolog of NCBI NO: 28071305 NR Description: putative ABC transporter [Oryza sativa (japonica

SEQ ID NO: 62113 - DNA, 1133 bp, Triticum aestivum
  misc_feature (1)..(1133): Ceres Seq. ID no. 13598367
tagctagttccccaccagagcacacccgccgccgccgccgccgcaacaagagccgccgctagctcgccgccgtccgcctccttccctctgggcagccagcaccgcagcagtgttgagtccagcaccagaagcagaaccttccctctgtcggtgggctgcggcgccgtccgtccgtccgtccgttgaggagggcaagaatgaagggcggtaggaagaacctgcggcgcgcgtgcgaggagggcaccgcggtgacgctggcggagggcgagagcatcatgcaggtcgtcacgctgcgcggctcaaacctcatcgaggtgaccgacggcgagggcgtcaagtctctcgccctcttccccgccaagttccagaagagcttctggatcaagaacgggaatttcgtggttgtggatgctagtggcagggacgaggctctcgaatctggaagcaagatagcctgtgtcgtctcgcgcgtcctctttcacgaccaggttcgcgccctcgagaaatccggccaatggccggctatcttcaagtcaactcccaatgggtgggcgacagggccacaaggaacgacatcacaggctgaggaagagcacaactctgatgaagacgacgatgatgatatgccgccacttgaggcaaacacgaacagaaatagaccgtttgacgtgcattccgatacagaaagtgattctgattcttgaactggtagacgacttgggaatagtcatcatcctatggttaccgtccacctgtacacctaatgtatttatgcttgttgaatttgggcatgacatcataaacttacggcccaatctgtcaaagatatagtagtcagtgcgttttgtcgacattaagtggcagggcatgtggaggcctgtcacctgtagtgtaatatgaagaaaacaaagaatgttgcamctggaggggggcctnnnnnnaaaaaaaaaaaaaaaaaaaaaaaaaaaaaaaaaaaaaaaaaaaaaaaaaaaaaaaaaaaaaaaaaaaaaagaaaaaaaaaaaaaaaaaaaaaaaaaaaattttcaaaaaaaaaaaaaaaaaaaaaaaaaaaaaaaannnccccaaaaaaaaaaaaaagttttttttaaacccccccccccaagggggggccc

SEQ ID NO: 62114 - protein, 168 aa, Triticum aestivum
  peptide (1)..(168): Ceres Seq. ID no. 15222326
  misc_feature (15)..(167): Homolog of NCBI NO: 34861445 NR Description: similar to 2010003J03Rik protein [Rattus
  misc_feature (18)..(167): Homolog of NCBI NO: 32766657 NR Description: Unknown (protein for MGC:63631) [Danio rerio]
  misc_feature (1)..(168): Homolog of NCBI NO: 15226743 NR Description: translation initiation factor -related
  misc_feature (1)..(168): Homolog of NCBI NO: 34902168 NR Description: Hypothetical protein [Oryza sativa (japonica
MKGGRKNLRRACEEGTAVTLAEGESIMQVVTLRGSNLIEVTDGEGVKSLALFPAKFQKSFWIKNGNFVVVDASGRDEALESGSKIACVVSRVLFHDQVRALEKSGQWPAIFKSTPNGWATGPQGTTSQAEEEHNSDEDDDDDMPPLEANTNRNRPFDVHSDTESDSDS

SEQ ID NO: 62115 - protein, 142 aa, Triticum aestivum
  peptide (1)..(142): Ceres Seq. ID no. 15222327
  misc_feature (1)..(141): Homolog of NCBI NO: 34861445 NR Description: similar to 2010003J03Rik protein [Rattus
  misc_feature (1)..(141): Homolog of NCBI NO: 32766657 NR Description: Unknown (protein for MGC:63631) [Danio rerio]
  misc_feature (1)..(142): Homolog of NCBI NO: 15226743 NR Description: translation initiation factor -related
  misc_feature (1)..(142): Homolog of NCBI NO: 34902168 NR Description: Hypothetical protein [Oryza sativa (japonica
MQVVTLRGSNLIEVTDGEGVKSLALFPAKFQKSFWIKNGNFVVVDASGRDEALESGSKIACVVSRVLFHDQVRALEKSGQWPAIFKSTPNGWATGPQGTTSQAEEEHNSDEDDDDDMPPLEANTNRNRPFDVHSDTESDSDS

SEQ ID NO: 62116 - protein, 95 aa, Triticum aestivum
  peptide (1)..(95): Ceres Seq. ID no. 15222328
MGGRQGHKERHHRLRKSTTLMKTTMMICRHLRQTRTEIDRLTCIPIQKVILILELVDDLGIVIILWLPSTCTPNVFMLVEFGHDIINLRPNLSKI

SEQ ID NO: 62117 - DNA, 1814 bp, Triticum aestivum
  misc_feature (1)..(1814): Ceres Seq. ID no. 13596039
gagacctaaatcgccgccaccgttcctcgccactgcggcgaccgccgttctcctccccctcccaccccgcatcggagaggaagatcgccgcgccagcgccaccatacccgaccctcgactccaccactctcggcggtgtgtgctagtctagtctgtctccaccccgacgaatttgcttcgcctgatagcgattaggctgcaatgggtagatgattaatttttgaagcccagctcatcgttaataacaggccgaaagcccagaaacccagcagcagtgtgcaacgagacgatcagattgttctcttttaccatcgtctcggacaaggcaacagagagcaggcagaaggatggatgagcaagatgataaaagtacaaaggctgagctgaaactatgtggtgacatagctgttaagaggaagaattaccgtggcgcgtcagcattctacagcgaggcaattgagctggaccctaatgatgcgacgctgtacgcaaacaggagcctttgctacctgcaaatgactgaagcagataaggctttgcatgatgctaacacctgcataaaactgcgtcctgaatggttaaaaggttactacaggaaaggatctgctcttatgtcgctcaaggagtacaaagaagcatgtgatgcgttcgaagccggactgaaactggaccctggaaacaccgagttggagaaagtattccaggaggcagttgaggcgatgaaaaaggatgacttggctagaaaaagagaaaatgcttcaagccatccagctagagaaaaacaggcacgcaaggggcgcggccgcaacacccactgagctgctgcaacaacgtacgcgggcgattgtgytaagccagccaccgcctgcatccctatgggatttcactgaatttcccgttttgtacacaatatttagtaaaacgtacactgtagctgtgagattggtttttgaattgcgccgtttacagcttggttctgttttatatcaccaaaaaaaaaaaaaaaaaacggcacgagaagcgcttctcgtgccggcttctcgtgccgttttttttttttttttttgttaaacaatgagaatgctcaataacgatcatagccgacacaacgttgacacgtgaaccaacaaccatcctgtacaacatctaccttctcatggactccatcagcgcattcaaattgttcaacgactggccttcgtcgctcatgtttttctccgccatctccttcaacctcagcaccctccgccaaaatgcagatcttcgtcaagaccctcacggggaagaccatcaccctcgaggttgagagcagcgataccatcgacaatgtcaaggccaagatccaggacaaggaggggatcccgccggaccagcagcggctgatcttcgccggaaagcagttggaggacggccgcacccttgccgactacaacatccagaaggagtccaccctccatctcgtcctcaggctccgtggaggcatcatcgagccgtccttgcaggctcttgcccgcaagtacaaccaggagaagatgatctgccgcaaatgctacgcgcgcctgcatccaagggctgtcaactgccgcaagaagaagtgtggccacagcaaccagctgaggcccaagaagaagatcaagaactagagtgctgctagtcagtttcatggaccggttgaatccatcactgtgtcagagtttatgctattatcgtctcggttgtcgttgaaccttattttactttgctttcagcctcctatcgttgtggtgatgataagtgacagtattggtatatggtagcaaacctataattttgcc

SEQ ID NO: 62118 - protein, 156 aa, Triticum aestivum
  peptide (1)..(156): Ceres Seq. ID no. 15221746
  misc_feature (1)..(134): Homolog of NCBI NO: 34896858 NR Description: putative ankyrin [Oryza sativa]
  misc_feature (10)..(134): Homolog of NCBI NO: 13435247 NR Description: putative ankyrin [Oryza sativa]
  misc_feature (10)..(134): Homolog of NCBI NO: 13435249 NR Description: putative protein phosphatase [Oryza sativa]
  misc_feature (1)..(133): Homolog of NCBI NO: 34896852 NR Description: putative ankyrin [Oryza sativa]
  misc_feature (1)..(133): Homolog of NCBI NO: 34896840 NR Description: putative stress-inducible protein [Oryza sativa]
  misc_feature (1)..(133): Homolog of NCBI NO: 13435245 NR Description: putative protein phosphatase [Oryza sativa]
MDEQDDKSTKAELKLCGDIAVKRKNYRGASAFYSEAIELDPNDATLYANRSLCYLQMTEADKALHDANTCIKLRPEWLKGYYRKGSALMSLKEYKEACDAFEAGLKLDPGNTELEKVFQEAVEAMKKDDLARKRENASSHPAREKQARKGRGRNTH

SEQ ID NO: 62119 - protein, 129 aa, Triticum aestivum
  peptide (1)..(129): Ceres Seq. ID no. 15221747
  misc_feature (1)..(74): Pfam Name: Ubiquitin family Pfam Description: Ubiquitin family
  misc_feature (1)..(128): Homolog of NCBI NO: 2558539 NR Description: ubiquitin-ribosomal protein fusion protein
  misc_feature (1)..(128): Homolog of NCBI NO: 630455 NR Description: ubiquitin / ribosomal protein CEP52 -
  misc_feature (1)..(128): Homolog of NCBI NO: 13569612 NR Description: ubiquitin A-52 residue ribosomal protein fusion
  misc_feature (99)..(129): Homolog of NCBI NO: 20330759 NR Description: Putative ubiquitin / ribosomal protein CEP52
  misc_feature (1)..(97): Homolog of NCBI NO: 20330759 NR Description: Putative ubiquitin / ribosomal protein CEP52
  misc_feature (1)..(128): Homolog of NCBI NO: 70654 NR Description: ubiquitin / ribosomal protein CEP52 -
  misc_feature (1)..(128): Homolog of NCBI NO: 18404062 NR Description: ubiquitin extension protein (UBQ2)/60S ribosomal
  misc_feature (1)..(128): Homolog of NCBI NO: 421867 NR Description: ubiquitin / ribosomal protein CEP52 - turnip
  misc_feature (1)..(128): Homolog of NCBI NO: 322750 NR Description: ubiquitin / ribosomal protein CEP52 - wood
  misc_feature (1)..(129): Homolog of NCBI NO: 485518 NR Description: ubiquitin / ribosomal protein CEP52 - rice
MQIFVKTLTGKTITLEVESSDTIDNVKAKIQDKEGIPPDQQRLIFAGKQLEDGRTLADYNIQKESTLHLVLRLRGGIIEPSLQALARKYNQEKMICRKCYARLHPRAVNCRKKKCGHSNQLRPKKKIKN

SEQ ID NO: 62120 - protein, 113 aa, Triticum aestivum
  peptide (1)..(113): Ceres Seq. ID no. 15221748
  misc_feature (41)..(41): Xaa is any aa, unknown or other
MTWLEKEKMLQAIQLEKNRHARGAAATPTELLQQRTRAIVXSQPPPASLWDFTEFPVLYTIFSKTYTVAVRLVFELRRLQLGSVLYHQKKKKKTAREALLVPASRAVFFFFFC

SEQ ID NO: 62121 - DNA, 1434 bp, Triticum aestivum
  misc_feature (1)..(1434): Ceres Seq. ID no. 13654209
aaaccaacgcaaaccccaaatccccaatccgagctgccctcttcccctgaggtaagatccgttcacgatctcagcgcctcatagtccagatcgatttctgcagcaatttcccgcaattttgtctgactttttctcgggaggtcgatcgggtacgattcgattcgatcagatggcggcggtctggatggcgttggcggtgatgctggtcgctgctgctcaggtggcggtggctgccccggtgacggcgccggccttcctctgggctcccaagaactacggacttagtcccaatgaggctaaagaagtagtccactatcagacaatctccccaaagagtttagctgattctgttctcgaggaaggtggctggtcgaacttggtgtgttcaaaggatggtcctcaaaagaatgttgatgttgcagttctttttcttggatcaaagctacaatcatcagacatctctaaagataaacaagtcgatcctgctttagcggacatactaaagctgtccttctcaagctctgagttttccatggcattcccttatgttgccatgtcagacgacgaagcactagagaactcattgctatctggatttactgagaattgtgaggatggttctggaggaaatcatatcacttacacagacacgtgtactgcaagcagtgaaagtgtgaagaaacatctgaacatggattctgttcaagacttggtgaagtcacggatgggaaacaaccaaccaactgagctaatcgtcttctgtagcggtggtttcaaggacagtacaaaatcagaagggcagttgcttttggatctggtttctgttcttgacaagtctggggctaaatacacagttctttacgcttctcaaccctatggtttgctggagaatccttcggacctgccattagccaggtatcttgcagagaagaccaacacaactaaacctgtcctagagaaatgtgatggagagtgccaattaaaatcaactctcctggaaggagtttttgtgggtgtagtgctgcttatcatcttgatatcaggactttgctgcatgatggggatcgatactccatcaagatttgaggctccccaggattaatcttggtctgattttgaagcaaacccgatgtggatggccagtgtttgttaccctgcgcagtggatatagttagcttcctcttcaaaggtgccttgcttgtgtatttttctaagccaaacttctgtttagtgaccaaacttttggtgtataattgcattccaaacccacggagatctgagcttttgcaaactacactacatgcgcaaggcttatgttgtactatcaaaccagaattgtttccagttttctctgtgaatagcctggattcaggaagccaataagatgatggcactactgtccatctaataaaatcttgttattttttagtagcc

SEQ ID NO: 62122 - protein, 310 aa, Triticum aestivum
  peptide (1)..(310): Ceres Seq. ID no. 13654210
  misc_feature (52)..(127): Homolog of NCBI NO: 25405838 NR Description: hypothetical protein T5A14.4 [imported] -
  misc_feature (115)..(310): Homolog of NCBI NO: 21618303 NR Description: unknown [Arabidopsis thaliana]
  misc_feature (1)..(310): Homolog of NCBI NO: 30682651 NR Description: expressed protein [Arabidopsis thaliana]
  misc_feature (1)..(310): Homolog of NCBI NO: 24417230 NR Description: unknown [Arabidopsis thaliana]
MAAVWMALAVMLVAAAQVAVAAPVTAPAFLWAPKNYGLSPNEAKEVVHYQTISPKSLADSVLEEGGWSNLVCSKDGPQKNVDVAVLFLGSKLQSSDISKDKQVDPALADILKLSFSSSEFSMAFPYVAMSDDEALENSLLSGFTENCEDGSGGNHITYTDTCTASSESVKKHLNMDSVQDLVKSRMGNNQPTELIVFCSGGFKDSTKSEGQLLLDLVSVLDKSGAKYTVLYASQPYGLLENPSDLPLARYLAEKTNTTKPVLEKCDGECQLKSTLLEGVFVGVVLLIILISGLCCMMGIDTPSRFEAPQD

SEQ ID NO: 62123 - protein, 305 aa, Triticum aestivum
  peptide (1)..(305): Ceres Seq. ID no. 13654211
  misc_feature (47)..(122): Homolog of NCBI NO: 25405838 NR Description: hypothetical protein T5A14.4 [imported] -
  misc_feature (110)..(305): Homolog of NCBI NO: 21618303 NR Description: unknown [Arabidopsis thaliana]
  misc_feature (1)..(305): Homolog of NCBI NO: 30682651 NR Description: expressed protein [Arabidopsis thaliana]
  misc_feature (1)..(305): Homolog of NCBI NO: 24417230 NR Description: unknown [Arabidopsis thaliana]
MALAVMLVAAAQVAVAAPVTAPAFLWAPKNYGLSPNEAKEVVHYQTISPKSLADSVLEEGGWSNLVCSKDGPQKNVDVAVLFLGSKLQSSDISKDKQVDPALADILKLSFSSSEFSMAFPYVAMSDDEALENSLLSGFTENCEDGSGGNHITYTDTCTASSESVKKHLNMDSVQDLVKSRMGNNQPTELIVFCSGGFKDSTKSEGQLLLDLVSVLDKSGAKYTVLYASQPYGLLENPSDLPLARYLAEKTNTTKPVLEKCDGECQLKSTLLEGVFVGVVLLIILISGLCCMMGIDTPSRFEAPQD

SEQ ID NO: 62124 - protein, 300 aa, Triticum aestivum
  peptide (1)..(300): Ceres Seq. ID no. 13654212
  misc_feature (42)..(117): Homolog of NCBI NO: 25405838 NR Description: hypothetical protein T5A14.4 [imported] -
  misc_feature (105)..(300): Homolog of NCBI NO: 21618303 NR Description: unknown [Arabidopsis thaliana]
  misc_feature (1)..(300): Homolog of NCBI NO: 30682651 NR Description: expressed protein [Arabidopsis thaliana]
  misc_feature (1)..(300): Homolog of NCBI NO: 24417230 NR Description: unknown [Arabidopsis thaliana]
MLVAAAQVAVAAPVTAPAFLWAPKNYGLSPNEAKEVVHYQTISPKSLADSVLEEGGWSNLVCSKDGPQKNVDVAVLFLGSKLQSSDISKDKQVDPALADILKLSFSSSEFSMAFPYVAMSDDEALENSLLSGFTENCEDGSGGNHITYTDTCTASSESVKKHLNMDSVQDLVKSRMGNNQPTELIVFCSGGFKDSTKSEGQLLLDLVSVLDKSGAKYTVLYASQPYGLLENPSDLPLARYLAEKTNTTKPVLEKCDGECQLKSTLLEGVFVGVVLLIILISGLCCMMGIDTPSRFEAPQD

SEQ ID NO: 62125 - DNA, 856 bp, Triticum aestivum
  misc_feature (1)..(856): Ceres Seq. ID no. 12625251
ctccgcagatcagcagcccccaaatcggcgacccctcgctctctctccgatctccaatcctccacctcgcacacgcgcaccaaccgggcacgatgcgggcgatctcgtcggcggcgggagggatgctgcgggcgcggctgcgcgcggcggtgcgcctccgcggcgggcacggcgacggcgggggccgctggacgacgcccggccacgaggtgcggcccaaggggtacccgatgaaccgcacgccgccgccgccgggcgagtcgcgcaagtgggaggactgggagctcccctgctacgtcacctccttcctcaccgtcgtcatcctcggcgtcgggctcaacgccaagcccgacctcaccctcgagacctgggcgcaccacaaggcgctcgagcgcctccagcagcaggagctcgccgccgcctccgcctcggccgacgccctgtccgagtgatccgcgcgcgcgcgccccaggtcttcctccaagcctaggtcgcttctgttctgttttgcttccaataagggttggttgtgaacttgtgatgtaccaatctgatattgatgggacctgggcggaacactatatttctgtttctgttttgttgttgaaatttatctgatgatgatggcagataccgtatgcatttcgaaatgccctgtggtgtcccaaacattttgaaatgcctctgcattgtattgtcttgtgtatcccttatttatttccttgggcatgatttgctacatgcttttgcgagcgtaattaggaccgattgtacctgtctctctttgcctgaaatgacttgttgcagaaaataaataaatcagttgtcgcattgaacagcttgatgccgaaaaact

SEQ ID NO: 62126 - protein, 162 aa, Triticum aestivum
  peptide (1)..(162): Ceres Seq. ID no. 12625252
SADQQPPNRRPLALSPISNPPPRTRAPTGHDAGDLVGGGRDAAGAAARGGAPPRRARRRRGPLDDARPRGAAQGVPDEPHAAAAGRVAQVGGLGAPLLRHLLPHRRHPRRRAQRQARPHPRDLGAPQGARAPPAAGARRRLRLGRRPVRVIRARAPQVFLQA

SEQ ID NO: 62127 - protein, 149 aa, Triticum aestivum
  peptide (1)..(149): Ceres Seq. ID no. 12625253
  misc_feature (67)..(149): Homolog of NCBI NO: 29150398 NR Description: hypothetical protein [Oryza sativa (japonica
  misc_feature (16)..(142): Homolog of NCBI NO: 9858777 NR Description: BAC19.9 [Lycopersicon esculentum]
  misc_feature (46)..(145): Homolog of NCBI NO: 15227917 NR Description: unknown protein
  misc_feature (46)..(144): Homolog of NCBI NO: 7485503 NR Description: hypothetical protein F15B8.20 - Arabidopsis
  misc_feature (46)..(144): Homolog of NCBI NO: 18410807 NR Description: Expressed protein
PQISSPQIGDPSLSLRSPILHLAHAHQPGTMRAISSAAGGMLRARLRAAVRLRGGHGDGGGRWTTPGHEVRPKGYPMNRTPPPPGESRKWEDWELPCYVTSFLTVVILGVGLNAKPDLTLETWAHHKALERLQQQELAAASASADALSE

SEQ ID NO: 62128 - protein, 119 aa, Triticum aestivum
  peptide (1)..(119): Ceres Seq. ID no. 12625254
  misc_feature (37)..(119): Homolog of NCBI NO: 29150398 NR Description: hypothetical protein [Oryza sativa (japonica
  misc_feature (1)..(112): Homolog of NCBI NO: 9858777 NR Description: BAC19.9 [Lycopersicon esculentum]
  misc_feature (16)..(115): Homolog of NCBI NO: 15227917 NR Description: unknown protein
  misc_feature (16)..(114): Homolog of NCBI NO: 7485503 NR Description: hypothetical protein F15B8.20 - Arabidopsis
  misc_feature (16)..(114): Homolog of NCBI NO: 18410807 NR Description: Expressed protein
MRAISSAAGGMLRARLRAAVRLRGGHGDGGGRWTTPGHEVRPKGYPMNRTPPPPGESRKWEDWELPCYVTSFLTVVILGVGLNAKPDLTLETWAHHKALERLQQQELAAASASADALSE

SEQ ID NO: 62129 - DNA, 504 bp, Triticum aestivum
  misc_feature (1)..(504): Ceres Seq. ID no. 13596388
ctgtgcttgaaccacaagacaagctcgatcacgattcacgcgccgcgcgttgtcagtgcgaagcagctgttgtgcgctctgcagagacgacccatggcctcgagaacagcggcggtgccggaggtggccctgcggtccggcgacgcgaggcccatgccggccatcggcatgggcaccgcccagtccccggtggtgccggacaccaccgtgaaggccgtgctggaggccgtggaggtgggctaccgccacttcgacacggcctccatgtacgcgacggagcggcccctgggcgaggccctcgcggaggcggtgcgccgcgggctcctggcgtcccgggaggaggtgttcgtcacgtccaagctctgttgcacgcagtgccacccgcacctcgtgctcccgtccctccaggagagcctccagaacctgcagatggagtacgtggacctgtatctgatccactggccgatcagcctgaagcccgggcccgtggtgttcccggtgaag

SEQ ID NO: 62130 - protein, 168 aa, Triticum aestivum
  peptide (1)..(168): Ceres Seq. ID no. 13596389
  misc_feature (52)..(161): Homolog of NCBI NO: 27357979 NR Description: Putative NADPH-dependent oxidoreductase
  misc_feature (39)..(167): Homolog of NCBI NO: 15218960 NR Description: aldo/keto reductase, putative [Arabidopsis
  misc_feature (39)..(167): Homolog of NCBI NO: 4249390 NR Description: Similar to gb|AF039182 probable aldo-keto from Fragaria x ananassa. This gene may be cut off. EST gb|U74151
  misc_feature (33)..(163): Homolog of NCBI NO: 37530540 NR Description: putative NADPH-dependent oxidoreductase
  misc_feature (39)..(167): Homolog of NCBI NO: 6478216 NR Description: putative NADPH-dependent oxidoreductase [Papaver
  misc_feature (32)..(167): Homolog of NCBI NO: 40781599 NR Description: reductase 1 [Hydrangea macrophylla]
  misc_feature (39)..(167): Homolog of NCBI NO: 40781598 NR Description: reductase 2 [Hydrangea macrophylla]
  misc_feature (34)..(167): Homolog of NCBI NO: 38344822 NR Description: OSJNBa0064H22.3 [Oryza sativa (japonica
  misc_feature (37)..(167): Homolog of NCBI NO: 38344824 NR Description: OSJNBa0064H22.5 [Oryza sativa (japonica
  misc_feature (39)..(167): Homolog of NCBI NO: 38344823 NR Description: OSJNBa0064H22.4 [Oryza sativa (japonica
LCLNHKTSSITIHAPRVVSAKQLLCALQRRPMASRTAAVPEVALRSGDARPMPAIGMGTAQSPVVPDTTVKAVLEAVEVGYRHFDTASMYATERPLGEALAEAVRRGLLASREEVFVTSKLCCTQCHPHLVLPSLQESLQNLQMEYVDLYLIHWPISLKPGPVVFPVK

SEQ ID NO: 62131 - protein, 167 aa, Triticum aestivum
  peptide (1)..(167): Ceres Seq. ID no. 13596390
VLEPQDKLDHDSRAARCQCEAAVVRSAETTHGLENSGGAGGGPAVRRREAHAGHRHGHRPVPGGAGHHREGRAGGRGGGLPPLRHGLHVRDGAAPGRGPRGGGAPRAPGVPGGGVRHVQALLHAVPPAPRAPVPPGEPPEPADGVRGPVSDPLADQPEARARGVPGE

SEQ ID NO: 62132 - protein, 137 aa, Triticum aestivum
  peptide (1)..(137): Ceres Seq. ID no. 13596391
  misc_feature (21)..(130): Homolog of NCBI NO: 27357979 NR Description: Putative NADPH-dependent oxidoreductase
  misc_feature (8)..(136): Homolog of NCBI NO: 15218960 NR Description: aldo/keto reductase, putative [Arabidopsis
  misc_feature (8)..(136): Homolog of NCBI NO: 4249390 NR Description: Similar to gb|AF039182 probable aldo-keto from Fragaria x ananassa. This gene may be cut off. EST gb|U74151
  misc_feature (2)..(132): Homolog of NCBI NO: 37530540 NR Description: putative NADPH-dependent oxidoreductase
  misc_feature (8)..(136): Homolog of NCBI NO: 6478216 NR Description: putative NADPH-dependent oxidoreductase [Papaver
  misc_feature (1)..(136): Homolog of NCBI NO: 40781599 NR Description: reductase 1 [Hydrangea macrophylla]
  misc_feature (8)..(136): Homolog of NCBI NO: 40781598 NR Description: reductase 2 [Hydrangea macrophylla]
  misc_feature (3)..(136): Homolog of NCBI NO: 38344822 NR Description: OSJNBa0064H22.3 [Oryza sativa (japonica
  misc_feature (6)..(136): Homolog of NCBI NO: 38344824 NR Description: OSJNBa0064H22.5 [Oryza sativa (japonica
  misc_feature (8)..(136): Homolog of NCBI NO: 38344823 NR Description: OSJNBa0064H22.4 [Oryza sativa (japonica
MASRTAAVPEVALRSGDARPMPAIGMGTAQSPVVPDTTVKAVLEAVEVGYRHFDTASMYATERPLGEALAEAVRRGLLASREEVFVTSKLCCTQCHPHLVLPSLQESLQNLQMEYVDLYLIHWPISLKPGPVVFPVK

SEQ ID NO: 62133 - DNA, 1477 bp, Triticum aestivum
  misc_feature (1)..(1477): Ceres Seq. ID no. 13596465
agtctacccaaagtccgacgagcaaccacccggccatggcgaccaccgacatccgcctctccatcgggcaccagacccgcttcgccctccgcctcgcctccgccatctcctcgccctcccacgccaagggatccgccggcaacgccgccttctccccgctctcgctccacgtcgcgctcagcctcgtcgcggcgggcgccggcggcgccacccgcgaccagctcgccgccgcgcttgggtccgcggagaaaggcgaggccgagggcctccacgcgctcgccgagcaggtggttcaggtcgtgctcgccgacgcgtcgggcgccggcggcccgcgcgtcgccttcgccaacggcgtcttcgtcgacgcgtcgctcaagctcaagccttccttcaaggatctcactgtgggcaagtacaaggccgagacacagtccgtggacttccaaactaaggctgctgaagttgctggtcaagtgaactcctgggtagagaaaatcacaacaggtctcatcaaagagatcctccctgcaggatctgttgataacaccactagactggttcttggtaatgccctttatttcaaaggagcttggactgagaagtttgatgcatctaagacaaaagacgagaagttccacctccttgatgggagctcagttcaaacaccgttcatgtccagtacaaagaagcaatatatttcgtcttctgacagcttgaaggtactgaagcttccttaccagcaaggcgaggacaagaggcagttctccatgtacattcttcttccagaagcacaggatggtctctggaacttggccaacaagttgagcaccgaaccagagttcttggaaaaccatatcccaatgcagaaggttcctgtcgggcagttcaagcttccgaagttcaagatatcatttggatttgaagcgtctgatatgctcaaaggtttgggtctccagctgccgttcagcgcagaggcagatctttcggagatggtggattcaccggcgggcttatacgtctcatccgttttccacaagtcgtttgtcgaggtgaacgaagaaggcaccgaggctgccgctgcaactgcttcagtggtcacacttaggtcactgccagtggagcccgtgaaggtggatttcgtcgcggatcaccctttcctcttccttatccgagaagacctcacaggggtggtgctattcgtcggccatgtgttcaatcccttggtgtctgcatgatgtgtttgctctggatcgctgccttggcagtgacctcaactgtcacatgtaagtgaagggtttcgactttagatcatgctgcctgtgcaataaatccggtgcatgtttttgttttcgaataacggcttgcttgatgtatggaggttatggtgagttggtgacaataatccagggttgccgtggagttttgtgctttcagttgaatgatactcctacatgagatggccaaatgcttcttggtc

SEQ ID NO: 62134 - protein, 410 aa, Triticum aestivum
  peptide (1)..(410): Ceres Seq. ID no. 15221885
  misc_feature (14)..(406): Pfam Name: Serpin (serine protease inhibitor) Pfam Description: Serpin (serine protease inhibitor)
  misc_feature (12)..(410): Homolog of NCBI NO: 2130110 NR Description: serpin - wheat
  misc_feature (12)..(410): Homolog of NCBI NO: 7438221 NR Description: serpin WZS2 - wheat
  misc_feature (12)..(410): Homolog of NCBI NO: 5734504 NR Description: serpin [Triticum aestivum]
  misc_feature (12)..(409): Homolog of NCBI NO: 5734506 NR Description: serpin [Triticum aestivum]
  misc_feature (14)..(410): Homolog of NCBI NO: 7438218 NR Description: serpin - barley
  misc_feature (12)..(410): Homolog of NCBI NO: 131091 NR Description: Protein Z (Z4) (Major endosperm albumin)
  misc_feature (12)..(410): Homolog of NCBI NO: 1310677 NR Description: protein z-type serpin [Hordeum vulgare subsp.
  misc_feature (12)..(410): Homolog of NCBI NO: 7438222 NR Description: serpin homolog WZS3 - wheat
  misc_feature (16)..(410): Homolog of NCBI NO: 40539102 NR Description: putative serine protease inhibitor
  misc_feature (12)..(410): Homolog of NCBI NO: 421989 NR Description: serpin - barley
STQSPTSNHPAMATTDIRLSIGHQTRFALRLASAISSPSHAKGSAGNAAFSPLSLHVALSLVAAGAGGATRDQLAAALGSAEKGEAEGLHALAEQVVQVVLADASGAGGPRVAFANGVFVDASLKLKPSFKDLTVGKYKAETQSVDFQTKAAEVAGQVNSWVEKITTGLIKEILPAGSVDNTTRLVLGNALYFKGAWTEKFDASKTKDEKFHLLDGSSVQTPFMSSTKKQYISSSDSLKVLKLPYQQGEDKRQFSMYILLPEAQDGLWNLANKLSTEPEFLENHIPMQKVPVGQFKLPKFKISFGFEASDMLKGLGLQLPFSAEADLSEMVDSPAGLYVSSVFHKSFVEVNEEGTEAAAATASVVTLRSLPVEPVKVDFVADHPFLFLIREDLTGVVLFVGHVFNPLVSA

SEQ ID NO: 62135 - protein, 399 aa, Triticum aestivum
  peptide (1)..(399): Ceres Seq. ID no. 15221886
  misc_feature (3)..(395): Pfam Name: Serpin (serine protease inhibitor) Pfam Description: Serpin (serine protease inhibitor)
  misc_feature (1)..(399): Homolog of NCBI NO: 2130110 NR Description: serpin - wheat
  misc_feature (1)..(399): Homolog of NCBI NO: 7438221 NR Description: serpin WZS2 - wheat
  misc_feature (1)..(399): Homolog of NCBI NO: 5734504 NR Description: serpin [Triticum aestivum]
  misc_feature (1)..(398): Homolog of NCBI NO: 5734506 NR Description: serpin [Triticum aestivum]
  misc_feature (3)..(399): Homolog of NCBI NO: 7438218 NR Description: serpin - barley
  misc_feature (1)..(399): Homolog of NCBI NO: 131091 NR Description: Protein Z (Z4) (Major endosperm albumin)
  misc_feature (1)..(399): Homolog of NCBI NO: 1310677 NR Description: protein z-type serpin [Hordeum vulgare subsp.
  misc_feature (1)..(399): Homolog of NCBI NO: 7438222 NR Description: serpin homolog WZS3 - wheat
  misc_feature (5)..(399): Homolog of NCBI NO: 40539102 NR Description: putative serine protease inhibitor
  misc_feature (1)..(399): Homolog of NCBI NO: 421989 NR Description: serpin - barley
MATTDIRLSIGHQTRFALRLASAISSPSHAKGSAGNAAFSPLSLHVALSLVAAGAGGATRDQLAAALGSAEKGEAEGLHALAEQVVQVVLADASGAGGPRVAFANGVFVDASLKLKPSFKDLTVGKYKAETQSVDFQTKAAEVAGQVNSWVEKITTGLIKEILPAGSVDNTTRLVLGNALYFKGAWTEKFDASKTKDEKFHLLDGSSVQTPFMSSTKKQYISSSDSLKVLKLPYQQGEDKRQFSMYILLPEAQDGLWNLANKLSTEPEFLENHIPMQKVPVGQFKLPKFKISFGFEASDMLKGLGLQLPFSAEADLSEMVDSPAGLYVSSVFHKSFVEVNEEGTEAAAATASVVTLRSLPVEPVKVDFVADHPFLFLIREDLTGVVLFVGHVFNPLVSA

SEQ ID NO: 62136 - DNA, 1427 bp, Triticum aestivum
  misc_feature (1)..(1427): Ceres Seq. ID no. 13596392
aaaaccaaaacaaataccaacacacacacagccagccagccagccaggaagcaaaaaaatccccccaccctccctgcaatagcaaacacgcggaaaaaaatggaggcatgaacacgcccccctcctcctccgtccccgcctcctccgtccccgatcccgtcgacagcccagcggccccgcccccgccccctcctcgccggcggcacccttgctcgtaggcgggcgtgaggggagcggcgcgcagcgacgatgccgtcgcactcggatctggaccggcagatctcgctgctgcgggactgcaagttcctgccggacgccgaggtcaaggccctctgcgagcaggccaaggcgatcctcatggaggagtggaacgtgcagcccgtgcgctgccccgtcaccgtctgcggcgacatccacggccagttctacgacctcatcgagctcttccgcatcgggggcgacacccccgacaccaactaccttttcatgggcgactacgtcgaccgtggctactattcagtggagactgtttcattattagtggctctcaaagttcgttatagagacagaatcacaatcttgagaggaaatcacgagagccgacaaatcactcaagtgtatggcttctatgatgaatgcttacggaagtacggaaatgcaaatgtctggaagtacttcacagatttgtttgattatttgcctctcacagctcttatagaaaaccaggtgttttgcctccatggtggtctctctccatcattagatacattggacaatattcgttctcttgatcgcatacaagaggtcccgcatgaaggacctatgtgtgatcttttgtggtctgatccggatgaccgatgcgggtggggaatttcaccaagaggagcaggctacacatttggacaagatatagcacaacaatttaaccatacaaatggtcttagccttatttcaagggcccatcaacttgtgatggaagggttcaactgggcacaggagaagaatgttgtcacagttttcagtgcgccaaactactgttaccggtgtggtaacatggctgcgattctcgaaattggggagaacatggatcagaacttcctccaattcgatccagcgccgcggcaaatcgagccagacacaacgcgcaagacccccgactactttttgtaatcgtggtgttgactttttttaactcttctgctgcctggctggatctgtagatctctgtccttagaaaatgggattccttgagctgagttgtgtaccccccctctcattcttttgtttggagattttggttgccgcttctcaggacctcataggacatgttaaaagtacattgcattggtattttttttgtatctccattttgtattatttccgagacagagaagggaagctgcaatagaatcgtctcgtaacatatt

SEQ ID NO: 62137 - protein, 306 aa, Triticum aestivum; identical to SEQ ID NO: 51990
  peptide (1)..(306): Ceres Seq. ID no. 15221856
  misc_feature (47)..(242): Pfam Name: Calcineurin-like phosphoesterase Pfam Description: Calcineurin-like phosphoesterase
  misc_feature (1)..(306): Homolog of NCBI NO: 15218928 NR Description: serine/threonine protein phosphatase PP2A
  misc_feature (1)..(306): Homolog of NCBI NO: 21593150 NR Description: serine/threonine protein phosphatase type 2A,
  misc_feature (1)..(306): Homolog of NCBI NO: 11133825 NR Description: Serine/threonine protein phosphatase PP2A
  misc_feature (1)..(306): Homolog of NCBI NO: 15218524 NR Description: serine/threonine protein phosphatase, PP2A
  misc_feature (1)..(306): Homolog of NCBI NO: 7248361 NR Description: type 2A protein phosphatase-2 [Vicia faba]
  misc_feature (1)..(306): Homolog of NCBI NO: 10638985 NR Description: protein phosphatase 2A [Fagus sylvatica]
  misc_feature (1)..(306): Homolog of NCBI NO: 7248359 NR Description: type 2A protein phosphatase-1 [Vicia faba]
  misc_feature (1)..(306): Homolog of NCBI NO: 7435122 NR Description: probable phosphoprotein phosphatase (EC 3.1.3.16)
  misc_feature (1)..(306): Homolog of NCBI NO: 11134222 NR Description: Serine/threonine protein phosphatase PP2A-3
  misc_feature (1)..(306): Homolog of NCBI NO: 11134285 NR Description: Serine/threonine protein phosphatase PP2A-1

SEQ ID NO: 62138 - protein, 270 aa, Triticum aestivum; identical to SEQ ID NO: 51991
  peptide (1)..(270): Ceres Seq. ID no. 15221857
  misc_feature (11)..(206): Pfam Name: Calcineurin-like phosphoesterase Pfam Description: Calcineurin-like phosphoesterase
  misc_feature (1)..(270): Homolog of NCBI NO: 15218928 NR Description: serine/threonine protein phosphatase PP2A
  misc_feature (1)..(270): Homolog of NCBI NO: 21593150 NR Description: serine/threonine protein phosphatase type 2A,
  misc_feature (1)..(270): Homolog of NCBI NO: 11133825 NR Description: Serine/threonine protein phosphatase PP2A
  misc_feature (1)..(270): Homolog of NCBI NO: 15218524 NR Description: serine/threonine protein phosphatase, PP2A
  misc_feature (1)..(270): Homolog of NCBI NO: 7248361 NR Description: type 2A protein phosphatase-2 [Vicia faba]
  misc_feature (1)..(270): Homolog of NCBI NO: 10638985 NR Description: protein phosphatase 2A [Fagus sylvatica]
  misc_feature (1)..(270): Homolog of NCBI NO: 7248359 NR Description: type 2A protein phosphatase-1 [Vicia faba]
  misc_feature (1)..(270): Homolog of NCBI NO: 7435122 NR Description: probable phosphoprotein phosphatase (EC 3.1.3.16)
  misc_feature (1)..(270): Homolog of NCBI NO: 11134222 NR Description: Serine/threonine protein phosphatase PP2A-3
  misc_feature (1)..(270): Homolog of NCBI NO: 11134285 NR Description: Serine/threonine protein phosphatase PP2A-1

SEQ ID NO: 62139 - protein, 227 aa, Triticum aestivum; identical to SEQ ID NO: 51992
  peptide (1)..(227): Ceres Seq. ID no. 15221858
  misc_feature (1)..(163): Pfam Name: Calcineurin-like phosphoesterase Pfam Description: Calcineurin-like phosphoesterase
  misc_feature (1)..(227): Homolog of NCBI NO: 15218928 NR Description: serine/threonine protein phosphatase PP2A
  misc_feature (1)..(227): Homolog of NCBI NO: 21593150 NR Description: serine/threonine protein phosphatase type 2A,
  misc_feature (1)..(227): Homolog of NCBI NO: 11133825 NR Description: Serine/threonine protein phosphatase PP2A
  misc_feature (1)..(227): Homolog of NCBI NO: 15218524 NR Description: serine/threonine protein phosphatase, PP2A
  misc_feature (1)..(227): Homolog of NCBI NO: 7248361 NR Description: type 2A protein phosphatase-2 [Vicia faba]
  misc_feature (1)..(227): Homolog of NCBI NO: 10638985 NR Description: protein phosphatase 2A [Fagus sylvatica]
  misc_feature (1)..(227): Homolog of NCBI NO: 7248359 NR Description: type 2A protein phosphatase-1 [Vicia faba]
  misc_feature (1)..(227): Homolog of NCBI NO: 7435122 NR Description: probable phosphoprotein phosphatase (EC 3.1.3.16)
  misc_feature (1)..(227): Homolog of NCBI NO: 11134222 NR Description: Serine/threonine protein phosphatase PP2A-3
  misc_feature (1)..(227): Homolog of NCBI NO: 11134285 NR Description: Serine/threonine protein phosphatase PP2A-1

SEQ ID NO: 62140 - DNA, 1573 bp, Triticum aestivum
  misc_feature (1)..(1573): Ceres Seq. ID no. 13598368
  misc_feature: Pfam Name: Lipase_3 Pfam Description: Lipase (class 3)
cacaatactagcaagagtgtagccaacagagccaaactcaccggtacgcagccgatcgatcgataaggtcccccgaatttaacacccgctcgccatgtcgttcctcccgattccgctgccaatcgttggagacatagccagcaggctgaacggccaagagaaaccgcgcggcgacgacacgacgtcgtcggcgccggcgcctgtcctcggaaccgtggccagcaggtggcgcgagctccacggcgagaactcgtggaagggcctcctggaccctctggacccgcacctccgctccagcatcatctcctacggcgagatggtgcaggccgcctacgacgccttcaacaccgagaggcgctccccgcactgcggcgcgtgcttctacggctacgaggacctgctggcgggcgtcggggtgccgcaccacggcaacaactacgaggtcaccaagttcatctacgccacctcgtcgctgccactcccgagctccttcctcctgctgccgctgccgtcgctgccggacgtctggagccgagagtccaactggatggggtacgtggccgtggccacggacgagggcgccgccgcgctcgggaggcgggacatcgttgtggcgtggcgcggcaccgtccagaacatggagtgggtcaacgacctcgacttcgcgccggtgcccgccgcgcccgtgctgggctccgcggcgagccagcaccgcctcgccgtcgtgcaccatgggttcctctccatgtacacgtcaagcaacaagagctccgagttcaccaagaccagcgccagagatcaggttgtcaaggaggtcaggaggctcgtggagctgtacaaggatgaggaggtcagcatcaccatctgtggccacagccttggtgcgtcagtcgccaccctgaacgccgttgacctggtgtctagcggcatcaacaaacccgagggctccactaagtcgttccctgtgactgctatcgtgtttgcgagccctcacgtcgggtgccgcttctttaggtcggcgttcaactcatttccagacctgaaggcactacatgtgcagaacgctggcgacgtcgtgcccatgtacccacctctgggatacgtggacgtggccgtggagcttaccataagaacaatccgatctccgtacatgcgtaagccggccacagtgggaacactccacaatctcgagtgctacctacacggagtggccggggagcagggaagtgccggagggttcaagctagaggtggatcgtgacatagcgctggtgaacaagggtgccgacgctctcacggacgagcacccggtgccggcgtgttggtgggtccctagacacaagttcatggtcaagggggaagatgggcgatggacgctccaggatttcaagcacatctgagttactcacatcggccattgaaaggtaaattaggccttgatgtgattcacgacattgtactcgttaccaagtttctaaataacggctacggtttgtcaaccgtaccgagtatctttccctttttatgcaatataagtgaatgtttcacgacattgtactcgttaccaagggtct

SEQ ID NO: 62141 - protein, 434 aa, Triticum aestivum
  peptide (1)..(434): Ceres Seq. ID no. 15222329
  misc_feature: Pfam Name: Lipase_3 Pfam Description: Lipase (class 3)
  misc_feature (38)..(429): Homolog of NCBI NO: 34910484 NR Description: putative lipase [Oryza sativa (japonica
  misc_feature (41)..(430): Homolog of NCBI NO: 1527001 NR Description: Ipomoea nil Pn47p
  misc_feature (41)..(428): Homolog of NCBI NO: 21537306 NR Description: lipase-like protein [Arabidopsis thaliana]
  misc_feature (41)..(428): Homolog of NCBI NO: 15221426 NR Description: lipase (class 3) family [Arabidopsis thaliana]
  misc_feature (35)..(430): Homolog of NCBI NO: 34911842 NR Description: lipase-like protein [Oryza sativa (japonica
  misc_feature (42)..(430): Homolog of NCBI NO: 15233922 NR Description: lipase (class 3) family [Arabidopsis thaliana]
  misc_feature (41)..(430): Homolog of NCBI NO: 34911832 NR Description: lipase-like protein [Oryza sativa (japonica
  misc_feature (38)..(430): Homolog of NCBI NO: 34911830 NR Description: lipase-like protein [Oryza sativa (japonica
  misc_feature (240)..(432): Homolog of NCBI NO: 34911870 NR Description: lipase-like protein [Oryza sativa (japonica
  misc_feature (32)..(254): Homolog of NCBI NO: 34911870 NR Description: lipase-like protein [Oryza sativa (japonica
MSFLPIPLPIVGDIASRLNGQEKPRGDDTTSSAPAPVLGTVASRWRELHGENSWKGLLDPLDPHLRSSIISYGEMVQAAYDAFNTERRSPHCGACFYGYEDLLAGVGVPHHGNNYEVTKFIYATSSLPLPSSFLLLPLPSLPDVWSRESNWMGYVAVATDEGAAALGRRDIVVAWRGTVQNMEWVNDLDFAPVPAAPVLGSAASQHRLAVVHHGFLSMYTSSNKSSEFTKTSARDQVVKEVRRLVELYKDEEVSITICGHSLGASVATLNAVDLVSSGINKPEGSTKSFPVTAIVFASPHVGCRFFRSAFNSFPDLKALHVQNAGDVVPMYPPLGYVDVAVELTIRTIRSPYMRKPATVGTLHNLECYLHGVAGEQGSAGGFKLEVDRDIALVNKGADALTDEHPVPACWWVPRHKFMVKGEDGRWTLQDFKHI

SEQ ID NO: 62142 - protein, 360 aa, Triticum aestivum
  peptide (1)..(360): Ceres Seq. ID no. 15222330
  misc_feature: Pfam Name: Lipase_3 Pfam Description: Lipase (class 3)
  misc_feature (1)..(355): Homolog of NCBI NO: 34910484 NR Description: putative lipase [Oryza sativa (japonica
  misc_feature (1)..(356): Homolog of NCBI NO: 1527001 NR Description: Ipomoea nil Pn47p
  misc_feature (1)..(354): Homolog of NCBI NO: 21537306 NR Description: lipase-like protein [Arabidopsis thaliana]
  misc_feature (1)..(354): Homolog of NCBI NO: 15221426 NR Description: lipase (class 3) family [Arabidopsis thaliana]
  misc_feature (1)..(356): Homolog of NCBI NO: 34911842 NR Description: lipase-like protein [Oryza sativa (japonica
  misc_feature (1)..(356): Homolog of NCBI NO: 15233922 NR Description: lipase (class 3) family [Arabidopsis thaliana]
  misc_feature (1)..(356): Homolog of NCBI NO: 34911832 NR Description: lipase-like protein [Oryza sativa (japonica
  misc_feature (1)..(356): Homolog of NCBI NO: 34911830 NR Description: lipase-like protein [Oryza sativa (japonica
  misc_feature (166)..(358): Homolog of NCBI NO: 34911870 NR Description: lipase-like protein [Oryza sativa (japonica
  misc_feature (1)..(180): Homolog of NCBI NO: 34911870 NR Description: lipase-like protein [Oryza sativa (japonica
MVQAAYDAFNTERRSPHCGACFYGYEDLLAGVGVPHHGNNYEVTKFIYATSSLPLPSSFLLLPLPSLPDVWSRESNWMGYVAVATDEGAAALGRRDIVVAWRGTVQNMEWVNDLDFAPVPAAPVLGSAASQHRLAVVHHGFLSMYTSSNKSSEFTKTSARDQVVKEVRRLVELYKDEEVSITICGHSLGASVATLNAVDLVSSGINKPEGSTKSFPVTAIVFASPHVGCRFFRSAFNSFPDLKALHVQNAGDVVPMYPPLGYVDVAVELTIRTIRSPYMRKPATVGTLHNLECYLHGVAGEQGSAGGFKLEVDRDIALVNKGADALTDEHPVPACWWVPRHKFMVKGEDGRWTLQDFKHI

SEQ ID NO: 62143 - protein, 283 aa, Triticum aestivum
  peptide (1)..(283): Ceres Seq. ID no. 15222331
  misc_feature: Pfam Name: Lipase_3 Pfam Description: Lipase (class 3)
  misc_feature (1)..(278): Homolog of NCBI NO: 34910484 NR Description: putative lipase [Oryza sativa (japonica
  misc_feature (1)..(279): Homolog of NCBI NO: 1527001 NR Description: Ipomoea nil Pn47p
  misc_feature (1)..(277): Homolog of NCBI NO: 21537306 NR Description: lipase-like protein [Arabidopsis thaliana]
  misc_feature (1)..(277): Homolog of NCBI NO: 15221426 NR Description: lipase (class 3) family [Arabidopsis thaliana]
  misc_feature (1)..(279): Homolog of NCBI NO: 34911842 NR Description: lipase-like protein [Oryza sativa (japonica
  misc_feature (1)..(279): Homolog of NCBI NO: 15233922 NR Description: lipase (class 3) family [Arabidopsis thaliana]
  misc_feature (1)..(279): Homolog of NCBI NO: 34911832 NR Description: lipase-like protein [Oryza sativa (japonica
  misc_feature (1)..(279): Homolog of NCBI NO: 34911830 NR Description: lipase-like protein [Oryza sativa (japonica
  misc_feature (89)..(281): Homolog of NCBI NO: 34911870 NR Description: lipase-like protein [Oryza sativa (japonica
  misc_feature (1)..(103): Homolog of NCBI NO: 34911870 NR Description: lipase-like protein [Oryza sativa (japonica
MGYVAVATDEGAAALGRRDIVVAWRGTVQNMEWVNDLDFAPVPAAPVLGSAASQHRLAVVHHGFLSMYTSSNKSSEFTKTSARDQVVKEVRRLVELYKDEEVSITICGHSLGASVATLNAVDLVSSGINKPEGSTKSFPVTAIVFASPHVGCRFFRSAFNSFPDLKALHVQNAGDVVPMYPPLGYVDVAVELTIRTIRSPYMRKPATVGTLHNLECYLHGVAGEQGSAGGFKLEVDRDIALVNKGADALTDEHPVPACWWVPRHKFMVKGEDGRWTLQDFKHI

SEQ ID NO: 62144 - DNA, 1321 bp, Triticum aestivum
  misc_feature (1)..(1321): Ceres Seq. ID no. 13596393
tcccccgggctscmggaattcgcaactttattgwgtttamcattacctagaacatcctaatcgaaaaaatatttgctccgcctctcgttctctcccccccccccgtctctctctctagcctctccattccgtgtggcgaccgagcgaaccctagccgagattagactaccatccccaatctaccggaggaggacgaggacgacgccgacgagatgctgagggttgcggggaggaggctctcgtcttccctctcctggcgccccgcggcgaccgtcggagccaggggcccgctcgccggcgccggcggccctgggagagacgacgacgacggttcggcctaccagcggcggttcgccatcgagtcccccttcttcaccgccgcgagaggcttttcttcggctgaaacacttgttccacggaaccaagatgctgggttggctgaactcccagccactgttgctgcactgaagaaccccaactcaaaaatcctttatgaccagtacaaccatgaaagatatcctcctggagatcccagcaagcgtgcctttgcctactttgttctgagtggtgggagattcgtatatgcatcactgctgcgtctccttgtcttgaagtttgtcttgagcatgtcagcaagtaaggatgttcttgcacttgcttcccttgaggttgatctatccagcattgaacccggcagcacagtgactgtcaagtggcgtggaaagccagtcttcatcaggcgacggacagacgatgacatcaagctggccaacagcgtggatgttgcatccctgcgccacccagagcaagacgctgagcgtgtgaagaacccagagtggctggtggttattggtgtctgcactcatcttggttgcattccccttcccaactctggagactttggtggctggttctgcccgtgccatggctcccactatgacatctctggcagaatccgcaagggccctgccccgtacaaccttgaggtgcccacctacagtttcttggaagataacaagatgctcataggctaagagcctaaaaccagtacctaccaacatatattctccacaggagtgaattcctgttgcgctgttattttgttttcaatgtggctaggagtttttgtttcaggactatcgcaacggtgatccactgttacctaccgaagttcatttgcagtgcgaaataattgtttctcctatgttgctactggattgtaagttttgtactgattttctgagaccctattggaaggatattgtacacctcttctggttcttgctccctatatatttgataaataagcaaacattcttcc

SEQ ID NO: 62145 - protein, 273 aa, Triticum aestivum
  peptide (1)..(273): Ceres Seq. ID no. 15221859
  misc_feature (173)..(269): Pfam Name: Rieske [2Fe-2S] domain Pfam Description: Rieske [2Fe-2S] domain
  misc_feature (1)..(273): Homolog of NCBI NO: 21553507 NR Description: ubiquinol--cytochrome-c reductase-like protein
  misc_feature (1)..(273): Homolog of NCBI NO: 18417067 NR Description: ubiquinol--cytochrome C reductase (cytochrome bc1 III (mitochondrial electron transport)/ Rieske iron-sulfur
  misc_feature (36)..(273): Homolog of NCBI NO: 1717949 NR Description: Ubiquinol-cytochrome C reductase iron-sulfur
  misc_feature (1)..(273): Homolog of NCBI NO: 1717951 NR Description: Ubiquinol-cytochrome C reductase iron-sulfur
  misc_feature (1)..(273): Homolog of NCBI NO: 1717953 NR Description: Ubiquinol-cytochrome C reductase iron-sulfur
  misc_feature (1)..(273): Homolog of NCBI NO: 1717950 NR Description: Ubiquinol-cytochrome C reductase iron-sulfur
  misc_feature (1)..(273): Homolog of NCBI NO: 586145 NR Description: Ubiquinol-cytochrome C reductase iron-sulfur
  misc_feature (1)..(273): Homolog of NCBI NO: 1076675 NR Description: ubiquinol-cytochrome-c reductase (EC 1.10.2.2)
  misc_feature (1)..(273): Homolog of NCBI NO: 38347166 NR Description: OSJNBa0039C07.12 [Oryza sativa (japonica
  misc_feature (1)..(273): Homolog of NCBI NO: 1717957 NR Description: Ubiquinol-cytochrome C reductase iron-sulfur
MLRVAGRRLSSSLSWRPAATVGARGPLAGAGGPGRDDDDGSAYQRRFAIESPFFTAARGFSSAETLVPRNQDAGLAELPATVAALKNPNSKILYDQYNHERYPPGDPSKRAFAYFVLSGGRFVYASLLRLLVLKFVLSMSASKDVLALASLEVDLSSIEPGSTVTVKWRGKPVFIRRRTDDDIKLANSVDVASLRHPEQDAERVKNPEWLVVIGVCTHLGCIPLPNSGDFGGWFCPCHGSHYDISGRIRKGPAPYNLEVPTYSFLEDNKMLIG

SEQ ID NO: 62146 - DNA, 697 bp, Triticum aestivum
  misc_feature (1)..(697): Ceres Seq. ID no. 12597207
attccgcctccacccccgaactccaaaccctagtagcgccgccgccgccaggtaagaggcgagatggtgtccggctccggcgtgtgcgccaagcgcgtggtggtggacgcccgccaccacatgctcggccgcctggcgtcgatcgtcgccaaggagctgctaaacgggcagcgtgtggtggtggtccgctgcgaggagatctgcatgtccggcggcctcgtccgccagaagatgaagtacctccgcttcctccgcaagaggatgaacaccaagccctcccacggncccatccacttccgcgcccccgccaagatcctctggcgcaccatccgcggtatgattccgcacaagaccgcgaggggcgaggccgcgctcgccaggctcaaggcgtacgagggcgtgccgccgccgtacgacaggaccaagcgaggcgagcaaggagtgaggcagggtcancggtggggcggggctccggtggcgagatcgccggcgggagcagctccggcggtcgagtgctntgcgagcaagcgtgggcggcgagggacttggtgcacacaacatgctcgataaaatgctcaaggagtgaagtgtactgcagtctactgacgggtggcccctttgtgttaacttaacgttgcagcagatgccgttagatatgggtgccacgtcagccctaacancgggctcagtntgtcat

SEQ ID NO: 62147 - protein, 209 aa, Triticum aestivum
  peptide (1)..(209): Ceres Seq. ID no. 12597208
  misc_feature (95)..(95): Xaa is any aa, unknown or other
  misc_feature (152)..(152): Xaa is any aa, unknown or other
  misc_feature (172)..(172): Xaa is any aa, unknown or other
SASTPELQTLVAPPPPGKRRDGVRLRRVRQARGGGRPPPHARPPGVDRRQGAAKRAACGGGPLRGDLHVRRPRPPEDEVPPLPPQEDEHQALPRXHPLPRPRQDPLAHHPRYDSAQDREGRGRARQAQGVRGRAAAVRQDQARRARSEAGSXVGRGSGGEIAGGSSSGGRVXCEQAWAARDLVHTTCSIKCSRSEVYCSLLTGGPFVLT

SEQ ID NO: 62148 - protein, 168 aa, Triticum aestivum
  peptide (1)..(168): Ceres Seq. ID no. 12597209
  misc_feature (11)..(122): Pfam Name: Ribosomal protein L13 Pfam Description: Ribosomal protein L13
  misc_feature (1)..(122): Homolog of NCBI NO: 15235617 NR Description: ribosomal protein L13a like protein
  misc_feature (1)..(122): Homolog of NCBI NO: 15239698 NR Description: 60S ribosomal protein L13a
  misc_feature (1)..(122): Homolog of NCBI NO: 19423912 NR Description: putative 60S ribosomal protein [Arabidopsis
  misc_feature (1)..(122): Homolog of NCBI NO: 15230197 NR Description: 60S ribosomal protein, putative
  misc_feature (1)..(122): Homolog of NCBI NO: 40748267 NR Description: 60S ribosomal protein L13a [Capsicum annuum]
  misc_feature (1)..(122): Homolog of NCBI NO: 6093869 NR Description: 60S RIBOSOMAL PROTEIN L13A
  misc_feature (1)..(122): Homolog of NCBI NO: 34899414 NR Description: putative 60S ribosomal protein
  misc_feature (1)..(122): Homolog of NCBI NO: 33146452 NR Description: putative 60S ribosomal protein
  misc_feature (1)..(122): Homolog of NCBI NO: 21326116 NR Description: putative 60S ribosomal protein [Sorghum bicolor]
  misc_feature (1)..(122): Homolog of NCBI NO: 37718812 NR Description: putative ribosomal protein L13a
  misc_feature (74)..(74): Xaa is any aa, unknown or other
  misc_feature (131)..(131): Xaa is any aa, unknown or other
  misc_feature (152)..(152): Xaa is any aa, unknown or other
MVSGSGVCAKRVVVDARHHMLGRLASIVAKELLNGQRVVVVRCEEICMSGGLVRQKMKYLRFLRKRMNTKPSHXPIHFRAPAKILWRTIRGMIPHKTARGEAALARLKAYEGVPPPYDRTKRGEQGVRQGXRWGGAPVARSPAGAAPAVECXASKRGRRGTWCTQHAR

SEQ ID NO: 62149 - protein, 149 aa, Triticum aestivum
  peptide (1)..(149): Ceres Seq. ID no. 12597210
  misc_feature (1)..(103): Pfam Name: Ribosomal protein L13 Pfam Description: Ribosomal protein L13
  misc_feature (1)..(103): Homolog of NCBI NO: 15235617 NR Description: ribosomal protein L13a like protein
  misc_feature (1)..(103): Homolog of NCBI NO: 15239698 NR Description: 60S ribosomal protein L13a
  misc_feature (1)..(103): Homolog of NCBI NO: 19423912 NR Description: putative 60S ribosomal protein [Arabidopsis
  misc_feature (1)..(103): Homolog of NCBI NO: 15230197 NR Description: 60S ribosomal protein, putative
  misc_feature (1)..(103): Homolog of NCBI NO: 40748267 NR Description: 60S ribosomal protein L13a [Capsicum annuum]
  misc_feature (1)..(103): Homolog of NCBI NO: 6093869 NR Description: 60S RIBOSOMAL PROTEIN L13A
  misc_feature (1)..(103): Homolog of NCBI NO: 34899414 NR Description: putative 60S ribosomal protein
  misc_feature (1)..(103): Homolog of NCBI NO: 33146452 NR Description: putative 60S ribosomal protein
  misc_feature (1)..(103): Homolog of NCBI NO: 21326116 NR Description: putative 60S ribosomal protein [Sorghum bicolor]
  misc_feature (1)..(103): Homolog of NCBI NO: 37718812 NR Description: putative ribosomal protein L13a
  misc_feature (55)..(55): Xaa is any aa, unknown or other
  misc_feature (112)..(112): Xaa is any aa, unknown or other
  misc_feature (133)..(133): Xaa is any aa, unknown or other
MLGRLASIVAKELLNGQRVVVVRCEEICMSGGLVRQKMKYLRFLRKRMNTKPSHXPIHFRAPAKILWRTIRGMIPHKTARGEAALARLKAYEGVPPPYDRTKRGEQGVRQGXRWGGAPVARSPAGAAPAVECXASKRGRRGTWCTQHAR

SEQ ID NO: 62150 - DNA, 1496 bp, Triticum aestivum
  misc_feature (1)..(1496): Ceres Seq. ID no. 15226198
gactttctcgcccgaccgctccttttgcgccgccgccaccgccgcatccgcgaaaacctcgcccccactcccgccgccgtctccgccgcagctccggacccctagaatccgagcggcgatggcctcctccatactctccgactgctcctcctgcgccacctcccgcctcctccccctccgccgcgccctccacccgccgccgccccgcttccgcccctcccccgccccggcgccgttgccgaggaggcctctcctcgccgccgccgcctcgctcccgctcctcccccgcgcgcgccgcatggccgcgctcgccgccgcctcttccgccgactcagccactgttttggctgatgcatctgccaagatcatcgacggcaagctggtggcaaagcaaataagggaggaggtcggcgttgagatcgccaggatgaaggacacgatcggagtggtgcctgggctggcggtcatcctagtcggctcgaggaaggattcccagacatacgtgcggaacaagaagaaggcgtgcgatgcggtcggtatcaagtcgtatgaggttaatttgccagaggacgcttccgagtacgaggtcatcaagcacatagcaaccttcaacgatgatccgtcggtgcatggcatcttggttcagctgcccttacctcgccatatgaacgacgagaacatattgaatgctgttagtattgaaaaggacgttgatggctttcatccagtgaacattggacgacttgcaatgcaaggtcgggatccattctttgttccatgcacccctaaaggatgcatggagctgctacacagatctggagttgaaataaaagggaagagagctgttgtaattggaaggagcaatattgtggggacgcctgctgctttactcttacaaaaagcaaatgcaacagtgagtattgtacattcaaaaaccaagaaccccgaggaaataacaagacaagcagatattataatcgcggctgttggagttgctaacctggtcagagggagttggataaagcctggagctgctattattgatgttggcatcaatccggttgatgatccagcaagccctcgaggttaccggctagttggagatgtctgctttgaggaggcctccaaggttgcaggagccatcacaccagttcccggcggtgtcgggccaatgacaattgcgatgcttctgtcgaacacactggattcagctaaaagaatccacaagttcaagtaaccggacaaccctgtactcagaacttgggagagcgcttaacctttggtttagtctaccaggcaaggtattgccaactgtttgatgcgccttttgttggaccagaaaaggtcaacaagagccgtgaaataaatttttgacaggggtgagaaatttaccccggcttcaaactgtaccgtattcgctaatgttccatgaaatcccagttcaatctgtggcacaacttaggtcaattgagatctcagttaagcttggacgaacc

SEQ ID NO: 62151 - protein, 411 aa, Triticum aestivum
  peptide (1)..(411): Ceres Seq. ID no. 15226199
  misc_feature (240)..(393): Pfam Name: Tetrahydrofolate dehydrogenase/cyclohydrolase, Pfam Description: Tetrahydrofolate dehydrogenase/cyclohydrolase,
  misc_feature (234)..(393): Homolog of NCBI NO: 17017267 NR Description: methylenetetrahydrofolate
  misc_feature (120)..(406): Homolog of NCBI NO: 9992889 NR Description: C1-THFS protein [Yarrowia lipolytica]
  misc_feature (189)..(411): Homolog of NCBI NO: 15236884 NR Description: tetrahydrofolate dehydrogenase/cyclohydrolase,
  misc_feature (122)..(407): Homolog of NCBI NO: 30687594 NR Description: tetrahydrofolate dehydrogenase/cyclohydrolase,
  misc_feature (122)..(407): Homolog of NCBI NO: 25284864 NR Description: methylenetetrahydrofolate dehydrogenase
  misc_feature (120)..(406): Homolog of NCBI NO: 12083525 NR Description: similar to Pisum sativum
  misc_feature (120)..(406): Homolog of NCBI NO: 11252953 NR Description: methylenetetrahydrofolate dehydrogenase (NADP)
  misc_feature (116)..(407): Homolog of NCBI NO: 15230449 NR Description: tetrahydrofolate dehydrogenase/cyclohydrolase,
  misc_feature (116)..(407): Homolog of NCBI NO: 21553669 NR Description: 5,10-methylenetetrahydrofolate
  misc_feature (40)..(411): Homolog of NCBI NO: 15236888 NR Description: tetrahydrofolate dehydrogenase/cyclohydrolase,
TFSPDRSFCAAATAASAKTSPPLPPPSPPQLRTPRIRAAMASSILSDCSSCATSRLLPLRRALHPPPPRFRPSPAPAPLPRRPLLAAAASLPLLPRARRMAALAAASSADSATVLADASAKIIDGKLVAKQIREEVGVEIARMKDTIGVVPGLAVILVGSRKDSQTYVRNKKKACDAVGIKSYEVNLPEDASEYEVIKHIATFNDDPSVHGILVQLPLPRHMNDENILNAVSIEKDVDGFHPVNIGRLAMQGRDPFFVPCTPKGCMELLHRSGVEIKGKRAVVIGRSNIVGTPAALLLQKANATVSIVHSKTKNPEEITRQADIIIAAVGVANLVRGSWIKPGAAIIDVGINPVDDPASPRGYRLVGDVCFEEASKVAGAITPVPGGVGPMTIAMLLSNTLDSAKRIHKFK

SEQ ID NO: 62152 - protein, 372 aa, Triticum aestivum
  peptide (1)..(372): Ceres Seq. ID no. 15226200
  misc_feature (201)..(354): Pfam Name: Tetrahydrofolate dehydrogenase/cyclohydrolase, Pfam Description: Tetrahydrofolate dehydrogenase/cyclohydrolase,
  misc_feature (195)..(354): Homolog of NCBI NO: 17017267 NR Description: methylenetetrahydrofolate
  misc_feature (81)..(367): Homolog of NCBI NO: 9992889 NR Description: C1-THFS protein [Yarrowia lipolytica]
  misc_feature (150)..(372): Homolog of NCBI NO: 15236884 NR Description: tetrahydrofolate dehydrogenase/cyclohydrolase,
  misc_feature (83)..(368): Homolog of NCBI NO: 30687594 NR Description: tetrahydrofolate dehydrogenase/cyclohydrolase,
  misc_feature (83)..(368): Homolog of NCBI NO: 25284864 NR Description: methylenetetrahydrofolate dehydrogenase
  misc_feature (81)..(367): Homolog of NCBI NO: 12083525 NR Description: similar to Pisum sativum
  misc_feature (81)..(367): Homolog of NCBI NO: 11252953 NR Description: methylenetetrahydrofolate dehydrogenase (NADP)
  misc_feature (77)..(368): Homolog of NCBI NO: 15230449 NR Description: tetrahydrofolate dehydrogenase/cyclohydrolase,
  misc_feature (77)..(368): Homolog of NCBI NO: 21553669 NR Description: 5,10-methylenetetrahydrofolate
  misc_feature (1)..(372): Homolog of NCBI NO: 15236888 NR Description: tetrahydrofolate dehydrogenase/cyclohydrolase,
MASSILSDCSSCATSRLLPLRRALHPPPPRFRPSPAPAPLPRRPLLAAAASLPLLPRARRMAALAAASSADSATVLADASAKIIDGKLVAKQIREEVGVEIARMKDTIGVVPGLAVILVGSRKDSQTYVRNKKKACDAVGIKSYEVNLPEDASEYEVIKHIATFNDDPSVHGILVQLPLPRHMNDENILNAVSIEKDVDGFHPVNIGRLAMQGRDPFFVPCTPKGCMELLHRSGVEIKGKRAVVIGRSNIVGTPAALLLQKANATVSIVHSKTKNPEEITRQADIIIAAVGVANLVRGSWIKPGAAIIDVGINPVDDPASPRGYRLVGDVCFEEASKVAGAITPVPGGVGPMTIAMLLSNTLDSAKRIHKFK

SEQ ID NO: 62153 - protein, 312 aa, Triticum aestivum
  peptide (1)..(312): Ceres Seq. ID no. 15226201
  misc_feature (141)..(294): Pfam Name: Tetrahydrofolate dehydrogenase/cyclohydrolase, Pfam Description: Tetrahydrofolate dehydrogenase/cyclohydrolase,
  misc_feature (135)..(294): Homolog of NCBI NO: 17017267 NR Description: methylenetetrahydrofolate
  misc_feature (21)..(307): Homolog of NCBI NO: 9992889 NR Description: C1-THFS protein [Yarrowia lipolytica]
  misc_feature (90)..(312): Homolog of NCBI NO: 15236884 NR Description: tetrahydrofolate dehydrogenase/cyclohydrolase,
  misc_feature (23)..(308): Homolog of NCBI NO: 30687594 NR Description: tetrahydrofolate dehydrogenase/cyclohydrolase,
  misc_feature (23)..(308): Homolog of NCBI NO: 25284864 NR Description: methylenetetrahydrofolate dehydrogenase
  misc_feature (21)..(307): Homolog of NCBI NO: 12083525 NR Description: similar to Pisum sativum
  misc_feature (21)..(307): Homolog of NCBI NO: 11252953 NR Description: methylenetetrahydrofolate dehydrogenase (NADP)
  misc_feature (17)..(308): Homolog of NCBI NO: 15230449 NR Description: tetrahydrofolate dehydrogenase/cyclohydrolase,
  misc_feature (17)..(308): Homolog of NCBI NO: 21553669 NR Description: 5,10-methylenetetrahydrofolate
  misc_feature (1)..(312): Homolog of NCBI NO: 15236888 NR Description: tetrahydrofolate dehydrogenase/cyclohydrolase,
MAALAAASSADSATVLADASAKIIDGKLVAKQIREEVGVEIARMKDTIGVVPGLAVILVGSRKDSQTYVRNKKKACDAVGIKSYEVNLPEDASEYEVIKHIATFNDDPSVHGILVQLPLPRHMNDENILNAVSIEKDVDGFHPVNIGRLAMQGRDPFFVPCTPKGCMELLHRSGVEIKGKRAVVIGRSNIVGTPAALLLQKANATVSIVHSKTKNPEEITRQADIIIAAVGVANLVRGSWIKPGAAIIDVGINPVDDPASPRGYRLVGDVCFEEASKVAGAITPVPGGVGPMTIAMLLSNTLDSAKRIHKFK

SEQ ID NO: 62154 - DNA, 1347 bp, Triticum aestivum
  misc_feature (1)..(1347): Ceres Seq. ID no. 14302247
gacaccgtgactgactcggccgtacggtatcgattcccgccggaaaaggaatcagcggcgagcgccatcgacggaagcaagtcattaggtatctagctagctcctttaagagagaaaaaaaaggagttatctagcttgctacttctaggcggaggttgagatggttcaggccggattggctcagccggccccgagcacgggggcgccggcgatggcggcagcggcggtgcacgtcgcgctcaagatcccctccggcggggggccgtatgcacgggccaagcactaccagctagtggagaaggacttggacgcttcgatcgcgtggttttggaaggcgatcgagacgggggacaaggtggacagcgcgctcaaggacatggcggtggtgatgaagcagcgcggttacctggacgacgccgtggacgccatccggtcgctgcgccacctctgcccggggaagcagtcgcaggagtccctggacaacatcctgctcgacctctacaaggccagcgggcgcaccaaggaggagatcgagctgctcaagcacaagctccgccggatctaccacggccaggccttccccgccggcaaggccaccaagcgcgcccgctcccacggccgcaagatccacgtctccgtccagcaggagacgtcccgggtgctgggcaacctcgcgtgggcctacatgcagcagcgcaacttcatggcggccgaggccgtgtaccgcaaggcgcagatggtggagcccgacgccaacaaggcctgcaacctcgcgctgtgcctcatggagcaggggcggctaggggacgccgagggggtgctcgccgacgtggtcgccggcgcgttccgcgacgggagggagagggagcacggcggcgggaaggtcgtgaggaaggcggaggagctgctggagcggatcagggcggagacgggcggcggcgagaaggaggccggggaggaggacggcgtcgaggccgacgagatggcggagctactggacatggtggccaggcagtgggccgcgccgtacaggaagagccaccggaggctgcccgtgttcgaggagatcacaccgttcggcagggagcagatggcttgctagctctagaagctcatgagaactcaatagaagctgtgagtgtgcagtagcttcaccagaatattgtgaagctcgtgagaactcaatagaagttgtgtgtgtgtgtgcagtactgcagtagcttgatcagaatggtgtgaagcgtacgtgttaatcaatgtgacatatgttctatgttggtgctcatgtatgtagatgtgttgcatgtgcagtgtacaagttctttttggcggtttcatgtgtacaac

SEQ ID NO: 62155 - protein, 313 aa, Triticum aestivum
  peptide (1)..(313): Ceres Seq. ID no. 14302248
  misc_feature (165)..(198): Pfam Name: TPR Domain Pfam Description: TPR Domain
  misc_feature (29)..(224): Homolog of NCBI NO: 29467532 NR Description: P0582D05.25 [Oryza sativa (japonica
  misc_feature (24)..(264): Homolog of NCBI NO: 15233432 NR Description: male sterility MS5/pollenless 3 [Arabidopsis
  misc_feature (24)..(264): Homolog of NCBI NO: 4028970 NR Description: pollenless3 [Arabidopsis thaliana]
  misc_feature (24)..(264): Homolog of NCBI NO: 3859112 NR Description: male sterility MS5 [Arabidopsis thaliana]
  misc_feature (9)..(262): Homolog of NCBI NO: 15230439 NR Description: male sterility MS5, putative [Arabidopsis
  misc_feature (24)..(313): Homolog of NCBI NO: 30695554 NR Description: male sterility MS5 family [Arabidopsis thaliana]
  misc_feature (24)..(313): Homolog of NCBI NO: 9758884 NR Description: gb|AAC72543.1~gene_id:K24G6.19~similar to unknown
  misc_feature (19)..(313): Homolog of NCBI NO: 30678993 NR Description: male sterility MS5 family [Arabidopsis thaliana]
  misc_feature (19)..(313): Homolog of NCBI NO: 25406811 NR Description: hypothetical protein [imported] - Arabidopsis
  misc_feature (24)..(313): Homolog of NCBI NO: 3859116 NR Description: unknown [Oryza sativa]
MVQAGLAQPAPSTGAPAMAAAAVHVALKIPSGGGPYARAKHYQLVEKDLDASIAWFWKAIETGDKVDSALKDMAVVMKQRGYLDDAVDAIRSLRHLCPGKQSQESLDNILLDLYKASGRTKEEIELLKHKLRRIYHGQAFPAGKATKRARSHGRKIHVSVQQETSRVLGNLAWAYMQQRNFMAAEAVYRKAQMVEPDANKACNLALCLMEQGRLGDAEGVLADVVAGAFRDGREREHGGGKVVRKAEELLERIRAETGGGEKEAGEEDGVEADEMAELLDMVARQWAAPYRKSHRRLPVFEEITPFGREQMAC

SEQ ID NO: 62156 - protein, 296 aa, Triticum aestivum
  peptide (1)..(296): Ceres Seq. ID no. 14302249
  misc_feature (148)..(181): Pfam Name: TPR Domain Pfam Description: TPR Domain
  misc_feature (12)..(207): Homolog of NCBI NO: 29467532 NR Description: P0582D05.25 [Oryza sativa (japonica
  misc_feature (7)..(247): Homolog of NCBI NO: 15233432 NR Description: male sterility MS5/pollenless 3 [Arabidopsis
  misc_feature (7)..(247): Homolog of NCBI NO: 4028970 NR Description: pollenless3 [Arabidopsis thaliana]
  misc_feature (7)..(247): Homolog of NCBI NO: 3859112 NR Description: male sterility MS5 [Arabidopsis thaliana]
  misc_feature (1)..(245): Homolog of NCBI NO: 15230439 NR Description: male sterility MS5, putative [Arabidopsis
  misc_feature (7)..(296): Homolog of NCBI NO: 30695554 NR Description: male sterility MS5 family [Arabidopsis thaliana]
  misc_feature (7)..(296): Homolog of NCBI NO: 9758884 NR Description: gb|AAC72543.1~gene_id:K24G6.19~similar to unknown
  misc_feature (2)..(296): Homolog of NCBI NO: 30678993 NR Description: male sterility MS5 family [Arabidopsis thaliana]
  misc_feature (2)..(296): Homolog of NCBI NO: 25406811 NR Description: hypothetical protein [imported] - Arabidopsis
  misc_feature (7)..(296): Homolog of NCBI NO: 3859116 NR Description: unknown [Oryza sativa]
MAAAAVHVALKIPSGGGPYARAKHYQLVEKDLDASIAWFWKAIETGDKVDSALKDMAVVMKQRGYLDDAVDAIRSLRHLCPGKQSQESLDNILLDLYKASGRTKEEIELLKHKLRRIYHGQAFPAGKATKRARSHGRKIHVSVQQETSRVLGNLAWAYMQQRNFMAAEAVYRKAQMVEPDANKACNLALCLMEQGRLGDAEGVLADVVAGAFRDGREREHGGGKVVRKAEELLERIRAETGGGEKEAGEEDGVEADEMAELLDMVARQWAAPYRKSHRRLPVFEEITPFGREQMAC

SEQ ID NO: 62157 - protein, 241 aa, Triticum aestivum
  peptide (1)..(241): Ceres Seq. ID no. 14302250
  misc_feature (93)..(126): Pfam Name: TPR Domain Pfam Description: TPR Domain
  misc_feature (1)..(152): Homolog of NCBI NO: 29467532 NR Description: P0582D05.25 [Oryza sativa (japonica
  misc_feature (1)..(192): Homolog of NCBI NO: 15233432 NR Description: male sterility MS5/pollenless 3 [Arabidopsis
  misc_feature (1)..(192): Homolog of NCBI NO: 4028970 NR Description: pollenless3 [Arabidopsis thaliana]
  misc_feature (1)..(192): Homolog of NCBI NO: 3859112 NR Description: male sterility MS5 [Arabidopsis thaliana]
  misc_feature (1)..(190): Homolog of NCBI NO: 15230439 NR Description: male sterility MS5, putative [Arabidopsis
  misc_feature (1)..(241): Homolog of NCBI NO: 30695554 NR Description: male sterility MS5 family [Arabidopsis thaliana]
  misc_feature (1)..(241): Homolog of NCBI NO: 9758884 NR Description: gb|AAC72543.1~gene_id:K24G6.19~similar to unknown
  misc_feature (1)..(241): Homolog of NCBI NO: 30678993 NR Description: male sterility MS5 family [Arabidopsis thaliana]
  misc_feature (1)..(241): Homolog of NCBI NO: 25406811 NR Description: hypothetical protein [imported] - Arabidopsis
  misc_feature (1)..(241): Homolog of NCBI NO: 3859116 NR Description: unknown [Oryza sativa]
MAVVMKQRGYLDDAVDAIRSLRHLCPGKQSQESLDNILLDLYKASGRTKEEIELLKHKLRRIYHGQAFPAGKATKRARSHGRKIHVSVQQETSRVLGNLAWAYMQQRNFMAAEAVYRKAQMVEPDANKACNLALCLMEQGRLGDAEGVLADVVAGAFRDGREREHGGGKVVRKAEELLERIRAETGGGEKEAGEEDGVEADEMAELLDMVARQWAAPYRKSHRRLPVFEEITPFGREQMAC

SEQ ID NO: 62158 - DNA, 1570 bp, Triticum aestivum
  misc_feature (1)..(1570): Ceres Seq. ID no. 13596470
ttacctagaacatcctaatctaaaaatggaaagcacgcaccggaagcatcttagaagaagaagagccagcaacaaggaacgatatccgtctgtgttggacgcgccaagacgatcgaggcatgcctgctgccgtctctgggtgcctcttggcgaggagcatggcgagccaccacaaacaccagcagcggggagcggcggcgacggcgccgggggcactgccggtgatcaacattggccggctcggcgacaaggaccccgccgcgcgggcgctcgtggtccaggacatcgcccgggcgtgccgcgaccgggggtgcttccaggtggtaaaccacggcgtcagcaagtcggccatggacggcgccctggaggccgcctcggagttcttcgacatgcccgcggagcgcaaggcggcgttcgcctgcgccgacatccgcagcccggtccggtacgacaccagctccaaggacggcatcagcaaggccaggtctttcctcaagcactacgccaatcccctcgaccactgggtcgactcctggccaacccaaccagcaacatacaggaagaagatggggacgtacgcggtggagatacataaactgtcaatgcagctcacaggggccatcgtgcaggggctggggctatgcccaatgcacctgcaggagaagctcggagcagggatgcagttcatggggctcaacaactacccgcaggggtcgtcccgggcgggcgacacggtcgggctggcgccgcactccgacattggcttcatcaccatcctgctgcagagctcgccggggctcgaggtgacgcaccacgacgacggcggcgtctggacgcccgtcccggccatcccgggggcgctccacgtcgacctcggcgaccacctggaggtgctgagcaacgggcggctcaggtccctcctgcaccgggccatcctcaacaccgacgaggcgaggatctccatcgccagcatccacggcgcggccatggacgagaaggtcgggtgcgccgaggagctcgtcgacgagcgccacccgaggatgtacagggagagcagcttccatgacttcctcgacttcctgcccaccaacgtcaaggcgtaccggaggttcgtcgagaccctcaagatcgacagcgcttaattccttctgctgcattaagacacacttagctgaatgagacactgcacataagtgtccatttagttgtgtagtcttactgctagctgaagaacaaaattacggtttaattatgcctccattatcaagtagtatctcagtacgaataagggagtatggtatcagcagctggataggcgtgtgattagcagggtgccttttttttcactccatttctttctttggggaaatgcagtatgtctgcatgtctcttccatcaaaaggaggatcaaaggaaccttgccaagttcttccggttctttggtagtacctacatacaccatgtgttgatcagtgcagtcctatatgtgtatcagttgatttcacctatagaaatttactttctcatgggatatattgcgcaacgatatattaaatacaatttactgttt

SEQ ID NO: 62159 - protein, 340 aa, Triticum aestivum
  peptide (1)..(340): Ceres Seq. ID no. 13596471
  misc_feature (186)..(286): Pfam Name: 2OG-Fe(II) oxygenase superfamily Pfam Description: 2OG-Fe(II) oxygenase superfamily
  misc_feature (10)..(317): Homolog of NCBI NO: 38345872 NR Description: OSJNBa0064M23.14 [Oryza sativa (japonica
  misc_feature (24)..(321): Homolog of NCBI NO: 21327037 NR Description: putative flavanone 3-hydroxylase [Saussurea
  misc_feature (32)..(319): Homolog of NCBI NO: 15235126 NR Description: oxidoreductase, 2OG-Fe(II) oxygenase family
  misc_feature (28)..(319): Homolog of NCBI NO: 15235124 NR Description: oxidoreductase, 2OG-Fe(II) oxygenase family
  misc_feature (31)..(319): Homolog of NCBI NO: 38345873 NR Description: OSJNBa0064M23.15 [Oryza sativa (japonica
  misc_feature (35)..(317): Homolog of NCBI NO: 37536444 NR Description: unknown protein [Oryza sativa (japonica
  misc_feature (40)..(337): Homolog of NCBI NO: 15228020 NR Description: oxidoreductase, 2OG-Fe(II) oxygenase family
  misc_feature (68)..(337): Homolog of NCBI NO: 15240797 NR Description: oxidoreductase, 2OG-Fe(II) oxygenase family
  misc_feature (28)..(340): Homolog of NCBI NO: 30689834 NR Description: flavonol synthase family [Arabidopsis thaliana]
  misc_feature (28)..(340): Homolog of NCBI NO: 7433240 NR Description: probable flavonol synthase [imported] -
MPAAVSGCLLARSMASHHKHQQRGAAATAPGALPVINIGRLGDKDPAARALVVQDIARACRDRGCFQVVNHGVSKSAMDGALEAASEFFDMPAERKAAFACADIRSPVRYDTSSKDGISKARSFLKHYANPLDHWVDSWPTQPATYRKKMGTYAVEIHKLSMQLTGAIVQGLGLCPMHLQEKLGAGMQFMGLNNYPQGSSRAGDTVGLAPHSDIGFITILLQSSPGLEVTHHDDGGVWTPVPAIPGALHVDLGDHLEVLSNGRLRSLLHRAILNTDEARISIASIHGAAMDEKVGCAEELVDERHPRMYRESSFHDFLDFLPTNVKAYRRFVETLKIDSA

SEQ ID NO: 62160 - protein, 327 aa, Triticum aestivum
  peptide (1)..(327): Ceres Seq. ID no. 13596472
  misc_feature (173)..(273): Pfam Name: 2OG-Fe(II) oxygenase superfamily Pfam Description: 2OG-Fe(II) oxygenase superfamily
  misc_feature (1)..(304): Homolog of NCBI NO: 38345872 NR Description: OSJNBa0064M23.14 [Oryza sativa (japonica
  misc_feature (11)..(308): Homolog of NCBI NO: 21327037 NR Description: putative flavanone 3-hydroxylase [Saussurea
  misc_feature (19)..(306): Homolog of NCBI NO: 15235126 NR Description: oxidoreductase, 2OG-Fe(II) oxygenase family
  misc_feature (15)..(306): Homolog of NCBI NO: 15235124 NR Description: oxidoreductase, 2OG-Fe(II) oxygenase family
  misc_feature (18)..(306): Homolog of NCBI NO: 38345873 NR Description: OSJNBa0064M23.15 [Oryza sativa (japonica
  misc_feature (22)..(304): Homolog of NCBI NO: 37536444 NR Description: unknown protein [Oryza sativa (japonica
  misc_feature (27)..(324): Homolog of NCBI NO: 15228020 NR Description: oxidoreductase, 2OG-Fe(II) oxygenase family
  misc_feature (55)..(324): Homolog of NCBI NO: 15240797 NR Description: oxidoreductase, 2OG-Fe(II) oxygenase family
  misc_feature (15)..(327): Homolog of NCBI NO: 30689834 NR Description: flavonol synthase family [Arabidopsis thaliana]
  misc_feature (15)..(327): Homolog of NCBI NO: 7433240 NR Description: probable flavonol synthase [imported] -
MASHHKHQQRGAAATAPGALPVINIGRLGDKDPAARALVVQDIARACRDRGCFQVVNHGVSKSAMDGALEAASEFFDMPAERKAAFACADIRSPVRYDTSSKDGISKARSFLKHYANPLDHWVDSWPTQPATYRKKMGTYAVEIHKLSMQLTGAIVQGLGLCPMHLQEKLGAGMQFMGLNNYPQGSSRAGDTVGLAPHSDIGFITILLQSSPGLEVTHHDDGGVWTPVPAIPGALHVDLGDHLEVLSNGRLRSLLHRAILNTDEARISIASIHGAAMDEKVGCAEELVDERHPRMYRESSFHDFLDFLPTNVKAYRRFVETLKIDSA

SEQ ID NO: 62161 - protein, 263 aa, Triticum aestivum
  peptide (1)..(263): Ceres Seq. ID no. 13596473
  misc_feature (109)..(209): Pfam Name: 2OG-Fe(II) oxygenase superfamily Pfam Description: 2OG-Fe(II) oxygenase superfamily
  misc_feature (1)..(240): Homolog of NCBI NO: 38345872 NR Description: OSJNBa0064M23.14 [Oryza sativa (japonica
  misc_feature (1)..(244): Homolog of NCBI NO: 21327037 NR Description: putative flavanone 3-hydroxylase [Saussurea
  misc_feature (1)..(242): Homolog of NCBI NO: 15235126 NR Description: oxidoreductase, 2OG-Fe(II) oxygenase family
  misc_feature (1)..(242): Homolog of NCBI NO: 15235124 NR Description: oxidoreductase, 2OG-Fe(II) oxygenase family
  misc_feature (1)..(242): Homolog of NCBI NO: 38345873 NR Description: OSJNBa0064M23.15 [Oryza sativa (japonica
  misc_feature (1)..(240): Homolog of NCBI NO: 37536444 NR Description: unknown protein [Oryza sativa (japonica
  misc_feature (1)..(260): Homolog of NCBI NO: 15228020 NR Description: oxidoreductase, 2OG-Fe(II) oxygenase family
  misc_feature (1)..(260): Homolog of NCBI NO: 15240797 NR Description: oxidoreductase, 2OG-Fe(II) oxygenase family
  misc_feature (1)..(263): Homolog of NCBI NO: 30689834 NR Description: flavonol synthase family [Arabidopsis thaliana]
  misc_feature (1)..(263): Homolog of NCBI NO: 7433240 NR Description: probable flavonol synthase [imported] -
MDGALEAASEFFDMPAERKAAFACADIRSPVRYDTSSKDGISKARSFLKHYANPLDHWVDSWPTQPATYRKKMGTYAVEIHKLSMQLTGAIVQGLGLCPMHLQEKLGAGMQFMGLNNYPQGSSRAGDTVGLAPHSDIGFITILLQSSPGLEVTHHDDGGVWTPVPAIPGALHVDLGDHLEVLSNGRLRSLLHRAILNTDEARISIASIHGAAMDEKVGCAEELVDERHPRMYRESSFHDFLDFLPTNVKAYRRFVETLKIDSA

SEQ ID NO: 62162 - DNA, 1525 bp, Triticum aestivum
  misc_feature (1)..(1525): Ceres Seq. ID no. 13662324
ttttcctccgcgtagccttcccaccatattccagttcggcaagctcgccagtcaccaagctcctcctcctccacaggaaagcaacagcgcagcgcggcttcactggtttcgccctcaattcgagagctagtcttggaaggccttccatggctcagccgtcgctgctcctcggctctccggcatcgattgtcctccttatcaccttcttccaaggaccggtagtgagcgccatcacgttcaccttcgccaaccggtgcacggacacggtgtggcccgggttgctctcgggctccacctcgccgccgctggagaccaccggcttcgcgctctcgccgggccagtcgcgctcaatctacgggccgaccgggtggtcgggccgcttctgggcgcgctctggctgtaatttcaacggcggcaagggcacctgcgtcacgggggactgcggctccggcgagatagagtgccgcggcgccggggccaccccgcccgccacgctcgcggagttcaccctcgacggcgacggcgggaaggacttctatgacgtcagcctcgtcgacggctacaacttgcccatgctcgtgcagccgtccgtgcctgggtgccccgacaccgggtgcctcgtcgacctcaacgagcgctgcccctccgagctccgctccggcggcggcctcgcctgccgcagcgcctgcgaggccttcggcaagcccgagttctgctgcaacggcgcctacgggaaccctgacacgtgccacccctcccagtactcgcagctcttcaagtcggcgtgccccaagtcctacagctacgcctacgacgacgccacctccaccttcacctgcaaccacaccgattacaccattaccttctgcccgcagtccaatccttacagtggcaaaccgaacaagcacgcattgcggaggccgagccatgagcagcttgaggacgacgtgtggctggcatctttgaagaaaaccagcggcgccggtggaagcagcatggcatcatggtcggcgtccggaggtttccaagccgccctggcaattgctgtggccgtcgtgcttgccgcggcacaggggggtcatccccgtttcagcttgttatgaccgggcaaggcaggcgattcttcatccctaggagtgatctgcagagggtttttttaggataaaaaaggaggatcagagcactagaggaagagacgtggatatcatgttctttaggcctttttgcttgttgataaagaacatgacgcgtcctcatgttggcaattgtagttgttctagtagtggcatttcatattgctttattgcctttttgaaaacattgttcttctggttgtattcatctttctgcgcaatttttttgtggggatcctgatcagtgcatcgtcactaggagatcgcaagctttgaagtgggaagactgtaagatctgaatatactattgctctgccttctgagctccttttttttgtaaaaatctgaaatgccttcttaaaaaaaaaaaaaaaaaagcttatcgataccgt

SEQ ID NO: 62163 - protein, 366 aa, Triticum aestivum
  peptide (1)..(366): Ceres Seq. ID no. 13662325
  misc_feature (83)..(290): Pfam Name: Thaumatin family Pfam Description: Thaumatin family
  misc_feature (59)..(293): Homolog of NCBI NO: 15222875 NR Description: thaumatin family [Arabidopsis thaliana]
  misc_feature (78)..(349): Homolog of NCBI NO: 30686652 NR Description: thaumatin family [Arabidopsis thaliana]
  misc_feature (68)..(349): Homolog of NCBI NO: 25296204 NR Description: hypothetical protein T20H2.19 [imported] -
  misc_feature (62)..(294): Homolog of NCBI NO: 15233437 NR Description: thaumatin family [Arabidopsis thaliana]
  misc_feature (78)..(292): Homolog of NCBI NO: 18420282 NR Description: thaumatin-like protein, putative [Arabidopsis
  misc_feature (78)..(292): Homolog of NCBI NO: 7442168 NR Description: pathogenesis-related protein F20M13.220 -
  misc_feature (78)..(292): Homolog of NCBI NO: 21592749 NR Description: putative thaumatin-like protein [Arabidopsis
  misc_feature (62)..(290): Homolog of NCBI NO: 2262099 NR Description: thaumatin isolog [Arabidopsis thaliana]
  misc_feature (62)..(290): Homolog of NCBI NO: 15233738 NR Description: thaumatin family [Arabidopsis thaliana]
  misc_feature (76)..(356): Homolog of NCBI NO: 37531042 NR Description: putative thaumatin-like protein
FLRVAFPPYSSSASSPVTKLLLLHRKATAQRGFTGFALNSRASLGRPSMAQPSLLLGSPASIVLLITFFQGPVVSAITFTFANRCTDTVWPGLLSGSTSPPLETTGFALSPGQSRSIYGPTGWSGRFWARSGCNFNGGKGTCVTGDCGSGEIECRGAGATPPATLAEFTLDGDGGKDFYDVSLVDGYNLPMLVQPSVPGCPDTGCLVDLNERCPSELRSGGGLACRSACEAFGKPEFCCNGAYGNPDTCHPSQYSQLFKSACPKSYSYAYDDATSTFTCNHTDYTITFCPQSNPYSGKPNKHALRRPSHEQLEDDVWLASLKKTSGAGGSSMASWSASGGFQAALAIAVAVVLAAAQGGHPRFSLL

SEQ ID NO: 62164 - protein, 318 aa, Triticum aestivum
  peptide (1)..(318): Ceres Seq. ID no. 13662326
  misc_feature (35)..(242): Pfam Name: Thaumatin family Pfam Description: Thaumatin family
  misc_feature (11)..(245): Homolog of NCBI NO: 15222875 NR Description: thaumatin family [Arabidopsis thaliana]
  misc_feature (30)..(301): Homolog of NCBI NO: 30686652 NR Description: thaumatin family [Arabidopsis thaliana]
  misc_feature (20)..(301): Homolog of NCBI NO: 25296204 NR Description: hypothetical protein T20H2.19 [imported] -
  misc_feature (14)..(246): Homolog of NCBI NO: 15233437 NR Description: thaumatin family [Arabidopsis thaliana]
  misc_feature (30)..(244): Homolog of NCBI NO: 18420282 NR Description: thaumatin-like protein, putative [Arabidopsis
  misc_feature (30)..(244): Homolog of NCBI NO: 7442168 NR Description: pathogenesis-related protein F20M13.220 -
  misc_feature (30)..(244): Homolog of NCBI NO: 21592749 NR Description: putative thaumatin-like protein [Arabidopsis
  misc_feature (14)..(242): Homolog of NCBI NO: 2262099 NR Description: thaumatin isolog [Arabidopsis thaliana]
  misc_feature (14)..(242): Homolog of NCBI NO: 15233738 NR Description: thaumatin family [Arabidopsis thaliana]
  misc_feature (28)..(308): Homolog of NCBI NO: 37531042 NR Description: putative thaumatin-like protein
MAQPSLLLGSPASIVLLITFFQGPVVSAITFTFANRCTDTVWPGLLSGSTSPPLETTGFALSPGQSRSIYGPTGWSGRFWARSGCNFNGGKGTCVTGDCGSGEIECRGAGATPPATLAEFTLDGDGGKDFYDVSLVDGYNLPMLVQPSVPGCPDTGCLVDLNERCPSELRSGGGLACRSACEAFGKPEFCCNGAYGNPDTCHPSQYSQLFKSACPKSYSYAYDDATSTFTCNHTDYTITFCPQSNPYSGKPNKHALRRPSHEQLEDDVWLASLKKTSGAGGSSMASWSASGGFQAALAIAVAVVLAAAQGGHPRFSLL

SEQ ID NO: 62165 - DNA, 1419 bp, Triticum aestivum
  misc_feature (1)..(1419): Ceres Seq. ID no. 13598369
ataagtttgtaagttcgacgacataaggttgcgcatcgaaaaggacccaggttctcttctccaacggtttggttgtgcgccatggacgctggaatgagacaatcgagggtccggttttctggtgtagggcaggaagatcagggcagcggccaggctatggcaatgccaccacagcgacagcgaggcacaccttttggaagaggtgaagaatacgatgccgcgtacgcagcaacggtggcagcagtggcatatgctattgctgcaatggaggaagagaagttgccatcccaacagaagcctatcccagaaaaagcagcatctcggcagaagcgcgtaacagttcatgagcccacagctgccccacccccgagatcaccacccaggagaggtggaagcatgaaaaggccgactgaaggaagcaaaatctcaagattgtttagcggtaacaaagaaatagttgaagttggcgacgaagacgaacgagcaaatgtgtcggtgaggaggccggtgaaaccggcgccaaagaagccaggagatctaactccaggccagaacgtggtagggaaggtggttgactccgtcccgaacctgaaggacgatccaagtttcacgaggaaaacaccggacaagaagaggagcagaaactttgagcaggaggaggcaaatcagagggcgaaacccggggttaacccgacgacctcgtttccaggagagaggaaacagagctggaagcacgagcaggaaccagcgaatcagagggcaccaccggcagccaggcctccaggaatggtttattccagcgaggcggagaggatggcggctgcgtgggagaaggagaagctggctaagatcaaggagcagtataacgagacgatggaaaccatagccgaatgggagactgaaaagaaggccaaggccaggcgccagaaggagcccaaagagggggattcagagaggaagcgagcaaaggcgctggaggagtacaacgacgagatgaagcggatcagcaaggtggccgccgcgtcgaggatgtcggcagaggacaagaaaaggaacgccgagggcaaagtctgggagaaggcggccaaaatccggtcgacggggaagctcccacggtcctgtggctgcttctgaaaccatggacacacataatgtgggccaagaatctggttgtgttgctgctttactgtgtatacttgtttatgtatcgcctaaatgaagtacattgcgccaaccagtgcaaactccaacaacaacaacaacaaagcctttagtcccaagcaagttgaggtaggctagaggtgaaacccataagatctcgcaaccaactcatggctctggcacatggatagcaagcttccatgcatccctgtccatagctagctcttcggtgataccccaatccttcaggtctctctt

SEQ ID NO: 62166 - protein, 350 aa, Triticum aestivum
  peptide (1)..(350): Ceres Seq. ID no. 13598370
  misc_feature (246)..(348): Pfam Name: Remorin, C-terminal region Pfam Description: Remorin, C-terminal region
  misc_feature (217)..(350): Homolog of NCBI NO: 15233068 NR Description: DNA-binding protein -related [Arabidopsis
  misc_feature (162)..(349): Homolog of NCBI NO: 21555669 NR Description: remorin [Arabidopsis thaliana]
  misc_feature (162)..(349): Homolog of NCBI NO: 15237822 NR Description: expressed protein [Arabidopsis thaliana]
  misc_feature (256)..(347): Homolog of NCBI NO: 12325086 NR Description: hypothetical protein; 34983-33172 [Arabidopsis
  misc_feature (182)..(350): Homolog of NCBI NO: 15240195 NR Description: hypothetical protein [Arabidopsis thaliana]
  misc_feature (237)..(347): Homolog of NCBI NO: 30697834 NR Description: predicted protein [Arabidopsis thaliana]
  misc_feature (237)..(347): Homolog of NCBI NO: 12597780 NR Description: hypothetical protein [Arabidopsis thaliana]
  misc_feature (111)..(350): Homolog of NCBI NO: 15222980 NR Description: hypothetical protein [Arabidopsis thaliana]
  misc_feature (82)..(350): Homolog of NCBI NO: 8778390 NR Description: F16A14.13 [Arabidopsis thaliana]
  misc_feature (245)..(350): Homolog of NCBI NO: 37532756 NR Description: hypothetical protein [Oryza sativa (japonica
MDAGMRQSRVRFSGVGQEDQGSGQAMAMPPQRQRGTPFGRGEEYDAAYAATVAAVAYAIAAMEEEKLPSQQKPIPEKAASRQKRVTVHEPTAAPPPRSPPRRGGSMKRPTEGSKISRLFSGNKEIVEVGDEDERANVSVRRPVKPAPKKPGDLTPGQNVVGKVVDSVPNLKDDPSFTRKTPDKKRSRNFEQEEANQRAKPGVNPTTSFPGERKQSWKHEQEPANQRAPPAARPPGMVYSSEAERMAAAWEKEKLAKIKEQYNETMETIAEWETEKKAKARRQKEPKEGDSERKRAKALEEYNDEMKRISKVAAASRMSAEDKKRNAEGKVWEKAAKIRSTGKLPRSCGCF

SEQ ID NO: 62167 - protein, 346 aa, Triticum aestivum
  peptide (1)..(346): Ceres Seq. ID no. 13598371
  misc_feature (242)..(344): Pfam Name: Remorin, C-terminal region Pfam Description: Remorin, C-terminal region
  misc_feature (213)..(346): Homolog of NCBI NO: 15233068 NR Description: DNA-binding protein -related [Arabidopsis
  misc_feature (158)..(345): Homolog of NCBI NO: 21555669 NR Description: remorin [Arabidopsis thaliana]
  misc_feature (158)..(345): Homolog of NCBI NO: 15237822 NR Description: expressed protein [Arabidopsis thaliana]
  misc_feature (252)..(343): Homolog of NCBI NO: 12325086 NR Description: hypothetical protein; 34983-33172 [Arabidopsis
  misc_feature (178)..(346): Homolog of NCBI NO: 15240195 NR Description: hypothetical protein [Arabidopsis thaliana]
  misc_feature (233)..(343): Homolog of NCBI NO: 30697834 NR Description: predicted protein [Arabidopsis thaliana]
  misc_feature (233)..(343): Homolog of NCBI NO: 12597780 NR Description: hypothetical protein [Arabidopsis thaliana]
  misc_feature (107)..(346): Homolog of NCBI NO: 15222980 NR Description: hypothetical protein [Arabidopsis thaliana]
  misc_feature (78)..(346): Homolog of NCBI NO: 8778390 NR Description: F16A14.13 [Arabidopsis thaliana]
  misc_feature (241)..(346): Homolog of NCBI NO: 37532756 NR Description: hypothetical protein [Oryza sativa (japonica
MRQSRVRFSGVGQEDQGSGQAMAMPPQRQRGTPFGRGEEYDAAYAATVAAVAYAIAAMEEEKLPSQQKPIPEKAASRQKRVTVHEPTAAPPPRSPPRRGGSMKRPTEGSKISRLFSGNKEIVEVGDEDERANVSVRRPVKPAPKKPGDLTPGQNVVGKVVDSVPNLKDDPSFTRKTPDKKRSRNFEQEEANQRAKPGVNPTTSFPGERKQSWKHEQEPANQRAPPAARPPGMVYSSEAERMAAAWEKEKLAKIKEQYNETMETIAEWETEKKAKARRQKEPKEGDSERKRAKALEEYNDEMKRISKVAAASRMSAEDKKRNAEGKVWEKAAKIRSTGKLPRSCGCF

SEQ ID NO: 62168 - protein, 325 aa, Triticum aestivum
  peptide (1)..(325): Ceres Seq. ID no. 13598372
  misc_feature (221)..(323): Pfam Name: Remorin, C-terminal region Pfam Description: Remorin, C-terminal region
  misc_feature (192)..(325): Homolog of NCBI NO: 15233068 NR Description: DNA-binding protein -related [Arabidopsis
  misc_feature (137)..(324): Homolog of NCBI NO: 21555669 NR Description: remorin [Arabidopsis thaliana]
  misc_feature (137)..(324): Homolog of NCBI NO: 15237822 NR Description: expressed protein [Arabidopsis thaliana]
  misc_feature (231)..(322): Homolog of NCBI NO: 12325086 NR Description: hypothetical protein; 34983-33172 [Arabidopsis
  misc_feature (157)..(325): Homolog of NCBI NO: 15240195 NR Description: hypothetical protein [Arabidopsis thaliana]
  misc_feature (212)..(322): Homolog of NCBI NO: 30697834 NR Description: predicted protein [Arabidopsis thaliana]
  misc_feature (212)..(322): Homolog of NCBI NO: 12597780 NR Description: hypothetical protein [Arabidopsis thaliana]
  misc_feature (86)..(325): Homolog of NCBI NO: 15222980 NR Description: hypothetical protein [Arabidopsis thaliana]
  misc_feature (57)..(325): Homolog of NCBI NO: 8778390 NR Description: F16A14.13 [Arabidopsis thaliana]
  misc_feature (220)..(325): Homolog of NCBI NO: 37532756 NR Description: hypothetical protein [Oryza sativa (japonica
MAMPPQRQRGTPFGRGEEYDAAYAATVAAVAYAIAAMEEEKLPSQQKPIPEKAASRQKRVTVHEPTAAPPPRSPPRRGGSMKRPTEGSKISRLFSGNKEIVEVGDEDERANVSVRRPVKPAPKKPGDLTPGQNVVGKVVDSVPNLKDDPSFTRKTPDKKRSRNFEQEEANQRAKPGVNPTTSFPGERKQSWKHEQEPANQRAPPAARPPGMVYSSEAERMAAAWEKEKLAKIKEQYNETMETIAEWETEKKAKARRQKEPKEGDSERKRAKALEEYNDEMKRISKVAAASRMSAEDKKRNAEGKVWEKAAKIRSTGKLPRSCGCF

SEQ ID NO: 62169 - DNA, 1304 bp, Triticum aestivum
  misc_feature (1)..(1304): Ceres Seq. ID no. 13596474
atcaatcatctcgtgccattccccaaaagcaagctagacccttgcaatggcggcgtccttcaccaccagctggcgttgcgcattcctcgcgctactggcccttttcgtctccggcgcctacgggcagctcagcccgacgttctacgcgtcgacctgcccgaacctaacgaccatcgtgcgcgacgccatggtcacggccttgaacccggcagtcggcggcgagcgcaggatgggcgcttccctgctcaggctccacttccacgactgcttcgttgagggatgcgacggatcggtcctcctggacaacgtgcctgctaatgggagcactccggctttctttggcgagaagaacgccttcgggaacatcaactccgtccgcggcttcgaggtcatcgacacgatcaaggccgcagtggagcaagcctgccctggcgtcgtctcctgtgccgacatcctcaccctcgccgcacgggacggcacctttctgctcggcgggccgacctgggcagtgccgctcggccggcgcgactcgacgacggcgagcatggacctggcgaacagggacctcccgccgccgttcgctaacctcgtcactaatcctcctgacggcagcgacctcatcgcgaggttccaaaggaagggcctgagcgcgaccgagatgaccgtgctctccggcgcgcacaccatcggctccgcgcagtgccagaattaccggctccgcctctacaacgaaaaccgcatcgattttcagtttgcccagggtctcaaggccaactgcccccaaaatggccccgccggcgacaccttcctggcgccgttggactcgacggggtccaccttcgacaataagtactacacggatctcaccgggttgcgcggcctcctccactccgaccaggtgctgtacccccagaacaaccagacgcaggctaagatagtgctcaagtacaagggagacaacaccgccttctttgccgatttcgcggccgcgatgataaagatggggaacctcagcccgctcaccggaaccgccggccaaatcaggaccaactgtaggttggtcaacccggcctgatcatacggtctggcatatataccactgttaattaccgcgtaaccaaagataaataaatgcaacctctgtgataatctttcacctttgtaataactatactatgttgtgctacatactggcttactggttaaattattaatcgttccaattgactattgagctccaaatcatgtatatgtgtgtatcctttgtaaacaatattattatcaacgacaacaagaagatcctc

SEQ ID NO: 62170 - protein, 342 aa, Triticum aestivum
  peptide (1)..(342): Ceres Seq. ID no. 15221887
  misc_feature (50)..(297): Pfam Name: Peroxidase Pfam Description: Peroxidase
  misc_feature (14)..(340): Homolog of NCBI NO: 34393250 NR Description: peroxidase [Oryza sativa (japonica
  misc_feature (14)..(340): Homolog of NCBI NO: 34393249 NR Description: putative peroxidase precursor
  misc_feature (28)..(340): Homolog of NCBI NO: 1633130 NR Description: Chain A, Peanut Peroxidase
  misc_feature (1)..(340): Homolog of NCBI NO: 2117619 NR Description: peroxidase (EC 1.11.1.7) 4 precursor - wheat
  misc_feature (13)..(340): Homolog of NCBI NO: 99872 NR Description: peroxidase (EC 1.11.1.7) precursor, cationic
  misc_feature (13)..(340): Homolog of NCBI NO: 6093671 NR Description: Cationic peroxidase 1 precursor (PNPC1)
  misc_feature (17)..(340): Homolog of NCBI NO: 7433049 NR Description: peroxidase (EC 1.11.1.7) - flax (fragment)
  misc_feature (10)..(340): Homolog of NCBI NO: 577503 NR Description: cationic peroxidase
  misc_feature (3)..(340): Homolog of NCBI NO: 4760704 NR Description: peroxidase 3 [Scutellaria baicalensis]
  misc_feature (14)..(340): Homolog of NCBI NO: 5453379 NR Description: bacterial-induced peroxidase precursor [Gossypium
MAASFTTSWRCAFLALLALFVSGAYGQLSPTFYASTCPNLTTIVRDAMVTALNPAVGGERRMGASLLRLHFHDCFVEGCDGSVLLDNVPANGSTPAFFGEKNAFGNINSVRGFEVIDTIKAAVEQACPGVVSCADILTLAARDGTFLLGGPTWAVPLGRRDSTTASMDLANRDLPPPFANLVTNPPDGSDLIARFQRKGLSATEMTVLSGAHTIGSAQCQNYRLRLYNENRIDFQFAQGLKANCPQNGPAGDTFLAPLDSTGSTFDNKYYTDLTGLRGLLHSDQVLYPQNNQTQAKIVLKYKGDNTAFFADFAAAMIKMGNLSPLTGTAGQIRTNCRLVNPA

SEQ ID NO: 62171 - protein, 295 aa, Triticum aestivum
  peptide (1)..(295): Ceres Seq. ID no. 15221888
  misc_feature (3)..(250): Pfam Name: Peroxidase Pfam Description: Peroxidase
  misc_feature (1)..(293): Homolog of NCBI NO: 34393250 NR Description: peroxidase [Oryza sativa (japonica
  misc_feature (1)..(293): Homolog of NCBI NO: 34393249 NR Description: putative peroxidase precursor
  misc_feature (1)..(293): Homolog of NCBI NO: 1633130 NR Description: Chain A, Peanut Peroxidase
  misc_feature (1)..(293): Homolog of NCBI NO: 2117619 NR Description: peroxidase (EC 1.11.1.7) 4 precursor - wheat
  misc_feature (1)..(293): Homolog of NCBI NO: 99872 NR Description: peroxidase (EC 1.11.1.7) precursor, cationic
  misc_feature (1)..(293): Homolog of NCBI NO: 6093671 NR Description: Cationic peroxidase 1 precursor (PNPC1)
  misc_feature (1)..(293): Homolog of NCBI NO: 7433049 NR Description: peroxidase (EC 1.11.1.7) - flax (fragment)
  misc_feature (1)..(293): Homolog of NCBI NO: 577503 NR Description: cationic peroxidase
  misc_feature (1)..(293): Homolog of NCBI NO: 4760704 NR Description: peroxidase 3 [Scutellaria baicalensis]
  misc_feature (1)..(293): Homolog of NCBI NO: 5453379 NR Description: bacterial-induced peroxidase precursor [Gossypium
MVTALNPAVGGERRMGASLLRLHFHDCFVEGCDGSVLLDNVPANGSTPAFFGEKNAFGNINSVRGFEVIDTIKAAVEQACPGVVSCADILTLAARDGTFLLGGPTWAVPLGRRDSTTASMDLANRDLPPPFANLVTNPPDGSDLIARFQRKGLSATEMTVLSGAHTIGSAQCQNYRLRLYNENRIDFQFAQGLKANCPQNGPAGDTFLAPLDSTGSTFDNKYYTDLTGLRGLLHSDQVLYPQNNQTQAKIVLKYKGDNTAFFADFAAAMIKMGNLSPLTGTAGQIRTNCRLVNPA

SEQ ID NO: 62172 - protein, 281 aa, Triticum aestivum
  peptide (1)..(281): Ceres Seq. ID no. 15221889
  misc_feature (1)..(236): Pfam Name: Peroxidase Pfam Description: Peroxidase
  misc_feature (1)..(279): Homolog of NCBI NO: 34393250 NR Description: peroxidase [Oryza sativa (japonica
  misc_feature (1)..(279): Homolog of NCBI NO: 34393249 NR Description: putative peroxidase precursor
  misc_feature (1)..(279): Homolog of NCBI NO: 1633130 NR Description: Chain A, Peanut Peroxidase
  misc_feature (1)..(279): Homolog of NCBI NO: 2117619 NR Description: peroxidase (EC 1.11.1.7) 4 precursor - wheat
  misc_feature (1)..(279): Homolog of NCBI NO: 99872 NR Description: peroxidase (EC 1.11.1.7) precursor, cationic
  misc_feature (1)..(279): Homolog of NCBI NO: 6093671 NR Description: Cationic peroxidase 1 precursor (PNPC1)
  misc_feature (1)..(279): Homolog of NCBI NO: 7433049 NR Description: peroxidase (EC 1.11.1.7) - flax (fragment)
  misc_feature (1)..(279): Homolog of NCBI NO: 577503 NR Description: cationic peroxidase
  misc_feature (1)..(279): Homolog of NCBI NO: 4760704 NR Description: peroxidase 3 [Scutellaria baicalensis]
  misc_feature (1)..(279): Homolog of NCBI NO: 5453379 NR Description: bacterial-induced peroxidase precursor [Gossypium
MGASLLRLHFHDCFVEGCDGSVLLDNVPANGSTPAFFGEKNAFGNINSVRGFEVIDTIKAAVEQACPGVVSCADILTLAARDGTFLLGGPTWAVPLGRRDSTTASMDLANRDLPPPFANLVTNPPDGSDLIARFQRKGLSATEMTVLSGAHTIGSAQCQNYRLRLYNENRIDFQFAQGLKANCPQNGPAGDTFLAPLDSTGSTFDNKYYTDLTGLRGLLHSDQVLYPQNNQTQAKIVLKYKGDNTAFFADFAAAMIKMGNLSPLTGTAGQIRTNCRLVNPA

SEQ ID NO: 62173 - DNA, 1498 bp, Triticum aestivum
  misc_feature (1)..(1498): Ceres Seq. ID no. 15226984
atacccttcacccgtcgtcgtcaccgccacctctgcacacgcgtagtctctcaccgcatctccggcgaccaccgaccatctccggccaccgctactccttccctctcctgtgatggcgccgcgcgccggcggtcagacctacggcttccccatctactgcgcctcctggctcccactcgcacacaccatcaagccctctccatccgccgacgacgtcgtggatgcggacgcgtccccggagctgtcctccccacctccgccccccatggtggcccttggcggaggcggaggcgagggccggagcggcgtgcccaacgcgctggtcgtcgccgccctcgaccccgccgctgcaggggcgcctccagcgctctcccccgagccggtgtttaggctggggacagaggagcgggtgccatacaggatggccgtacacccccgcggcgatggcctcctctgcgccttccccgacggctgcaggttggtgcggtgggaatcaccagaaggagaagatcgacatagcctagttttgatatctgaccaggaggctttagtgaagctaaaggatgttggtttacagttggctgtggcattcagtggagagggttcactacttgccactggtggtgaggatggacatttgagggtcttcaaatggcctggcatggaaaccattattgaagatcctgatgctaaaacatctgttaaggatcttagtttcagttccgatgagaagtttctagttgtgaacaggagcagtggcccatctagagtgtgggatttaaagtcatctgaagctgtggctaatctgccaagagaacaaggagaaatatttggcttctgccgattttctactaagtctgacaatagtcagattctctttgttacagcaatgcaaggtgattacgggaaaataatatcttggaataccacctcatggacaagaattggatcaaagaaagtaactcgtgacgcgatttcagccttttcagtctcgcctgatggtacacttctagcaattggaactattgagggaaccatcagtgttctaggttcaagagacatgcgagtggttgtaacagttaaaaaggcgcatcttggcattgttactacattagctttttctcaagattcaagggccttgctgtcgacttcctttgactcaaccgcaagggtgacatcgactgaatcacccaagagcgatggtataagcctctggtccatggtactagctattatactcgcaattttggcatattactatatgcagcacaaagaagatctcttagcaatgttgccacaatgaaaaaaataatcagcctctactgatatctcactgcttaccactgattatctgatcttgtactggagataaatgttgtatcgtgtaggagctagagcaatttttgtattcaggtggaaaaaaaacggctcaaaaacgtccagatcttttgtatcatgtcacgctggtataagaaggccatcctctcctggtttgtag

SEQ ID NO: 62174 - protein, 396 aa, Triticum aestivum
  peptide (1)..(396): Ceres Seq. ID no. 15226985
  misc_feature (320)..(355): Pfam Name: WD domain, G-beta repeat Pfam Description: WD domain, G-beta repeat
  misc_feature (158)..(396): Homolog of NCBI NO: 26450470 NR Description: unknown protein [Arabidopsis thaliana]
  misc_feature (67)..(396): Homolog of NCBI NO: 18409509 NR Description: transducin / WD-40 repeat protein family
  misc_feature (57)..(386): Homolog of NCBI NO: 34897162 NR Description: putative membrane protein
  misc_feature (62)..(388): Homolog of NCBI NO: 34394605 NR Description: transducin / WD-40 repeat protein-like
  misc_feature (8)..(272): Homolog of NCBI NO: 17473926 NR Description: putative protein transport protein SEC12p
  misc_feature (8)..(363): Homolog of NCBI NO: 322598 NR Description: St12p protein - Arabidopsis thaliana
  misc_feature (3)..(355): Homolog of NCBI NO: 8777388 NR Description: protein transport protein SEC12p-like
  misc_feature (3)..(384): Homolog of NCBI NO: 18423177 NR Description: St12p protein [Arabidopsis thaliana]
  misc_feature (8)..(387): Homolog of NCBI NO: 11358859 NR Description: St12p protein [imported] - Arabidopsis thaliana
  misc_feature (8)..(387): Homolog of NCBI NO: 15226281 NR Description: SEC12p protein / St12p protein [Arabidopsis
MAPRAGGQTYGFPIYCASWLPLAHTIKPSPSADDVVDADASPELSSPPPPPMVALGGGGGEGRSGVPNALVVAALDPAAAGAPPALSPEPVFRLGTEERVPYRMAVHPRGDGLLCAFPDGCRLVRWESPEGEDRHSLVLISDQEALVKLKDVGLQLAVAFSGEGSLLATGGEDGHLRVFKWPGMETIIEDPDAKTSVKDLSFSSDEKFLVVNRSSGPSRVWDLKSSEAVANLPREQGEIFGFCRFSTKSDNSQILFVTAMQGDYGKIISWNTTSWTRIGSKKVTRDAISAFSVSPDGTLLAIGTIEGTISVLGSRDMRVVVTVKKAHLGIVTTLAFSQDSRALLSTSFDSTARVTSTESPKSDGISLWSMVLAIILAILAYYYMQHKEDLLAMLPQ

SEQ ID NO: 62175 - protein, 345 aa, Triticum aestivum
  peptide (1)..(345): Ceres Seq. ID no. 15226986
  misc_feature (269)..(304): Pfam Name: WD domain, G-beta repeat Pfam Description: WD domain, G-beta repeat
  misc_feature (107)..(345): Homolog of NCBI NO: 26450470 NR Description: unknown protein [Arabidopsis thaliana]
  misc_feature (16)..(345): Homolog of NCBI NO: 18409509 NR Description: transducin / WD-40 repeat protein family
  misc_feature (6)..(335): Homolog of NCBI NO: 34897162 NR Description: putative membrane protein
  misc_feature (11)..(337): Homolog of NCBI NO: 34394605 NR Description: transducin / WD-40 repeat protein-like
  misc_feature (1)..(221): Homolog of NCBI NO: 17473926 NR Description: putative protein transport protein SEC12p
  misc_feature (1)..(312): Homolog of NCBI NO: 322598 NR Description: St12p protein - Arabidopsis thaliana
  misc_feature (1)..(304): Homolog of NCBI NO: 8777388 NR Description: protein transport protein SEC12p-like
  misc_feature (1)..(333): Homolog of NCBI NO: 18423177 NR Description: St12p protein [Arabidopsis thaliana]
  misc_feature (1)..(336): Homolog of NCBI NO: 11358859 NR Description: St12p protein [imported] - Arabidopsis thaliana
  misc_feature (1)..(336): Homolog of NCBI NO: 15226281 NR Description: SEC12p protein / St12p protein [Arabidopsis
MVALGGGGGEGRSGVPNALVVAALDPAAAGAPPALSPEPVFRLGTEERVPYRMAVHPRGDGLLCAFPDGCRLVRWESPEGEDRHSLVLISDQEALVKLKDVGLQLAVAFSGEGSLLATGGEDGHLRVFKWPGMETIIEDPDAKTSVKDLSFSSDEKFLVVNRSSGPSRVWDLKSSEAVANLPREQGEIFGFCRFSTKSDNSQILFVTAMQGDYGKIISWNTTSWTRIGSKKVTRDAISAFSVSPDGTLLAIGTIEGTISVLGSRDMRVVVTVKKAHLGIVTTLAFSQDSRALLSTSFDSTARVTSTESPKSDGISLWSMVLAIILAILAYYYMQHKEDLLAMLPQ

SEQ ID NO: 62176 - protein, 293 aa, Triticum aestivum
  peptide (1)..(293): Ceres Seq. ID no. 15226987
  misc_feature (217)..(252): Pfam Name: WD domain, G-beta repeat Pfam Description: WD domain, G-beta repeat
  misc_feature (55)..(293): Homolog of NCBI NO: 26450470 NR Description: unknown protein [Arabidopsis thaliana]
  misc_feature (1)..(293): Homolog of NCBI NO: 18409509 NR Description: transducin / WD-40 repeat protein family
  misc_feature (1)..(283): Homolog of NCBI NO: 34897162 NR Description: putative membrane protein
  misc_feature (1)..(285): Homolog of NCBI NO: 34394605 NR Description: transducin / WD-40 repeat protein-like
  misc_feature (1)..(169): Homolog of NCBI NO: 17473926 NR Description: putative protein transport protein SEC12p
  misc_feature (1)..(260): Homolog of NCBI NO: 322598 NR Description: St12p protein - Arabidopsis thaliana
  misc_feature (1)..(252): Homolog of NCBI NO: 8777388 NR Description: protein transport protein SEC12p-like
  misc_feature (1)..(281): Homolog of NCBI NO: 18423177 NR Description: St12p protein [Arabidopsis thaliana]
  misc_feature (1)..(284): Homolog of NCBI NO: 11358859 NR Description: St12p protein [imported] - Arabidopsis thaliana
  misc_feature (1)..(284): Homolog of NCBI NO: 15226281 NR Description: SEC12p protein / St12p protein [Arabidopsis
MAVHPRGDGLLCAFPDGCRLVRWESPEGEDRHSLVLISDQEALVKLKDVGLQLAVAFSGEGSLLATGGEDGHLRVFKWPGMETIIEDPDAKTSVKDLSFSSDEKFLVVNRSSGPSRVWDLKSSEAVANLPREQGEIFGFCRFSTKSDNSQILFVTAMQGDYGKIISWNTTSWTRIGSKKVTRDAISAFSVSPDGTLLAIGTIEGTISVLGSRDMRVVVTVKKAHLGIVTTLAFSQDSRALLSTSFDSTARVTSTESPKSDGISLWSMVLAIILAILAYYYMQHKEDLLAMLPQ

SEQ ID NO: 62177 - DNA, 1117 bp, Triticum aestivum
  misc_feature (1)..(1117): Ceres Seq. ID no. 13596416
tctggggtgcaccgtacaattccacgccgcgttttctgcactttccagacagcacggaagcaaaacgatagaggcgtatccactatggcggcaacctactgcgcctaccccgccgccgccgccgccgccgccgcaaaccctaccagacgccgcctgcaaaccctaaccgcgccgggcgccctacctgctgctcggaaacccagccgccaaccccccaccttcctctctttccggctccccaatgcagcgctgccgccgctccgcgtcgctggcgctgacccgcaggttgtaaatggcgaagatttccctcctatgaatgacctaattcgactatacaagaaagcctttctagatggaaacgaagatgttgttagtgacatcgagaaggcaatcactagcatggaggaagagagaagtaaatcagcttctcagtttgaaagtatcacagctgaaatagcttcagggaagaataagtttcttcgcttaaatgctgatctagagaattttcggaagcagactgaaaaggaccgtgcaaagtttacatcgaatatacaagtggaacttgtacagagtctgttgcctctggttgacagctttgagaaaacaaatgtagagatcaccctagagactgagaaagagcagaagattagcgcaagctatcaaggcatatacaagcaattagtagaaacactgaaaaacttaggcgtaggggttgtggaaactgttggcaagccatttgatccagtggttcatgaggctatcgcgcgtgaagaatctacagagttcaaggcaggcatcgtctcacacgaagtccaccgagggttccttctgagggagagggtgctaaggcctgccgcggtgaaggtctctaatggtcctggtgaccaaaacgtgagctccacatcttcggaggagcctgtggaggataccaaagaggatgccgctgtgtgaatccgccagaaacctggcgccaacatttaccaagtcgttgtagctggagcaccattgtttgggagctctcgttgtactgttaatatggagcagagtcatttatgagaatgtacatctatggtgatctgcaactttgcaagtatcctaaagaattttactttggtgc

SEQ ID NO: 62178 - protein, 316 aa, Triticum aestivum
  peptide (1)..(316): Ceres Seq. ID no. 13596417
  misc_feature (136)..(290): Pfam Name: GrpE Pfam Description: GrpE
  misc_feature (120)..(306): Homolog of NCBI NO: 16331493 NR Description: heat shock protein; GrpE [Synechocystis sp. PCC
  misc_feature (128)..(306): Homolog of NCBI NO: 23041352 NR Description: hypothetical protein [Trichodesmium erythraeum
  misc_feature (143)..(309): Homolog of NCBI NO: 33860576 NR Description: Heat shock protein GrpE
  misc_feature (124)..(305): Homolog of NCBI NO: 15384279 NR Description: co-chaperone CGE1 precursor isoform b
  misc_feature (124)..(305): Homolog of NCBI NO: 15384277 NR Description: co-chaperone CGE1 precursor isoform a
  misc_feature (119)..(309): Homolog of NCBI NO: 22298857 NR Description: heat shock protein [Thermosynechococcus elongatus
  misc_feature (90)..(305): Homolog of NCBI NO: 30686476 NR Description: chloroplast GrpE protein [Arabidopsis thaliana]
  misc_feature (90)..(305): Homolog of NCBI NO: 18418410 NR Description: chloroplast GrpE protein [Arabidopsis thaliana]
  misc_feature (35)..(304): Homolog of NCBI NO: 21593629 NR Description: putative heat shock protein [Arabidopsis thaliana]
  misc_feature (35)..(304): Homolog of NCBI NO: 18400095 NR Description: heat shock protein -related [Arabidopsis
SGVHRTIPRRVFCTFQTARKQNDRGVSTMAATYCAYPAAAAAAAANPTRRRLQTLTAPGALPAARKPSRQPPTFLSFRLPNAALPPLRVAGADPQVVNGEDFPPMNDLIRLYKKAFLDGNEDVVSDIEKAITSMEEERSKSASQFESITAEIASGKNKFLRLNADLENFRKQTEKDRAKFTSNIQVELVQSLLPLVDSFEKTNVEITLETEKEQKISASYQGIYKQLVETLKNLGVGVVETVGKPFDPVVHEAIAREESTEFKAGIVSHEVHRGFLLRERVLRPAAVKVSNGPGDQNVSSTSSEEPVEDTKEDAAV

SEQ ID NO: 62179 - protein, 288 aa, Triticum aestivum
  peptide (1)..(288): Ceres Seq. ID no. 13596418
  misc_feature (108)..(262): Pfam Name: GrpE Pfam Description: GrpE
  misc_feature (92)..(278): Homolog of NCBI NO: 16331493 NR Description: heat shock protein; GrpE [Synechocystis sp. PCC
  misc_feature (100)..(278): Homolog of NCBI NO: 23041352 NR Description: hypothetical protein [Trichodesmium erythraeum
  misc_feature (115)..(281): Homolog of NCBI NO: 33860576 NR Description: Heat shock protein GrpE
  misc_feature (96)..(277): Homolog of NCBI NO: 15384279 NR Description: co-chaperone CGE1 precursor isoform b
  misc_feature (96)..(277): Homolog of NCBI NO: 15384277 NR Description: co-chaperone CGE1 precursor isoform a
  misc_feature (91)..(281): Homolog of NCBI NO: 22298857 NR Description: heat shock protein [Thermosynechococcus elongatus
  misc_feature (62)..(277): Homolog of NCBI NO: 30686476 NR Description: chloroplast GrpE protein [Arabidopsis thaliana]
  misc_feature (62)..(277): Homolog of NCBI NO: 18418410 NR Description: chloroplast GrpE protein [Arabidopsis thaliana]
  misc_feature (7)..(276): Homolog of NCBI NO: 21593629 NR Description: putative heat shock protein [Arabidopsis thaliana]
  misc_feature (7)..(276): Homolog of NCBI NO: 18400095 NR Description: heat shock protein -related [Arabidopsis
MAATYCAYPAAAAAAAANPTRRRLQTLTAPGALPAARKPSRQPPTFLSFRLPNAALPPLRVAGADPQVVNGEDFPPMNDLIRLYKKAFLDGNEDVVSDIEKAITSMEEERSKSASQFESITAEIASGKNKFLRLNADLENFRKQTEKDRAKFTSNIQVELVQSLLPLVDSFEKTNVEITLETEKEQKISASYQGIYKQLVETLKNLGVGVVETVGKPFDPVVHEAIAREESTEFKAGIVSHEVHRGFLLRERVLRPAAVKVSNGPGDQNVSSTSSEEPVEDTKEDAAV

SEQ ID NO: 62180 - protein, 212 aa, Triticum aestivum
  peptide (1)..(212): Ceres Seq. ID no. 13596419
  misc_feature (32)..(186): Pfam Name: GrpE Pfam Description: GrpE
  misc_feature (16)..(202): Homolog of NCBI NO: 16331493 NR Description: heat shock protein; GrpE [Synechocystis sp. PCC
  misc_feature (24)..(202): Homolog of NCBI NO: 23041352 NR Description: hypothetical protein [Trichodesmium erythraeum
  misc_feature (39)..(205): Homolog of NCBI NO: 33860576 NR Description: Heat shock protein GrpE
  misc_feature (20)..(201): Homolog of NCBI NO: 15384279 NR Description: co-chaperone CGE1 precursor isoform b
  misc_feature (20)..(201): Homolog of NCBI NO: 15384277 NR Description: co-chaperone CGE1 precursor isoform a
  misc_feature (15)..(205): Homolog of NCBI NO: 22298857 NR Description: heat shock protein [Thermosynechococcus elongatus
  misc_feature (1)..(201): Homolog of NCBI NO: 30686476 NR Description: chloroplast GrpE protein [Arabidopsis thaliana]
  misc_feature (1)..(201): Homolog of NCBI NO: 18418410 NR Description: chloroplast GrpE protein [Arabidopsis thaliana]
  misc_feature (1)..(200): Homolog of NCBI NO: 21593629 NR Description: putative heat shock protein [Arabidopsis thaliana]
  misc_feature (1)..(200): Homolog of NCBI NO: 18400095 NR Description: heat shock protein -related [Arabidopsis
MNDLIRLYKKAFLDGNEDVVSDIEKAITSMEEERSKSASQFESITAEIASGKNKFLRLNADLENFRKQTEKDRAKFTSNIQVELVQSLLPLVDSFEKTNVEITLETEKEQKISASYQGIYKQLVETLKNLGVGVVETVGKPFDPVVHEAIAREESTEFKAGIVSHEVHRGFLLRERVLRPAAVKVSNGPGDQNVSSTSSEEPVEDTKEDAAV

SEQ ID NO: 62181 - DNA, 1633 bp, Triticum aestivum
  misc_feature (1)..(1633): Ceres Seq. ID no. 15170127
gaggggaaagcaaaagagggcggcatctttgcgtcggcgatggcggcggcggcgggggcgaggagcagggtggcgttcgtgctggtggacgggataggggacgtgaccatcccttccctcggtgggcgtaccccgctggaggcggccgcggcaccacggctggacgctgtggcggcggctggggtggtcgggctcatggaccccgtggagccggggctcgcctgcggcagcgacacggcgcacctctccctcctcgggtacgatccccgcgtatactaccgcggccgcggcgcgttcgagtccatgggcgctggcctcgccatggccccgggcgacatcgccttcaagtcgaactttgctacattggacgaaagcacgggggttatcgtcagcaggagggcggataggcactttgaggaggaaggcccaatcctctgtgctgcattagatggaatgaagctcccatcatttcccgaatatgaagtgagagtcaggtacgctactgagcacagatgtggtgtggttgtgaaaggaccaaggctaagtggaaacatttccggaactgatccgttgaaagacaaccgcttgcatctaaaggctgaacctttggatgattcggaagaagctaaaaacaccgcagctgtggttaacgagctctctaaggagatcacacgtatactggtttctcaacccatcaatgcaaagcgtgctgtcgagaggaagaatattgctaatgttgtgctattgcgaggctgtggtatccggattgaggtacctccctttgaaaccaagcatggactcacaccatgcatggtagctcctaccaagatcatagccgggctggggctgtcgttgggcattgatatccttgaagcacctggagcaactggagattatagaactctcttaacttccaaggcaaaagctatagccaaggcactctctgctcctctggacacaccacctcgcgtttttgtgcctggagaggatgaatataaagccggaagagaaaatggatacgactttggtttcttgcacatcaaggctattgatgatgctggccatgacaaggctgtcaagttaaaggtgcgaggtctggaagctgtcgaccgggctattggtcagcttgcaaggctcctgtgggaagctgagaagtcggggcactaccagtacttcctctgtgtcactggagaccactctactcctgttgagtacggagaccacagctttgaacctgtcccgtttgcgatatgccggctgagagatttcgtgggagcgattggggagggcaatgtgatgaatacccccctcgacgatttcccgctgccttcggttaaatccggagaagatttaactgatgattcagaaccagcggaacacaagcctgaggagcgtaaagcttttagcggcgatacagtgtgtgaatacaccgagattgctgctgcaaggggctgccttgggcggttccctggaagtgagatgatgggcatcatcaagaagttcatgaaagcaaagaacgattaacgccagttcgattgctaacactgtacttgatctttgtaataatgacaaatggataaacgacgcagaaccagcttaatccgatagtaataaaatctatcatggttgaggc

SEQ ID NO: 62182 - protein, 507 aa, Triticum aestivum
  peptide (1)..(507): Ceres Seq. ID no. 15170128
  misc_feature (322)..(428): Pfam Name: Metalloenzyme superfamily Pfam Description: Metalloenzyme superfamily
  misc_feature (340)..(417): Homolog of NCBI NO: 15679586 NR Description: phosphonopyruvate decarboxylase
  misc_feature (27)..(351): Homolog of NCBI NO: 15679586 NR Description: phosphonopyruvate decarboxylase
  misc_feature (336)..(414): Homolog of NCBI NO: 15897350 NR Description: Phosphonopyruvate decarboxylase [Sulfolobus
  misc_feature (23)..(314): Homolog of NCBI NO: 15897350 NR Description: Phosphonopyruvate decarboxylase [Sulfolobus
  misc_feature (415)..(502): Homolog of NCBI NO: 28828261 NR Description: similar to Arabidopsis thaliana (Mouse-ear
  misc_feature (340)..(420): Homolog of NCBI NO: 28828261 NR Description: similar to Arabidopsis thaliana (Mouse-ear
  misc_feature (19)..(341): Homolog of NCBI NO: 28828261 NR Description: similar to Arabidopsis thaliana (Mouse-ear
  misc_feature (21)..(503): Homolog of NCBI NO: 25407505 NR Description: hypothetical protein AT4g09520 [imported] -
  misc_feature (21)..(503): Homolog of NCBI NO: 30681098 NR Description: expressed protein [Arabidopsis thaliana]
  misc_feature (21)..(502): Homolog of NCBI NO: 30690068 NR Description: phosphonopyruvate decarboxylase -related
EGKAKEGGIFASAMAAAAGARSRVAFVLVDGIGDVTIPSLGGRTPLEAAAAPRLDAVAAAGVVGLMDPVEPGLACGSDTAHLSLLGYDPRVYYRGRGAFESMGAGLAMAPGDIAFKSNFATLDESTGVIVSRRADRHFEEEGPILCAALDGMKLPSFPEYEVRVRYATEHRCGVVVKGPRLSGNISGTDPLKDNRLHLKAEPLDDSEEAKNTAAVVNELSKEITRILVSQPINAKRAVERKNIANVVLLRGCGIRIEVPPFETKHGLTPCMVAPTKIIAGLGLSLGIDILEAPGATGDYRTLLTSKAKAIAKALSAPLDTPPRVFVPGEDEYKAGRENGYDFGFLHIKAIDDAGHDKAVKLKVRGLEAVDRAIGQLARLLWEAEKSGHYQYFLCVTGDHSTPVEYGDHSFEPVPFAICRLRDFVGAIGEGNVMNTPLDDFPLPSVKSGEDLTDDSEPAEHKPEERKAFSGDTVCEYTEIAAARGCLGRFPGSEMMGIIKKFMKAKND

SEQ ID NO: 62183 - protein, 494 aa, Triticum aestivum
  peptide (1)..(494): Ceres Seq. ID no. 15170129
  misc_feature (309)..(415): Pfam Name: Metalloenzyme superfamily Pfam Description: Metalloenzyme superfamily
  misc_feature (327)..(404): Homolog of NCBI NO: 15679586 NR Description: phosphonopyruvate decarboxylase
  misc_feature (14)..(338): Homolog of NCBI NO: 15679586 NR Description: phosphonopyruvate decarboxylase
  misc_feature (323)..(401): Homolog of NCBI NO: 15897350 NR Description: Phosphonopyruvate decarboxylase [Sulfolobus
  misc_feature (10)..(301): Homolog of NCBI NO: 15897350 NR Description: Phosphonopyruvate decarboxylase [Sulfolobus
  misc_feature (402)..(489): Homolog of NCBI NO: 28828261 NR Description: similar to Arabidopsis thaliana (Mouse-ear
  misc_feature (327)..(407): Homolog of NCBI NO: 28828261 NR Description: similar to Arabidopsis thaliana (Mouse-ear
  misc_feature (6)..(328): Homolog of NCBI NO: 28828261 NR Description: similar to Arabidopsis thaliana (Mouse-ear
  misc_feature (8)..(490): Homolog of NCBI NO: 25407505 NR Description: hypothetical protein AT4g09520 [imported] -
  misc_feature (8)..(490): Homolog of NCBI NO: 30681098 NR Description: expressed protein [Arabidopsis thaliana]
  misc_feature (8)..(489): Homolog of NCBI NO: 30690068 NR Description: phosphonopyruvate decarboxylase -related
MAAAAGARSRVAFVLVDGIGDVTIPSLGGRTPLEAAAAPRLDAVAAAGVVGLMDPVEPGLACGSDTAHLSLLGYDPRVYYRGRGAFESMGAGLAMAPGDIAFKSNFATLDESTGVIVSRRADRHFEEEGPILCAALDGMKLPSFPEYEVRVRYATEHRCGVVVKGPRLSGNISGTDPLKDNRLHLKAEPLDDSEEAKNTAAVVNELSKEITRILVSQPINAKRAVERKNIANVVLLRGCGIRIEVPPFETKHGLTPCMVAPTKIIAGLGLSLGIDILEAPGATGDYRTLLTSKAKAIAKALSAPLDTPPRVFVPGEDEYKAGRENGYDFGFLHIKAIDDAGHDKAVKLKVRGLEAVDRAIGQLARLLWEAEKSGHYQYFLCVTGDHSTPVEYGDHSFEPVPFAICRLRDFVGAIGEGNVMNTPLDDFPLPSVKSGEDLTDDSEPAEHKPEERKAFSGDTVCEYTEIAAARGCLGRFPGSEMMGIIKKFMKAKND

SEQ ID NO: 62184 - protein, 442 aa, Triticum aestivum
  peptide (1)..(442): Ceres Seq. ID no. 15170130
  misc_feature (257)..(363): Pfam Name: Metalloenzyme superfamily Pfam Description: Metalloenzyme superfamily
  misc_feature (275)..(352): Homolog of NCBI NO: 15679586 NR Description: phosphonopyruvate decarboxylase
  misc_feature (1)..(286): Homolog of NCBI NO: 15679586 NR Description: phosphonopyruvate decarboxylase
  misc_feature (271)..(349): Homolog of NCBI NO: 15897350 NR Description: Phosphonopyruvate decarboxylase [Sulfolobus
  misc_feature (1)..(249): Homolog of NCBI NO: 15897350 NR Description: Phosphonopyruvate decarboxylase [Sulfolobus
  misc_feature (350)..(437): Homolog of NCBI NO: 28828261 NR Description: similar to Arabidopsis thaliana (Mouse-ear
  misc_feature (275)..(355): Homolog of NCBI NO: 28828261 NR Description: similar to Arabidopsis thaliana (Mouse-ear
  misc_feature (1)..(276): Homolog of NCBI NO: 28828261 NR Description: similar to Arabidopsis thaliana (Mouse-ear
  misc_feature (1)..(438): Homolog of NCBI NO: 25407505 NR Description: hypothetical protein AT4g09520 [imported] -
  misc_feature (1)..(438): Homolog of NCBI NO: 30681098 NR Description: expressed protein [Arabidopsis thaliana]
  misc_feature (1)..(437): Homolog of NCBI NO: 30690068 NR Description: phosphonopyruvate decarboxylase -related
MDPVEPGLACGSDTAHLSLLGYDPRVYYRGRGAFESMGAGLAMAPGDIAFKSNFATLDESTGVIVSRRADRHFEEEGPILCAALDGMKLPSFPEYEVRVRYATEHRCGVVVKGPRLSGNISGTDPLKDNRLHLKAEPLDDSEEAKNTAAVVNELSKEITRILVSQPINAKRAVERKNIANVVLLRGCGIRIEVPPFETKHGLTPCMVAPTKIIAGLGLSLGIDILEAPGATGDYRTLLTSKAKAIAKALSAPLDTPPRVFVPGEDEYKAGRENGYDFGFLHIKAIDDAGHDKAVKLKVRGLEAVDRAIGQLARLLWEAEKSGHYQYFLCVTGDHSTPVEYGDHSFEPVPFAICRLRDFVGAIGEGNVMNTPLDDFPLPSVKSGEDLTDDSEPAEHKPEERKAFSGDTVCEYTEIAAARGCLGRFPGSEMMGIIKKFMKAKND

SEQ ID NO: 62185 - DNA, 1042 bp, Triticum aestivum
  misc_feature (1)..(1042): Ceres Seq. ID no. 13598373
cttatctcctcgtctcgcaaaagcagagacagaagagagatcgattccgactaaaacctctcgccgccgacgaccaagctcggagacctattgacctagttcctgatgtcggacgccgatgattaccgttgcttcgttgggagtctgtcatggaacacaactgatgtggatctgaaggatgcgtttgggaaatttggtcgagttactgagaccaaggtggttcttgacaagttctctggccggtcacgtggctttggatttgtgacttttgatgacaagaaggccatggaagaagctgttgaggctatgaatggaattgatttggatggaaggaatattactgttgaaagagcacaacctcaaggttcaggcagggaccgtgatggagatcgagactatcgtggtggtggtgaccgctatggtggtggccgtgattttggtggcggtcgtggtggtggtcgtggtggcggcggtgattgctacaaatgtggcaagcctggtcattttgcaagggagtgcccttctggtgatggtggggacaggtatggtagcagggatgacaggtatagtagcagggatgacaggtatagtagtagggatgacaggtatggtggcagggatggtggaagggatgacaagtatggtggtagcaacggcagcagtcgctatgggcctgaccgtggtggtgatcgctattctggaagtcgtgatggaggaagccgcagcagtggtggcggtgatcgatacagccgtgacaggtctggaccgtatgatcgtcgcagccgagatgaatactgatcttgatggtggagattctgtctcaggtatgaaaggtattggataatactagtggtatgtttgctttatcacataaggcagcaaatggtttgctgttgtactctttatgagaagtttaatgcttttgttatccatgctgactagtgcttggtttaccaatgttcctacctggatttggcttgtaaccggttccttgggagcttcagtggattgcgttattttgtctgagtaatatttgggatcc

SEQ ID NO: 62186 - protein, 230 aa, Triticum aestivum
  peptide (1)..(230): Ceres Seq. ID no. 13598374
  misc_feature (9)..(80): Pfam Name: RNA recognition motif. (a.k.a. RRM, RBD, or RNP domain) Pfam Description: RNA recognition motif. (a.k.a. RRM, RBD, or RNP
  misc_feature (1)..(184): Homolog of NCBI NO: 15235002 NR Description: glycine-rich RNA-binding protein 8 (GRP8) (CCR1)
  misc_feature (1)..(147): Homolog of NCBI NO: 7024451 NR Description: glycine-rich RNA-binding protein [Citrus unshiu]
  misc_feature (1)..(173): Homolog of NCBI NO: 1076672 NR Description: probable glycine rich RNA binding protein -
  misc_feature (1)..(230): Homolog of NCBI NO: 15237666 NR Description: glycine-rich RNA-binding protein [Arabidopsis
  misc_feature (1)..(230): Homolog of NCBI NO: 33146923 NR Description: glycine-rich RNA-binding protein-like
  misc_feature (1)..(140): Homolog of NCBI NO: 15982739 NR Description: AT3g26420/F20C19_14 [Arabidopsis thaliana]
  misc_feature (1)..(207): Homolog of NCBI NO: 2129944 NR Description: RNA-binding protein RZ-1 - wood tobacco
  misc_feature (1)..(224): Homolog of NCBI NO: 15231557 NR Description: glycine-rich RNA-binding protein [Arabidopsis
  misc_feature (1)..(203): Homolog of NCBI NO: 40714682 NR Description: putative RNA binding protein
  misc_feature (1)..(172): Homolog of NCBI NO: 12659074 NR Description: RNA-binding protein [Triticum aestivum]
MSDADDYRCFVGSLSWNTTDVDLKDAFGKFGRVTETKVVLDKFSGRSRGFGFVTFDDKKAMEEAVEAMNGIDLDGRNITVERAQPQGSGRDRDGDRDYRGGGDRYGGGRDFGGGRGGGRGGGGDCYKCGKPGHFARECPSGDGGDRYGSRDDRYSSRDDRYSSRDDRYGGRDGGRDDKYGGSNGSSRYGPDRGGDRYSGSRDGGSRSSGGGDRYSRDRSGPYDRRSRDEY

SEQ ID NO: 62187 - protein, 177 aa, Triticum aestivum
  peptide (1)..(177): Ceres Seq. ID no. 13598375
  misc_feature (24)..(170): Homolog of NCBI NO: 34860233 NR Description: similar to lymphocyte alpha-kinase [Rattus
MELIWMEGILLLKEHNLKVQAGTVMEIETIVVVVTAMVVAVILVAVVVVVVVAAVIATNVASLVILQGSALLVMVGTGMVAGMTGIVAGMTGIVVGMTGMVAGMVEGMTSMVVATAAVAMGLTVVVIAILEVVMEEAAAVVAVIDTAVTGLDRMIVAAEMNTDLDGGDSVSGMKGIG

SEQ ID NO: 62188 - protein, 172 aa, Triticum aestivum
  peptide (1)..(172): Ceres Seq. ID no. 13598376
  misc_feature (19)..(165): Homolog of NCBI NO: 34860233 NR Description: similar to lymphocyte alpha-kinase [Rattus
MEGILLLKEHNLKVQAGTVMEIETIVVVVTAMVVAVILVAVVVVVVVAAVIATNVASLVILQGSALLVMVGTGMVAGMTGIVAGMTGIVVGMTGMVAGMVEGMTSMVVATAAVAMGLTVVVIAILEVVMEEAAAVVAVIDTAVTGLDRMIVAAEMNTDLDGGDSVSGMKGIG

SEQ ID NO: 62189 - DNA, 1403 bp, Triticum aestivum
  misc_feature (1)..(1403): Ceres Seq. ID no. 12625237
attctatccaaatccatggaaacctccacgcagaatgtaaggagcgggcggagtaatggagggcgaggcgcagccgccgccggcgtgcgtgtccaaggtgctcgacgaggacaacctcctccgagagatcatcgtccgtgtcggcttccccaccagcctcgtccgcgccgccggcgtctgcacgcgctggctcagccacgcctccgaccgcgcgctcctccgccgtttccgcgagctccacccgcccaggctcctcggcttctacctcgcgaacagggagcgtccgggcggggcgcgcttcctcccggtgctgcctctgcccccggatctcgccgccgtcgtccgccgcgcaagcttcagccttgacacccacgacggcgcgcgccgctccgcaagcttcagccccggcacccactcggacgggcggaccgacgtggtgggctgctggaacggccgcgtcatcaccagctcgcaggggcagaattacgcccacggccgatccgaaattatatttcaagtgcacaccccgctatgctctggctctgagaaaggtgcggccatcatcccagcattacacctcaaagtccaggatggaatttgcaggcttattagacaacccttcttctggattgtcctacttttttgtcacggtggagtgtaccaggtatcatgaagattctaaggtgcatgtgtatatgctgcaaaatggtgatgatgcctggcgcaagcatcttaccttggcctcggacctcctcctgtatccacgcaaaagccccaaaggcgtgctcgttcacaacaaattctatctgccgaccgacaatgaaattgttgtcctggatttggtgtcctcaagcttatcgacaattcagctcccacaaggggtgggttttagtccaataggcaccaccatgttgtcacgggctgatgatgcttctggtgtgtatctcatccatatcaaggaccttcaacttagcatctggctccacaatggggacaactggttgctggtggacaccatttgcttgtgtgaaatatctgataatttgcttgacgatgagcctactgacgatatcctgataaaccatgtgggggactataatgagtttttattcttggagctgggtcgatgcgcactctacttggatgtcaaacgcaggacgctgcgtaaagtgtatgagatgacagcagaggagcaacaattgggtgatatctatcctcttatgatgagctggcttcccaatttccctgcactcatggatagtcctgcaaggtttgccttttgcccttttcgtgatctatatactgtccttgtagagtttactcaattttgcaattcgcatcgtgcatctcactgtttggtatttactatagttgtggggtgctaatacatatgtgattgattc

SEQ ID NO: 62190 - protein, 264 aa, Triticum aestivum
  peptide (1)..(264): Ceres Seq. ID no. 12625238
  misc_feature (1)..(15): Homolog of NCBI NO: 11359723 NR Description: proteophosphoglycan, membrane-associated
  misc_feature (1)..(14): Homolog of NCBI NO: 2769724 NR Description: H87 [Human herpesvirus 6]
MEFAGLLDNPSSGLSYFFVTVECTRYHEDSKVHVYMLQNGDDAWRKHLTLASDLLLYPRKSPKGVLVHNKFYLPTDNEIVVLDLVSSSLSTIQLPQGVGFSPIGTTMLSRADDASGVYLIHIKDLQLSIWLHNGDNWLLVDTICLCEISDNLLDDEPTDDILINHVGDYNEFLFLELGRCALYLDVKRRTLRKVYEMTAEEQQLGDIYPLMMSWLPNFPALMDSPARFAFCPFRDLYTVLVEFTQFCNSHRASHCLVFTIVVGC

SEQ ID NO: 62191 - protein, 229 aa, Triticum aestivum
  peptide (1)..(229): Ceres Seq. ID no. 12625239
MLQNGDDAWRKHLTLASDLLLYPRKSPKGVLVHNKFYLPTDNEIVVLDLVSSSLSTIQLPQGVGFSPIGTTMLSRADDASGVYLIHIKDLQLSIWLHNGDNWLLVDTICLCEISDNLLDDEPTDDILINHVGDYNEFLFLELGRCALYLDVKRRTLRKVYEMTAEEQQLGDIYPLMMSWLPNFPALMDSPARFAFCPFRDLYTVLVEFTQFCNSHRASHCLVFTIVVGC

SEQ ID NO: 62192 - protein, 205 aa, Triticum aestivum
  peptide (1)..(205): Ceres Seq. ID no. 12625240
  misc_feature (7)..(103): Homolog of NCBI NO: 37531854 NR Description: hypothetical protein [Oryza sativa (japonica
  misc_feature (7)..(139): Homolog of NCBI NO: 38347670 NR Description: OSJNBa0054D14.5 [Oryza sativa (japonica
MEGEAQPPPACVSKVLDEDNLLREIIVRVGFPTSLVRAAGVCTRWLSHASDRALLRRFRELHPPRLLGFYLANRERPGGARFLPVLPLPPDLAAVVRRASFSLDTHDGARRSASFSPGTHSDGRTDVVGCWNGRVITSSQGQNYAHGRSEIIFQVHTPLCSGSEKGAAIIPALHLKVQDGICRLIRQPFFWIVLLFCHGGVYQVS

SEQ ID NO: 62193 - DNA, 1566 bp, Triticum aestivum
  misc_feature (1)..(1566): Ceres Seq. ID no. 15226307
gtccactagttcctccaccaaaaactagggttagggttagggcggcggcggctttatttccgatcgcgatcgccatggccaccggaggcgccccaaagccggaggaggagaccgtcgtcttccccgattgggtgatgctggaacgcatcttccgcaaacggtgcctcgacgacctagacgctgctggtgaggccgtcaacaagaacaagaccgctgctccagtcaagatagacggcgttcactcctgcttcgtctccttcaccctcgcagctcctccagggtcctcctacttcaacctccattggccggagagacaaggctcagacagactctctgccttcgtccgggcaaccgacaagaacctcgtcctcttcgacatctcgatccccgaccggattcgctacatggacgctccgccagatctgttcgtctacacggcctctgctccttccccctcggtgcagcagcttcctcggcgcagcacaaggcggttcctggctcatcagttcatcaccggcattctgcagctcaaagcggagcactgctacatcgttgccgacctcaatgtccaccccaagaaaaagggcgtttgggctgaactctgtgtcttcaactccggcgccaacgactggagaatcatcaccgaggtgcttgctgatgagctccctgacctctggtggtccgatgatgtgtttgctttcgacggccgtttcctttgctgggtggactacttctgcggcgtcgtgctatgcgacttctccaaaaatgtggactcaggtgctccacttcgtgccttttcctggaggaatcaaatacccttttgacgcacggttcccgaggtacttcccagggaggttccgaagtgcgtccatcagccaaggcatgatccgctatatccacattgacaatgactttcatgagactatccactccgactggcaagtgatgattcctcctaagagaagccaacggcggcagcagcagcttccccacaaaatcaccatttggacgttgaactccaagttcgagtgggaggtgcattgtaagatcaacctggattgtctctgggcacaacctctttaccgaggtctacctcggcgtcttcctgagttcccagtcatcagcatggatgacccgggtgttctgtgctgcctgctgagggcgaaggaatttggtggcaaggagcggatgatcatggttgacatgaaccatgcggatctgcagtcatttactgatgtgaatgtagaagacaagttctctaataccacccaacttccaactgtcttctccaaataccttcaaaaggccaacagggatggcatggggcaacattgagcttacttcattgaaatgcaagtctgcaatatgaagacctgtaatctggtgactgaaggtgaaaactttgcggatgctcaaatcaaagatgttgtttgtcaatgacgcggtgcaggcagaacagtttgatgatgtactgatgaatatctattggagtaacgctacatgttctggatcatgtaatcatatgtttcagcgttaaaagtatgagattgaaaaaaaaaaaaaaaa

SEQ ID NO: 62194 - protein, 273 aa, Triticum aestivum
  peptide (1)..(273): Ceres Seq. ID no. 15226308
PLVPPPKTRVRVRAAAALFPIAIAMATGGAPKPEEETVVFPDWVMLERIFRKRCLDDLDAAGEAVNKNKTAAPVKIDGVHSCFVSFTLAAPPGSSYFNLHWPERQGSDRLSAFVRATDKNLVLFDISIPDRIRYMDAPPDLFVYTASAPSPSVQQLPRRSTRRFLAHQFITGILQLKAEHCYIVADLNVHPKKKGVWAELCVFNSGANDWRIITEVLADELPDLWWSDDVFAFDGRFLCWVDYFCGVVLCDFSKNVDSGAPLRAFSWRNQIPF

SEQ ID NO: 62195 - protein, 256 aa, Triticum aestivum
  peptide (1)..(256): Ceres Seq. ID no. 15226309
  misc_feature (1)..(65): Pfam Name: Equine herpesvirus glycoprotein gp2 Pfam Description: Equine herpesvirus glycoprotein gp2
MSTPRKRAFGLNSVSSTPAPTTGESSPRCLLMSSLTSGGPMMCLLSTAVSFAGWTTSAASCYATSPKMWTQVLHFVPFPGGIKYPFDARFPRYFPGRFRSASISQGMIRYIHIDNDFHETIHSDWQVMIPPKRSQRRQQQLPHKITIWTLNSKFEWEVHCKINLDCLWAQPLYRGLPRRLPEFPVISMDDPGVLCCLLRAKEFGGKERMIMVDMNHADLQSFTDVNVEDKFSNTTQLPTVFSKYLQKANRDGMGQH

SEQ ID NO: 62196 - protein, 249 aa, Triticum aestivum
  peptide (1)..(249): Ceres Seq. ID no. 15226310
MATGGAPKPEEETVVFPDWVMLERIFRKRCLDDLDAAGEAVNKNKTAAPVKIDGVHSCFVSFTLAAPPGSSYFNLHWPERQGSDRLSAFVRATDKNLVLFDISIPDRIRYMDAPPDLFVYTASAPSPSVQQLPRRSTRRFLAHQFITGILQLKAEHCYIVADLNVHPKKKGVWAELCVFNSGANDWRIITEVLADELPDLWWSDDVFAFDGRFLCWVDYFCGVVLCDFSKNVDSGAPLRAFSWRNQIPF

SEQ ID NO: 62197 - DNA, 2147 bp, Triticum aestivum
  misc_feature (1)..(2147): Ceres Seq. ID no. 13654290
acaccatccaccacatcccatcccaggagattaaaaaaggacaagagctcgattcaaatccgatcctgcgttacgtatcgcgcttcttccgtccgtgtgttcgttccgaggccaggagtttgaggagatggcgggcggcggtgtcgaggacgtctacggcgaggacagggccaccgaggagcagctcatcacgccatggtcattctccgtcgcaagtgggcaccagcttctgagggacccccggcacaacaaggggctggccttctccgaggcggagcgcgacgcgcactacctccggggcctgcttcccccggccatcgtctcccaggagcaccaggagaagaagatcatgcacaacctccgcagttacaccgtccccctgcaccgctacgtcgccatgatggacctccaggagaggaacgagaggctcttctacaagctcctcatcgacaacgtcgaggagctgctccccgtcgtctacacgcccgtcgtcggcgaggcctgccagaagtacggcagcatctaccgccgcccgcaggggctctacatcagcctcaaggacaagggcaaggtgctcgaggtgctcaagaactggcctgagaggagcatccaggtcatcgtcgtcaccgacggcgagcgcattttggggctcggagatctgggttgccagggtatggggattccggttggcaaactgtctctgtacaccgccctcggaggagttcgcccatcagcttgcctgccaattacgatcgatgttggcaccaacaatgagacattgctgaacgacgagtactacatcgggctccgtcaacggcgtgctaccggcgaggaataccatgagcttcttcaagagttcatgaatgcagtgaagcagaactacggcgagaaagtcctggtccagtttgaggactttgccaaccacaatgcattcgatttgctcgcaaagtacagcaagagccatctcgtcttcaacgatgatattcagggcacagcatcagtggtcctcgcaggcctcttggcggccctgaggatgatcggtggaggccttgtggatcagacttacctcttccttggtgctggagaggctggaactggcattgcagaactcattgctcttgagatgtcgaaacacactgaactcccggtggacgactgccgcaagaagatctggctggtggactccaagggtctgcttgtcgagtctagaaaagagtctctgcagcacttcaagaagccgttcgctcatgagcacgaagaactcaagaccctgctggaggccgtccagtccatcaagccaaccgtgctgatcggaacctccggcgtcgggaagaccttcacccaggaagtgatcgaggccatggcctccttcaacgagaaacccgtcatcttctcgctgtcgaacccgacgtcccactcggagtgcacggccgaggaggcctacacctggagcaagggcacggcggtgttcgcgagcggcagcccgttcgaccccgtggagtacgaggggaagacgttcgtgcccgggcagtccaacaacgcctacgtgttccccggcttcggcctcggcgtcgtcatctccggcgccatccgcgtccacgacgacatgctcctcgccgcctcggaggcgctggcggaggaggcgacccaggagaacttcgacaaggggctcatcttcccgcccttcaccaacatccgcaagatctcggccagcatcgccgccaaggtggccgccaaggcctacgacctgggcctggccagccggctgccgcggcccgacgacctggtcaagtacgccgagagctgcatgtacaccccgctctaccgcagctacaggtgagcgtggcgggcagttttgcggccagcacggacggagtcaatcaataaaatcaatctccttcccccgtatgccaaccagctcaactcaaagcttcagcgacgcaacctaaaacataggctttctttccttctgtgtccgtctatgcgtatgtgtactcttgtgctcttctactttgctttactttgtactgtaatgtactgttaacgggagcacggcacgcacctgtctatccgtgtcgaggtgcgtcgtcgtcgtcgtcgtcgattcttttgtcagattgagttaaacgagtgtaatagtttgattg

SEQ ID NO: 62198 - protein, 570 aa, Triticum aestivum
  peptide (1)..(570): Ceres Seq. ID no. 13654291
  misc_feature (286)..(539): Pfam Name: Malic enzyme, NAD binding domain Pfam Description: Malic enzyme, NAD binding domain
  misc_feature (25)..(570): Homolog of NCBI NO: 4096786 NR Description: NADP-malic enzyme [Zea mays]
  misc_feature (3)..(570): Homolog of NCBI NO: 7431234 NR Description: malate dehydrogenase
  misc_feature (3)..(570): Homolog of NCBI NO: 15077109 NR Description: putative cytosolic NADP-malic enzyme [Flaveria
  misc_feature (1)..(570): Homolog of NCBI NO: 18460985 NR Description: NADP-dependent malic enzyme [Zea mays]
  misc_feature (3)..(570): Homolog of NCBI NO: 115420 NR Description: NADP-DEPENDENT MALIC ENZYME (NADP-ME)
  misc_feature (4)..(570): Homolog of NCBI NO: 8118507 NR Description: NADP-dependent malic protein [Ricinus communis]
  misc_feature (3)..(570): Homolog of NCBI NO: 7427668 NR Description: malate dehydrogenase
  misc_feature (3)..(570): Homolog of NCBI NO: 510876 NR Description: NADP dependent malic enzyme [Phaseolus vulgaris]
  misc_feature (1)..(570): Homolog of NCBI NO: 1170871 NR Description: NADP-DEPENDENT MALIC ENZYME, CHLOROPLAST
  misc_feature (1)..(570): Homolog of NCBI NO: 34906372 NR Description: unnamed protein product [Oryza sativa (japonica
MAGGGVEDVYGEDRATEEQLITPWSFSVASGHQLLRDPRHNKGLAFSEAERDAHYLRGLLPPAIVSQEHQEKKIMHNLRSYTVPLHRYVAMMDLQERNERLFYKLLIDNVEELLPVVYTPVVGEACQKYGSIYRRPQGLYISLKDKGKVLEVLKNWPERSIQVIVVTDGERILGLGDLGCQGMGIPVGKLSLYTALGGVRPSACLPITIDVGTNNETLLNDEYYIGLRQRRATGEEYHELLQEFMNAVKQNYGEKVLVQFEDFANHNAFDLLAKYSKSHLVFNDDIQGTASVVLAGLLAALRMIGGGLVDQTYLFLGAGEAGTGIAELIALEMSKHTELPVDDCRKKIWLVDSKGLLVESRKESLQHFKKPFAHEHEELKTLLEAVQSIKPTVLIGTSGVGKTFTQEVIEAMASFNEKPVIFSLSNPTSHSECTAEEAYTWSKGTAVFASGSPFDPVEYEGKTFVPGQSNNAYVFPGFGLGVVISGAIRVHDDMLLAASEALAEEATQENFDKGLIFPPFTNIRKISASIAAKVAAKAYDLGLASRLPRPDDLVKYAESCMYTPLYRSYR

SEQ ID NO: 62199 - protein, 496 aa, Triticum aestivum
  peptide (1)..(496): Ceres Seq. ID no. 13654292
  misc_feature (212)..(465): Pfam Name: Malic enzyme, NAD binding domain Pfam Description: Malic enzyme, NAD binding domain
  misc_feature (1)..(496): Homolog of NCBI NO: 4096786 NR Description: NADP-malic enzyme [Zea mays]
  misc_feature (1)..(496): Homolog of NCBI NO: 7431234 NR Description: malate dehydrogenase
  misc_feature (1)..(496): Homolog of NCBI NO: 15077109 NR Description: putative cytosolic NADP-malic enzyme [Flaveria
  misc_feature (1)..(496): Homolog of NCBI NO: 18460985 NR Description: NADP-dependent malic enzyme [Zea mays]
  misc_feature (1)..(496): Homolog of NCBI NO: 115420 NR Description: NADP-DEPENDENT MALIC ENZYME (NADP-ME)
  misc_feature (1)..(496): Homolog of NCBI NO: 8118507 NR Description: NADP-dependent malic protein [Ricinus communis]
  misc_feature (1)..(496): Homolog of NCBI NO: 7427668 NR Description: malate dehydrogenase
  misc_feature (1)..(496): Homolog of NCBI NO: 510876 NR Description: NADP dependent malic enzyme [Phaseolus vulgaris]
  misc_feature (1)..(496): Homolog of NCBI NO: 1170871 NR Description: NADP-DEPENDENT MALIC ENZYME, CHLOROPLAST
  misc_feature (1)..(496): Homolog of NCBI NO: 34906372 NR Description: unnamed protein product [Oryza sativa (japonica
MHNLRSYTVPLHRYVAMMDLQERNERLFYKLLIDNVEELLPVVYTPVVGEACQKYGSIYRRPQGLYISLKDKGKVLEVLKNWPERSIQVIVVTDGERILGLGDLGCQGMGIPVGKLSLYTALGGVRPSACLPITIDVGTNNETLLNDEYYIGLRQRRATGEEYHELLQEFMNAVKQNYGEKVLVQFEDFANHNAFDLLAKYSKSHLVFNDDIQGTASVVLAGLLAALRMIGGGLVDQTYLFLGAGEAGTGIAELIALEMSKHTELPVDDCRKKIWLVDSKGLLVESRKESLQHFKKPFAHEHEELKTLLEAVQSIKPTVLIGTSGVGKTFTQEVIEAMASFNEKPVIFSLSNPTSHSECTAEEAYTWSKGTAVFASGSPFDPVEYEGKTFVPGQSNNAYVFPGFGLGVVISGAIRVHDDMLLAASEALAEEATQENFDKGLIFPPFTNIRKISASIAAKVAAKAYDLGLASRLPRPDDLVKYAESCMYTPLYRSYR

SEQ ID NO: 62200 - protein, 480 aa, Triticum aestivum
  peptide (1)..(480): Ceres Seq. ID no. 13654293
  misc_feature (196)..(449): Pfam Name: Malic enzyme, NAD binding domain Pfam Description: Malic enzyme, NAD binding domain
  misc_feature (1)..(480): Homolog of NCBI NO: 4096786 NR Description: NADP-malic enzyme [Zea mays]
  misc_feature (1)..(480): Homolog of NCBI NO: 7431234 NR Description: malate dehydrogenase
  misc_feature (1)..(480): Homolog of NCBI NO: 15077109 NR Description: putative cytosolic NADP-malic enzyme [Flaveria
  misc_feature (1)..(480): Homolog of NCBI NO: 18460985 NR Description: NADP-dependent malic enzyme [Zea mays]
  misc_feature (1)..(480): Homolog of NCBI NO: 115420 NR Description: NADP-DEPENDENT MALIC ENZYME (NADP-ME)
  misc_feature (1)..(480): Homolog of NCBI NO: 8118507 NR Description: NADP-dependent malic protein [Ricinus communis]
  misc_feature (1)..(480): Homolog of NCBI NO: 7427668 NR Description: malate dehydrogenase
  misc_feature (1)..(480): Homolog of NCBI NO: 510876 NR Description: NADP dependent malic enzyme [Phaseolus vulgaris]
  misc_feature (1)..(480): Homolog of NCBI NO: 1170871 NR Description: NADP-DEPENDENT MALIC ENZYME, CHLOROPLAST
  misc_feature (1)..(480): Homolog of NCBI NO: 34906372 NR Description: unnamed protein product [Oryza sativa (japonica
MMDLQERNERLFYKLLIDNVEELLPVVYTPVVGEACQKYGSIYRRPQGLYISLKDKGKVLEVLKNWPERSIQVIVVTDGERILGLGDLGCQGMGIPVGKLSLYTALGGVRPSACLPITIDVGTNNETLLNDEYYIGLRQRRATGEEYHELLQEFMNAVKQNYGEKVLVQFEDFANHNAFDLLAKYSKSHLVFNDDIQGTASVVLAGLLAALRMIGGGLVDQTYLFLGAGEAGTGIAELIALEMSKHTELPVDDCRKKIWLVDSKGLLVESRKESLQHFKKPFAHEHEELKTLLEAVQSIKPTVLIGTSGVGKTFTQEVIEAMASFNEKPVIFSLSNPTSHSECTAEEAYTWSKGTAVFASGSPFDPVEYEGKTFVPGQSNNAYVFPGFGLGVVISGAIRVHDDMLLAASEALAEEATQENFDKGLIFPPFTNIRKISASIAAKVAAKAYDLGLASRLPRPDDLVKYAESCMYTPLYRSYR

SEQ ID NO: 62201 - DNA, 1173 bp, Triticum aestivum
  misc_feature (1)..(1173): Ceres Seq. ID no. 12578438
atcctacctcgctccacgccacttcccactagctagcctccaaggagagcagagcaccatgacgatgctgcgggctgtgtccgtcacggtgggcgtggccgtggcgctgctggcggcggccacggcggcggagtcgtggctgtacgaggagttcaccacggacggcaacgtgcgcgcggactacaacgcgcaggggcagcaggtggcgtcgctcatgctcacccagcagtccggcggcggcgccttcggctcccggcagaagtacctctacggcgagttcagcatccagatgaagctcgtccccggcaactccgccggcaccgtcacctccttctacctgtcgtcgggcgacggccccgggcacgacgagatcgacatggagttcatgggcaactccacggggcagccggtggtgctcaacaccaacgtgtgggccaacggcgacggcaagaaggagcaccagttcgacctctggttcgacccggccgcggactaccacacctacaccatcatctggaaccacaagaacgtcctcttcaaggtggacgacctcttcatccgctccttcaggcgccacgccgacctcccctacccgggcgccaagcccatgtccgtgcacgccacgctctgggacggcagctactgggccacgctcaagggcaaggtccccgtcgactggtccggcgcgcccttcctcgtctcctaccgcgcctactccgccgacgcctgcgtgcccgcggaaggcggcccgctctcctgccccgccggcaccgaccgctggatgaaccggcagctcgacgacgccgagcgcggcaccgtcgcctgggccaagcgcgactacatgcgctacaactactgcgacgacggctggcgattcccgcagggcttccccgccgagtgctcccgcgcctgaacacaaccgattgagatttgagttcacgtccccaatcccccgatgagattctaccttgttagcttgattcttttttctggtttcttcagcagccggctcctctacctctatgtgttcttgttttcgtcaaaaaacctctctctgttaagtgttttttcttaacgagaggggttaactctaacgataataaacgtaaattcgttgagtaaatacagtagtatttaaaaaaaaaaaaaaaaaagcttatcgataccgtcgac

SEQ ID NO: 62202 - protein, 303 aa, Triticum aestivum
  peptide (1)..(303): Ceres Seq. ID no. 12578439
  misc_feature (48)..(227): Pfam Name: Glycosyl hydrolases family 16 Pfam Description: Glycosyl hydrolases family 16
  misc_feature (29)..(300): Homolog of NCBI NO: 2129773 NR Description: xyloglucan endo-1,4-beta-D-glucanase (EC 3.2.1.-)
  misc_feature (21)..(300): Homolog of NCBI NO: 22327914 NR Description: xyloglucan endotransglycosylase (XTR3); protein
  misc_feature (23)..(300): Homolog of NCBI NO: 8886865 NR Description: xyloglucan endotransglycosylase XET1 [Asparagus
  misc_feature (250)..(301): Homolog of NCBI NO: 32489753 NR Description: OSJNBb0015N08.5 [Oryza sativa (japonica
  misc_feature (25)..(249): Homolog of NCBI NO: 32489753 NR Description: OSJNBb0015N08.5 [Oryza sativa (japonica
  misc_feature (25)..(264): Homolog of NCBI NO: 7447411 NR Description: end-xyloglucan transferase (EC 2.4.1.-) - rice
  misc_feature (32)..(302): Homolog of NCBI NO: 14330334 NR Description: Xet2 protein [Festuca pratensis]
  misc_feature (32)..(302): Homolog of NCBI NO: 7447415 NR Description: xyloglucan endotransglycosylase (EC 2.4.1.-) -
  misc_feature (27)..(302): Homolog of NCBI NO: 7447410 NR Description: xyloglucan endo-1,4-beta-D-glucanase (EC 3.2.1.-)
  misc_feature (25)..(302): Homolog of NCBI NO: 40253521 NR Description: putative end-xyloglucan transferase
SYLAPRHFPLASLQGEQSTMTMLRAVSVTVGVAVALLAAATAAESWLYEEFTTDGNVRADYNAQGQQVASLMLTQQSGGGAFGSRQKYLYGEFSIQMKLVPGNSAGTVTSFYLSSGDGPGHDEIDMEFMGNSTGQPVVLNTNVWANGDGKKEHQFDLWFDPAADYHTYTIIWNHKNVLFKVDDLFIRSFRRHADLPYPGAKPMSVHATLWDGSYWATLKGKVPVDWSGAPFLVSYRAYSADACVPAEGGPLSCPAGTDRWMNRQLDDAERGTVAWAKRDYMRYNYCDDGWRFPQGFPAECSRA

SEQ ID NO: 62203 - protein, 284 aa, Triticum aestivum
  peptide (1)..(284): Ceres Seq. ID no. 12578440
  misc_feature (29)..(208): Pfam Name: Glycosyl hydrolases family 16 Pfam Description: Glycosyl hydrolases family 16
  misc_feature (10)..(281): Homolog of NCBI NO: 2129773 NR Description: xyloglucan endo-1,4-beta-D-glucanase (EC 3.2.1.-)
  misc_feature (2)..(281): Homolog of NCBI NO: 22327914 NR Description: xyloglucan endotransglycosylase (XTR3); protein
  misc_feature (4)..(281): Homolog of NCBI NO: 8886865 NR Description: xyloglucan endotransglycosylase XET1 [Asparagus
  misc_feature (231)..(282): Homolog of NCBI NO: 32489753 NR Description: OSJNBb0015N08.5 [Oryza sativa (japonica
  misc_feature (6)..(230): Homolog of NCBI NO: 32489753 NR Description: OSJNBb0015N08.5 [Oryza sativa (japonica
  misc_feature (6)..(245): Homolog of NCBI NO: 7447411 NR Description: end-xyloglucan transferase (EC 2.4.1.-) - rice
  misc_feature (13)..(283): Homolog of NCBI NO: 14330334 NR Description: Xet2 protein [Festuca pratensis]
  misc_feature (13)..(283): Homolog of NCBI NO: 7447415 NR Description: xyloglucan endotransglycosylase (EC 2.4.1.-) -
  misc_feature (8)..(283): Homolog of NCBI NO: 7447410 NR Description: xyloglucan endo-1,4-beta-D-glucanase (EC 3.2.1.-)
  misc_feature (6)..(283): Homolog of NCBI NO: 40253521 NR Description: putative end-xyloglucan transferase
MTMLRAVSVTVGVAVALLAAATAAESWLYEEFTTDGNVRADYNAQGQQVASLMLTQQSGGGAFGSRQKYLYGEFSIQMKLVPGNSAGTVTSFYLSSGDGPGHDEIDMEFMGNSTGQPVVLNTNVWANGDGKKEHQFDLWFDPAADYHTYTIIWNHKNVLFKVDDLFIRSFRRHADLPYPGAKPMSVHATLWDGSYWATLKGKVPVDWSGAPFLVSYRAYSADACVPAEGGPLSCPAGTDRWMNRQLDDAERGTVAWAKRDYMRYNYCDDGWRFPQGFPAECSRA

SEQ ID NO: 62204 - protein, 282 aa, Triticum aestivum
  peptide (1)..(282): Ceres Seq. ID no. 12578441
  misc_feature (27)..(206): Pfam Name: Glycosyl hydrolases family 16 Pfam Description: Glycosyl hydrolases family 16
  misc_feature (8)..(279): Homolog of NCBI NO: 2129773 NR Description: xyloglucan endo-1,4-beta-D-glucanase (EC 3.2.1.-)
  misc_feature (1)..(279): Homolog of NCBI NO: 22327914 NR Description: xyloglucan endotransglycosylase (XTR3); protein
  misc_feature (2)..(279): Homolog of NCBI NO: 8886865 NR Description: xyloglucan endotransglycosylase XET1 [Asparagus
  misc_feature (229)..(280): Homolog of NCBI NO: 32489753 NR Description: OSJNBb0015N08.5 [Oryza sativa (japonica
  misc_feature (4)..(228): Homolog of NCBI NO: 32489753 NR Description: OSJNBb0015N08.5 [Oryza sativa (japonica
  misc_feature (4)..(243): Homolog of NCBI NO: 7447411 NR Description: end-xyloglucan transferase (EC 2.4.1.-) - rice
  misc_feature (11)..(281): Homolog of NCBI NO: 14330334 NR Description: Xet2 protein [Festuca pratensis]
  misc_feature (11)..(281): Homolog of NCBI NO: 7447415 NR Description: xyloglucan endotransglycosylase (EC 2.4.1.-) -
  misc_feature (6)..(281): Homolog of NCBI NO: 7447410 NR Description: xyloglucan endo-1,4-beta-D-glucanase (EC 3.2.1.-)
  misc_feature (4)..(281): Homolog of NCBI NO: 40253521 NR Description: putative end-xyloglucan transferase
MLRAVSVTVGVAVALLAAATAAESWLYEEFTTDGNVRADYNAQGQQVASLMLTQQSGGGAFGSRQKYLYGEFSIQMKLVPGNSAGTVTSFYLSSGDGPGHDEIDMEFMGNSTGQPVVLNTNVWANGDGKKEHQFDLWFDPAADYHTYTIIWNHKNVLFKVDDLFIRSFRRHADLPYPGAKPMSVHATLWDGSYWATLKGKVPVDWSGAPFLVSYRAYSADACVPAEGGPLSCPAGTDRWMNRQLDDAERGTVAWAKRDYMRYNYCDDGWRFPQGFPAECSRA

SEQ ID NO: 62205 - DNA, 757 bp, Triticum aestivum
  misc_feature (1)..(757): Ceres Seq. ID no. 12598353
aaggagggaaagacgactattttcctccgcctcgatcccatcgccgtctcccccccacacctcgatcccgccgccgccccacccaccatggcgcgggcgaagccgtcgtcggcggcggcgaagaagagccaggcggcgcagcagggcggcggggccgggcacgcggcgccgtccgggctcgcgcggtacctcgacccggaggcgccgtgggacaaggaccggctgctggacgccgtgcactggatccgccaggcggtgggcctcgcctgcggccttctctggggcgccgtcccgctcgtcggcgccgcctggatcgtcctgttcgtggccatttcttctggcataatttactggtactatgcgcacctattgaaggtcgacgaggaagaatttggaggccatggcgcgctgcttcaggaggggatgtttgcatctttcaccctttttcctgctttcatggatttctttgtgtacagtttggctcacttttgatgagaagctcctttgttgaacatacccttgatttgggatcggattggcggaaaaaaattcaccagaactctgtagattattgaagagccctagaacagcattgtatgaaatcggttcaggcagtcatgttgtctctgaatcccagtgtaattttgatagaacatcttagcataccagttgttggcagaacatgttcagtatgcttgacatgtaactattggatatcattctcctgcgtcgattcaataaaatgttttaacatgtg

SEQ ID NO: 62206 - protein, 190 aa, Triticum aestivum
  peptide (1)..(190): Ceres Seq. ID no. 12598354
GGKDDYFPPPRSHRRLPPTPRSRRRPTHHGAGEAVVGGGEEEPGGAAGRRGRARGAVRARAVPRPGGAVGQGPAAGRRALDPPGGGPRLRPSLGRRPARRRRLDRPVRGHFFWHNLLVLCAPIEGRRGRIWRPWRAASGGDVCIFHPFSCFHGFLCVQFGSLLMRSSFVEHTLDLGSDWRKKIHQNSVDY

SEQ ID NO: 62207 - protein, 163 aa, Triticum aestivum
  peptide (1)..(163): Ceres Seq. ID no. 12598355
  misc_feature (9)..(162): Homolog of NCBI NO: 34872254 NR Description: similar to RIKEN cDNA 1110008F13 [Rattus
  misc_feature (37)..(149): Homolog of NCBI NO: 24211596 NR Description: Protein C20orf24 (Rab5-interacting protein)
  misc_feature (36)..(163): Homolog of NCBI NO: 27503935 NR Description: Similar to RIKEN cDNA 1110008F13 gene [Danio
  misc_feature (37)..(163): Homolog of NCBI NO: 27704314 NR Description: similar to RIKEN cDNA 1110008F13
  misc_feature (37)..(163): Homolog of NCBI NO: 10047116 NR Description: putative Rab5-interacting protein [Homo sapiens]
  misc_feature (37)..(163): Homolog of NCBI NO: 13385630 NR Description: RIKEN cDNA 1110008F13 [Mus musculus]
  misc_feature (30)..(163): Homolog of NCBI NO: 18401926 NR Description: expressed protein
  misc_feature (37)..(155): Homolog of NCBI NO: 8885547 NR Description: gb|AAF17201.1~gene_id:F2O15.9~similar to unknown
  misc_feature (37)..(163): Homolog of NCBI NO: 15238396 NR Description: putative Rab5-interacting protein - like; protein
  misc_feature (30)..(149): Homolog of NCBI NO: 14719336 NR Description: hypothetical protein [Oryza sativa]
KEGKTTIFLRLDPIAVSPPHLDPAAAPPTMARAKPSSAAAKKSQAAQQGGGAGHAAPSGLARYLDPEAPWDKDRLLDAVHWIRQAVGLACGLLWGAVPLVGAAWIVLFVAISSGIIYWYYAHLLKVDEEEFGGHGALLQEGMFASFTLFPAFMDFFVYSLAHF

SEQ ID NO: 62208 - protein, 134 aa, Triticum aestivum
  peptide (1)..(134): Ceres Seq. ID no. 12598356
  misc_feature (1)..(133): Homolog of NCBI NO: 34872254 NR Description: similar to RIKEN cDNA 1110008F13 [Rattus
  misc_feature (8)..(120): Homolog of NCBI NO: 24211596 NR Description: Protein C20orf24 (Rab5-interacting protein)
  misc_feature (7)..(134): Homolog of NCBI NO: 27503935 NR Description: Similar to RIKEN cDNA 1110008F13 gene [Danio
  misc_feature (8)..(134): Homolog of NCBI NO: 27704314 NR Description: similar to RIKEN cDNA 1110008F13
  misc_feature (8)..(134): Homolog of NCBI NO: 10047116 NR Description: putative Rab5-interacting protein [Homo sapiens]
  misc_feature (8)..(134): Homolog of NCBI NO: 13385630 NR Description: RIKEN cDNA 1110008F13 [Mus musculus]
  misc_feature (1)..(134): Homolog of NCBI NO: 18401926 NR Description: expressed protein
  misc_feature (8)..(126): Homolog of NCBI NO: 8885547 NR Description: gb|AAF17201.1~gene_id:F2O15.9~similar to unknown
  misc_feature (8)..(134): Homolog of NCBI NO: 15238396 NR Description: putative Rab5-interacting protein - like; protein
  misc_feature (1)..(120): Homolog of NCBI NO: 14719336 NR Description: hypothetical protein [Oryza sativa]
MARAKPSSAAAKKSQAAQQGGGAGHAAPSGLARYLDPEAPWDKDRLLDAVHWIRQAVGLACGLLWGAVPLVGAAWIVLFVAISSGIIYWYYAHLLKVDEEEFGGHGALLQEGMFASFTLFPAFMDFFVYSLAHF

SEQ ID NO: 62209 - DNA, 967 bp, Triticum aestivum
  misc_feature (1)..(967): Ceres Seq. ID no. 13598305
ctagaacatcctaatcgaaaaacatcccgccccccacagccatccgtccacagagtcaccacagccgcaccgcagctccatcttcaccaccgtcatcgtcaacgagaagcagcggcgagcagcagcgcccggccaagagacgagacgagacgagagaacaagtgttgccatggccgcgatggagagcaagagccggaggttcgcgctggcgtgcggcgtcctcagccagtacgtcaaggcggagcagaagatgtcctcctccgccgtcgtcgccccgcccccgcgcgccccgccggccaccacgctcagcctcatgcccggcgccgacgtcggccaggaccacgccgcggcggccgctgaggaggcgggcccggccacgccgctcaccatcttctacggcggcagggtagtcgtcttcgaggacttccccgcggacaaggcggccgaggtcatgcgcatggccaccaccgccggcgtcgagcgcgcggccgccacgcccgccccggccccggcgctcgcggacctgcccatcatgcgcaaggcctccctgcagaggttcttcgagaagcgcaaggaccgcctcggcgcgcgcgcgccctacgcccgccccgccgcgccggcagccaacaagggctcggaggacaagtcggcgtcgtcctcctcgtggctcgggctggccagcgccgacggcgccttcgcgctctgatccggacggacggacggacggggcaagacggcttgctcgctcgcctcaagacatcgtttgtagagcactttcaattttaatgtattctttgggtaaaaattcgaatagcgaaagaaagaaagaaagaaacaagattgagttcatagcaagccctctttgttcgttcgtttgatttgatcgacaaattcttttgatttctgcgcggatcatcagccatggttcgcacagaaacccagttcagttcatgaaccgaacaataac

SEQ ID NO: 62210 - protein, 178 aa, Triticum aestivum
  peptide (1)..(178): Ceres Seq. ID no. 13598306
  misc_feature (68)..(100): Pfam Name: ZIM motif Pfam Description: ZIM motif
  misc_feature (69)..(98): Homolog of NCBI NO: 18410737 NR Description: expressed protein [Arabidopsis thaliana]
  misc_feature (98)..(163): Homolog of NCBI NO: 18410737 NR Description: expressed protein [Arabidopsis thaliana]
  misc_feature (69)..(98): Homolog of NCBI NO: 21592605 NR Description: unknown [Arabidopsis thaliana]
  misc_feature (98)..(163): Homolog of NCBI NO: 21592605 NR Description: unknown [Arabidopsis thaliana]
  misc_feature (7)..(135): Homolog of NCBI NO: 37533952 NR Description: hypothetical protein [Oryza sativa (japonica
  misc_feature (1)..(167): Homolog of NCBI NO: 24960745 NR Description: Unknown protein [Oryza sativa (japonica
  misc_feature (1)..(171): Homolog of NCBI NO: 24960744 NR Description: Unknown protein [Oryza sativa (japonica
  misc_feature (1)..(169): Homolog of NCBI NO: 37533958 NR Description: unknown protein [Oryza sativa (japonica
  misc_feature (1)..(155): Homolog of NCBI NO: 37533948 NR Description: hypothetical protein [Oryza sativa (japonica
  misc_feature (4)..(177): Homolog of NCBI NO: 24960746 NR Description: Unknown protein [Oryza sativa (japonica
MAAMESKSRRFALACGVLSQYVKAEQKMSSSAVVAPPPRAPPATTLSLMPGADVGQDHAAAAAEEAGPATPLTIFYGGRVVVFEDFPADKAAEVMRMATTAGVERAAATPAPAPALADLPIMRKASLQRFFEKRKDRLGARAPYARPAAPAANKGSEDKSASSSSWLGLASADGAFAL

SEQ ID NO: 62211 - protein, 175 aa, Triticum aestivum
  peptide (1)..(175): Ceres Seq. ID no. 13598307
  misc_feature (65)..(97): Pfam Name: ZIM motif Pfam Description: ZIM motif
  misc_feature (66)..(95): Homolog of NCBI NO: 18410737 NR Description: expressed protein [Arabidopsis thaliana]
  misc_feature (95)..(160): Homolog of NCBI NO: 18410737 NR Description: expressed protein [Arabidopsis thaliana]
  misc_feature (66)..(95): Homolog of NCBI NO: 21592605 NR Description: unknown [Arabidopsis thaliana]
  misc_feature (95)..(160): Homolog of NCBI NO: 21592605 NR Description: unknown [Arabidopsis thaliana]
  misc_feature (4)..(132): Homolog of NCBI NO: 37533952 NR Description: hypothetical protein [Oryza sativa (japonica
  misc_feature (1)..(164): Homolog of NCBI NO: 24960745 NR Description: Unknown protein [Oryza sativa (japonica
  misc_feature (1)..(168): Homolog of NCBI NO: 24960744 NR Description: Unknown protein [Oryza sativa (japonica
  misc_feature (1)..(166): Homolog of NCBI NO: 37533958 NR Description: unknown protein [Oryza sativa (japonica
  misc_feature (1)..(152): Homolog of NCBI NO: 37533948 NR Description: hypothetical protein [Oryza sativa (japonica
  misc_feature (1)..(174): Homolog of NCBI NO: 24960746 NR Description: Unknown protein [Oryza sativa (japonica
MESKSRRFALACGVLSQYVKAEQKMSSSAVVAPPPRAPPATTLSLMPGADVGQDHAAAAAEEAGPATPLTIFYGGRVVVFEDFPADKAAEVMRMATTAGVERAAATPAPAPALADLPIMRKASLQRFFEKRKDRLGARAPYARPAAPAANKGSEDKSASSSSWLGLASADGAFAL

SEQ ID NO: 62212 - protein, 151 aa, Triticum aestivum
  peptide (1)..(151): Ceres Seq. ID no. 13598308
  misc_feature (41)..(73): Pfam Name: ZIM motif Pfam Description: ZIM motif
  misc_feature (42)..(71): Homolog of NCBI NO: 18410737 NR Description: expressed protein [Arabidopsis thaliana]
  misc_feature (71)..(136): Homolog of NCBI NO: 18410737 NR Description: expressed protein [Arabidopsis thaliana]
  misc_feature (42)..(71): Homolog of NCBI NO: 21592605 NR Description: unknown [Arabidopsis thaliana]
  misc_feature (71)..(136): Homolog of NCBI NO: 21592605 NR Description: unknown [Arabidopsis thaliana]
  misc_feature (1)..(108): Homolog of NCBI NO: 37533952 NR Description: hypothetical protein [Oryza sativa (japonica
  misc_feature (1)..(140): Homolog of NCBI NO: 24960745 NR Description: Unknown protein [Oryza sativa (japonica
  misc_feature (1)..(144): Homolog of NCBI NO: 24960744 NR Description: Unknown protein [Oryza sativa (japonica
  misc_feature (1)..(142): Homolog of NCBI NO: 37533958 NR Description: unknown protein [Oryza sativa (japonica
  misc_feature (1)..(128): Homolog of NCBI NO: 37533948 NR Description: hypothetical protein [Oryza sativa (japonica
  misc_feature (1)..(150): Homolog of NCBI NO: 24960746 NR Description: Unknown protein [Oryza sativa (japonica
MSSSAVVAPPPRAPPATTLSLMPGADVGQDHAAAAAEEAGPATPLTIFYGGRVVVFEDFPADKAAEVMRMATTAGVERAAATPAPAPALADLPIMRKASLQRFFEKRKDRLGARAPYARPAAPAANKGSEDKSASSSSWLGLASADGAFAL

SEQ ID NO: 62213 - DNA, 958 bp, Triticum aestivum
  misc_feature (1)..(958): Ceres Seq. ID no. 13596116
atctcatctccgaggaaccatcaatccgagatagctctacaaccagcaaagccatccaaagccatgaggttgcagtgctccctggtcctcctgatcgccctgagcgtcggctgcgcggcagcgcaggagagcgggaaacaggcgggctacgatttcttctacctcgtgctgcagtggccggggtcgtactgcgacacgaagcagagctgctgctacccgcggtccggcaaaccggcggcggacttcgggatccacgggctgtggcccaaccgcgacgacgggtcctacccgcagaactgcaaccccgacagcgccttcgatccctccaaggtgagcgacatcctgagcagcctgcgcagcagctggccgacgctggcgtgcccgaccaacgacggcctccgcttctgggcgcacgagtgggagaagcacggcacctgcgcgcagaacctcttcaacgagcacggctacttccaggccgccctccgcctgcgcggccagctccgcgtcctcgacgccctcgccaccgcgggcatctcccccgacggcgggtactacacgatgggggccatcaagggcgccatccaggaggggaccgggttcgcgcctcacgtcgactgcaaccgcgacgagtccggcaacagccagctcttccagctctacttctgcgtccacgccgacgcctcccgcttcgtcgagtgccccgtccagcccggcggcaggccctgtggcaacaggatcgagttcccggctttctgatcattatctcctccaacccaaggagttatcatgtgttccttaatttgcctcccgattcctagatattcatttggttttcatttcttgccgctggcagaataaactgagggtgcatattcgaacatgtgctcgttttctttctttcccccccttaattttcatgttaatgacctgatctcaggcagcaattgaagttacgacg

SEQ ID NO: 62214 - protein, 271 aa, Triticum aestivum
  peptide (1)..(271): Ceres Seq. ID no. 13596117
LISEEPSIRDSSTTSKAIQSHEVAVLPGPPDRPERRLRGSAGERETGGLRFLLPRAAVAGVVLRHEAELLLPAVRQTGGGLRDPRAVAQPRRRVLPAELQPRQRLRSLQGERHPEQPAQQLADAGVPDQRRPPLLGARVGEARHLRAEPLQRARLLPGRPPPARPAPRPRRPRHRGHLPRRRVLHDGGHQGRHPGGDRVRASRRLQPRRVRQQPALPALLLRPRRRLPLRRVPRPARRQALWQQDRVPGFLIIISSNPRSYHVFLNLPPDS

SEQ ID NO: 62215 - protein, 251 aa, Triticum aestivum
  peptide (1)..(251): Ceres Seq. ID no. 13596118
  misc_feature (50)..(239): Pfam Name: Ribonuclease T2 family Pfam Description: Ribonuclease T2 family
  misc_feature (13)..(251): Homolog of NCBI NO: 2148018 NR Description: ribonuclease II (EC 3.1.-.-) precursor,
  misc_feature (22)..(251): Homolog of NCBI NO: 3860325 NR Description: ribonuclease T2 [Cicer arietinum]
  misc_feature (27)..(251): Homolog of NCBI NO: 532754 NR Description: RNase NE [Nicotiana alata]
  misc_feature (50)..(251): Homolog of NCBI NO: 34810726 NR Description: Chain A, Crystal Structure Of The Nicotiana
  misc_feature (28)..(251): Homolog of NCBI NO: 9081845 NR Description: S-like ribonuclease [Prunus dulcis]
  misc_feature (27)..(251): Homolog of NCBI NO: 7768564 NR Description: RNase [Nicotiana tabacum]
  misc_feature (27)..(251): Homolog of NCBI NO: 7435266 NR Description: ribonuclease M5 (EC 3.1.-.-) precursor,
  misc_feature (28)..(240): Homolog of NCBI NO: 11990470 NR Description: ribonuclease [Oryza sativa (japonica
  misc_feature (28)..(251): Homolog of NCBI NO: 11990466 NR Description: ribonuclease [Oryza sativa]
  misc_feature (22)..(251): Homolog of NCBI NO: 7435265 NR Description: ribonuclease (EC 3.1.-.-) - barley
ISSPRNHQSEIALQPAKPSKAMRLQCSLVLLIALSVGCAAAQESGKQAGYDFFYLVLQWPGSYCDTKQSCCYPRSGKPAADFGIHGLWPNRDDGSYPQNCNPDSAFDPSKVSDILSSLRSSWPTLACPTNDGLRFWAHEWEKHGTCAQNLFNEHGYFQAALRLRGQLRVLDALATAGISPDGGYYTMGAIKGAIQEGTGFAPHVDCNRDESGNSQLFQLYFCVHADASRFVECPVQPGGRPCGNRIEFPAF

SEQ ID NO: 62216 - protein, 230 aa, Triticum aestivum
  peptide (1)..(230): Ceres Seq. ID no. 13596119
  misc_feature (29)..(218): Pfam Name: Ribonuclease T2 family Pfam Description: Ribonuclease T2 family
  misc_feature (1)..(230): Homolog of NCBI NO: 2148018 NR Description: ribonuclease II (EC 3.1.-.-) precursor,
  misc_feature (1)..(230): Homolog of NCBI NO: 3860325 NR Description: ribonuclease T2 [Cicer arietinum]
  misc_feature (6)..(230): Homolog of NCBI NO: 532754 NR Description: RNase NE [Nicotiana alata]
  misc_feature (29)..(230): Homolog of NCBI NO: 34810726 NR Description: Chain A, Crystal Structure Of The Nicotiana
  misc_feature (7)..(230): Homolog of NCBI NO: 9081845 NR Description: S-like ribonuclease [Prunus dulcis]
  misc_feature (6)..(230): Homolog of NCBI NO: 7768564 NR Description: RNase [Nicotiana tabacum]
  misc_feature (6)..(230): Homolog of NCBI NO: 7435266 NR Description: ribonuclease M5 (EC 3.1.-.-) precursor,
  misc_feature (7)..(219): Homolog of NCBI NO: 11990470 NR Description: ribonuclease [Oryza sativa (japonica
  misc_feature (7)..(230): Homolog of NCBI NO: 11990466 NR Description: ribonuclease [Oryza sativa]
  misc_feature (1)..(230): Homolog of NCBI NO: 7435265 NR Description: ribonuclease (EC 3.1.-.-) - barley
MRLQCSLVLLIALSVGCAAAQESGKQAGYDFFYLVLQWPGSYCDTKQSCCYPRSGKPAADFGIHGLWPNRDDGSYPQNCNPDSAFDPSKVSDILSSLRSSWPTLACPTNDGLRFWAHEWEKHGTCAQNLFNEHGYFQAALRLRGQLRVLDALATAGISPDGGYYTMGAIKGAIQEGTGFAPHVDCNRDESGNSQLFQLYFCVHADASRFVECPVQPGGRPCGNRIEFPAF

SEQ ID NO: 62217 - DNA, 1109 bp, Triticum aestivum
  misc_feature (1)..(1109): Ceres Seq. ID no. 13596484
aaatgctcgtactctctctcccatctcccgcccggctgcttaaaagcccattatcggcgccgcctgtgacctcacctcactccgcctcgcagtcataattctccctagcatctttcttaccactagtattagtaggaggacctcctcctgttgctgctggagtggttgcttgtgtggtagagaggagaggagagggagatggaaggaggaggcgcggacggggtgacgagggtgctgctggtggacgactccccggtggacaggaaggtggtggaactggtgctcggcagcaacaccttcgccggctccttccacgtcgtcgccgtggacagcgccaagaaggccatggagttcctggggctcaaggacggcaaggagcaggccgtcgacatggtgctcactgactactgcatgcctgagatgaccggctacgacctcctcaaagccatcaaggcgatgagtcctctcaagcccatcccggtgatcgtcatgtcgtcggagaacgagccccagaggatcagcagatgcctcaaggctggtgctgaagattacatcgtcaagcctcttcagagcaaggatgtgccgcgtctgaggagctgctcgaacgtgaaacccaaggaccctccatgcagcactgtgagcaagagctcggaccatatagctgctgtcgatggcaagtcgtcgctgcgacggcgagcacacctcaccgatattgccatggttctccactcgtcgagcgccgggctctcgcactacttcccgttcctcttcaagttcatcctgctggtctacgccatcctgtgcgtcggcgagctcctgcacagatggtccaacggctgcttcctctcctacctgaggtgatggtgccgcggtccagtgacatgctgcagctctgcaaggagtagctcgtgtgtcgtagcttatgagtgagcagtgaacctccatgtttcaacaaccatggatggagctttaggtagtagattcgtttgctttgagattctctgaccgggcgtcagttcttggccttgttgggctgacgagttgaggaagaaccccttgtatccatccttgtacaaaacgcacaatgaggcaggcggtatctgatgtcc

SEQ ID NO: 62218 - protein, 220 aa, Triticum aestivum
  peptide (1)..(220): Ceres Seq. ID no. 13596485
  misc_feature (11)..(136): Pfam Name: Response regulator receiver domain Pfam Description: Response regulator receiver domain
  misc_feature (12)..(133): Homolog of NCBI NO: 34901288 NR Description: similar to response regulator
  misc_feature (12)..(131): Homolog of NCBI NO: 33330868 NR Description: type-A response regulator [Catharanthus roseus]
  misc_feature (12)..(133): Homolog of NCBI NO: 15218550 NR Description: response regulator1 (ATRR1) [Arabidopsis
  misc_feature (12)..(159): Homolog of NCBI NO: 13173408 NR Description: response regulator protein [Dianthus caryophyllus]
  misc_feature (6)..(133): Homolog of NCBI NO: 34906626 NR Description: putative response regulator
  misc_feature (12)..(138): Homolog of NCBI NO: 11358972 NR Description: repsonse regulator ZmRR2 [imported] - maize
  misc_feature (1)..(133): Homolog of NCBI NO: 15218957 NR Description: response regulator 3 [Arabidopsis thaliana]
  misc_feature (6)..(142): Homolog of NCBI NO: 12060386 NR Description: response regulator 5 [Zea mays]
  misc_feature (1)..(137): Homolog of NCBI NO: 11041692 NR Description: response regulator [Zea mays]
  misc_feature (2)..(217): Homolog of NCBI NO: 12060390 NR Description: response regulator 7 [Zea mays]
MEGGGADGVTRVLLVDDSPVDRKVVELVLGSNTFAGSFHVVAVDSAKKAMEFLGLKDGKEQAVDMVLTDYCMPEMTGYDLLKAIKAMSPLKPIPVIVMSSENEPQRISRCLKAGAEDYIVKPLQSKDVPRLRSCSNVKPKDPPCSTVSKSSDHIAAVDGKSSLRRRAHLTDIAMVLHSSSAGLSHYFPFLFKFILLVYAILCVGELLHRWSNGCFLSYLR

SEQ ID NO: 62219 - protein, 171 aa, Triticum aestivum
  peptide (1)..(171): Ceres Seq. ID no. 13596486
  misc_feature (1)..(87): Pfam Name: Response regulator receiver domain Pfam Description: Response regulator receiver domain
  misc_feature (1)..(84): Homolog of NCBI NO: 34901288 NR Description: similar to response regulator
  misc_feature (1)..(82): Homolog of NCBI NO: 33330868 NR Description: type-A response regulator [Catharanthus roseus]
  misc_feature (1)..(84): Homolog of NCBI NO: 15218550 NR Description: response regulator1 (ATRR1) [Arabidopsis
  misc_feature (1)..(110): Homolog of NCBI NO: 13173408 NR Description: response regulator protein [Dianthus caryophyllus]
  misc_feature (1)..(84): Homolog of NCBI NO: 34906626 NR Description: putative response regulator
  misc_feature (1)..(89): Homolog of NCBI NO: 11358972 NR Description: repsonse regulator ZmRR2 [imported] - maize
  misc_feature (1)..(84): Homolog of NCBI NO: 15218957 NR Description: response regulator 3 [Arabidopsis thaliana]
  misc_feature (1)..(93): Homolog of NCBI NO: 12060386 NR Description: response regulator 5 [Zea mays]
  misc_feature (1)..(88): Homolog of NCBI NO: 11041692 NR Description: response regulator [Zea mays]
  misc_feature (1)..(168): Homolog of NCBI NO: 12060390 NR Description: response regulator 7 [Zea mays]
MEFLGLKDGKEQAVDMVLTDYCMPEMTGYDLLKAIKAMSPLKPIPVIVMSSENEPQRISRCLKAGAEDYIVKPLQSKDVPRLRSCSNVKPKDPPCSTVSKSSDHIAAVDGKSSLRRRAHLTDIAMVLHSSSAGLSHYFPFLFKFILLVYAILCVGELLHRWSNGCFLSYLR

SEQ ID NO: 62220 - protein, 156 aa, Triticum aestivum
  peptide (1)..(156): Ceres Seq. ID no. 13596487
  misc_feature (1)..(72): Pfam Name: Response regulator receiver domain Pfam Description: Response regulator receiver domain
  misc_feature (1)..(69): Homolog of NCBI NO: 34901288 NR Description: similar to response regulator
  misc_feature (1)..(67): Homolog of NCBI NO: 33330868 NR Description: type-A response regulator [Catharanthus roseus]
  misc_feature (1)..(69): Homolog of NCBI NO: 15218550 NR Description: response regulator1 (ATRR1) [Arabidopsis
  misc_feature (1)..(95): Homolog of NCBI NO: 13173408 NR Description: response regulator protein [Dianthus caryophyllus]
  misc_feature (1)..(69): Homolog of NCBI NO: 34906626 NR Description: putative response regulator
  misc_feature (1)..(74): Homolog of NCBI NO: 11358972 NR Description: repsonse regulator ZmRR2 [imported] - maize
  misc_feature (1)..(69): Homolog of NCBI NO: 15218957 NR Description: response regulator 3 [Arabidopsis thaliana]
  misc_feature (1)..(78): Homolog of NCBI NO: 12060386 NR Description: response regulator 5 [Zea mays]
  misc_feature (1)..(73): Homolog of NCBI NO: 11041692 NR Description: response regulator [Zea mays]
  misc_feature (1)..(153): Homolog of NCBI NO: 12060390 NR Description: response regulator 7 [Zea mays]
MVLTDYCMPEMTGYDLLKAIKAMSPLKPIPVIVMSSENEPQRISRCLKAGAEDYIVKPLQSKDVPRLRSCSNVKPKDPPCSTVSKSSDHIAAVDGKSSLRRRAHLTDIAMVLHSSSAGLSHYFPFLFKFILLVYAILCVGELLHRWSNGCFLSYLR

SEQ ID NO: 62221 - DNA, 966 bp, Triticum aestivum
  misc_feature (1)..(966): Ceres Seq. ID no. 13583358
atggatggctgattctccaccggtacatcccgtcaccggtaaaaaaacttattcggcagctcccagccgtgcgccgtctcaactctcaagcgccgctcgccagcgaaacccgatccaagacaacaatacccactcccaaccttctgtggcgatggcagcactggcgaggagggcgggaggatcccctgcggcggcgctgtgggccgcggccaggggattcgcgtcggtcggctccgacatcgtctccgcggcgcccggcgtgtcgctgcagaaggcgcggtcctgggacgagggggtcgccaccaagttctccaccacccctctcaaggacatcttccatgggaagaaagtcgtcatcttcgggttgccgggtgcatacacaggagtatgttcgcagtcccacgttcctagttacaagaacaacattgataagttgaaagcaaaagggatcgactctgttatctgtgtagctgtaaatgatccctatgtgctgaatggatgggcagaaaaattacaggcaaaagatgcaattgagttttatggtgaccttgacgggagcttccacaaaagcttggatttggaaatagatctctctgctgctttgcttggtcgacgctcccacaggtggtcggcctttgtcgatgatgggaagatcaaggcattcaacgttgagaaagccccttctgacttcaaggtttctggtgctgaggtgatcttggatcaaatctgagctgatcggtaatcggtgctctgttttgcttttgtgatgcaaataagtgacagctcgagaatctgtgtgaagatgttgctgtctgtcgtgctagttccaggacagtcattttgctgctgcaaatctttatttcttttgttccagaacagtcatcgaattagtcaccggttcgtgtatgcgacagtttctgttatttggcgtttgatgaagagctgtgctcgcgtgcaggtaatccg

SEQ ID NO: 62222 - protein, 242 aa, Triticum aestivum
  peptide (1)..(242): Ceres Seq. ID no. 13583359
  misc_feature (80)..(240): Pfam Name: AhpC/TSA family Pfam Description: AhpC/TSA family
  misc_feature (107)..(239): Homolog of NCBI NO: 27367181 NR Description: Peroxiredoxin [Vibrio vulnificus CMCP6]
  misc_feature (110)..(239): Homolog of NCBI NO: 28901148 NR Description: putative antioxidant [Vibrio parahaemolyticus
  misc_feature (111)..(242): Homolog of NCBI NO: 15888122 NR Description: AGR_C_1423p [Agrobacterium tumefaciens]
  misc_feature (105)..(240): Homolog of NCBI NO: 15964668 NR Description: HYPOTHETICAL PEROXIREDOXIN PROTEIN [Sinorhizobium
  misc_feature (97)..(242): Homolog of NCBI NO: 23501379 NR Description: ahpC/TSA family protein [Brucella suis 1330]
  misc_feature (97)..(242): Homolog of NCBI NO: 17987739 NR Description: THIOL PEROXIDASE [Brucella melitensis]
  misc_feature (51)..(242): Homolog of NCBI NO: 18397457 NR Description: expressed protein [Arabidopsis thaliana]
  misc_feature (51)..(242): Homolog of NCBI NO: 7658343 NR Description: unknown protein; 13384-11892 [Arabidopsis
  misc_feature (55)..(242): Homolog of NCBI NO: 21553531 NR Description: unknown [Arabidopsis thaliana]
  misc_feature (52)..(242): Homolog of NCBI NO: 34903114 NR Description: unnamed protein product [Oryza sativa (japonica
WMADSPPVHPVTGKKTYSAAPSRAPSQLSSAARQRNPIQDNNTHSQPSVAMAALARRAGGSPAAALWAAARGFASVGSDIVSAAPGVSLQKARSWDEGVATKFSTTPLKDIFHGKKVVIFGLPGAYTGVCSQSHVPSYKNNIDKLKAKGIDSVICVAVNDPYVLNGWAEKLQAKDAIEFYGDLDGSFHKSLDLEIDLSAALLGRRSHRWSAFVDDGKIKAFNVEKAPSDFKVSGAEVILDQI

SEQ ID NO: 62223 - protein, 241 aa, Triticum aestivum
  peptide (1)..(241): Ceres Seq. ID no. 13583360
  misc_feature (79)..(239): Pfam Name: AhpC/TSA family Pfam Description: AhpC/TSA family
  misc_feature (106)..(238): Homolog of NCBI NO: 27367181 NR Description: Peroxiredoxin [Vibrio vulnificus CMCP6]
  misc_feature (109)..(238): Homolog of NCBI NO: 28901148 NR Description: putative antioxidant [Vibrio parahaemolyticus
  misc_feature (110)..(241): Homolog of NCBI NO: 15888122 NR Description: AGR_C_1423p [Agrobacterium tumefaciens]
  misc_feature (104)..(239): Homolog of NCBI NO: 15964668 NR Description: HYPOTHETICAL PEROXIREDOXIN PROTEIN [Sinorhizobium
  misc_feature (96)..(241): Homolog of NCBI NO: 23501379 NR Description: ahpC/TSA family protein [Brucella suis 1330]
  misc_feature (96)..(241): Homolog of NCBI NO: 17987739 NR Description: THIOL PEROXIDASE [Brucella melitensis]
  misc_feature (50)..(241): Homolog of NCBI NO: 18397457 NR Description: expressed protein [Arabidopsis thaliana]
  misc_feature (50)..(241): Homolog of NCBI NO: 7658343 NR Description: unknown protein; 13384-11892 [Arabidopsis
  misc_feature (54)..(241): Homolog of NCBI NO: 21553531 NR Description: unknown [Arabidopsis thaliana]
  misc_feature (51)..(241): Homolog of NCBI NO: 34903114 NR Description: unnamed protein product [Oryza sativa (japonica
MADSPPVHPVTGKKTYSAAPSRAPSQLSSAARQRNPIQDNNTHSQPSVAMAALARRAGGSPAAALWAAARGFASVGSDIVSAAPGVSLQKARSWDEGVATKFSTTPLKDIFHGKKVVIFGLPGAYTGVCSQSHVPSYKNNIDKLKAKGIDSVICVAVNDPYVLNGWAEKLQAKDAIEFYGDLDGSFHKSLDLEIDLSAALLGRRSHRWSAFVDDGKIKAFNVEKAPSDFKVSGAEVILDQI

SEQ ID NO: 62224 - protein, 192 aa, Triticum aestivum
  peptide (1)..(192): Ceres Seq. ID no. 13583361
  misc_feature (30)..(190): Pfam Name: AhpC/TSA family Pfam Description: AhpC/TSA family
  misc_feature (57)..(189): Homolog of NCBI NO: 27367181 NR Description: Peroxiredoxin [Vibrio vulnificus CMCP6]
  misc_feature (60)..(189): Homolog of NCBI NO: 28901148 NR Description: putative antioxidant [Vibrio parahaemolyticus
  misc_feature (61)..(192): Homolog of NCBI NO: 15888122 NR Description: AGR_C_1423p [Agrobacterium tumefaciens]
  misc_feature (55)..(190): Homolog of NCBI NO: 15964668 NR Description: HYPOTHETICAL PEROXIREDOXIN PROTEIN [Sinorhizobium
  misc_feature (47)..(192): Homolog of NCBI NO: 23501379 NR Description: ahpC/TSA family protein [Brucella suis 1330]
  misc_feature (47)..(192): Homolog of NCBI NO: 17987739 NR Description: THIOL PEROXIDASE [Brucella melitensis]
  misc_feature (1)..(192): Homolog of NCBI NO: 18397457 NR Description: expressed protein [Arabidopsis thaliana]
  misc_feature (1)..(192): Homolog of NCBI NO: 7658343 NR Description: unknown protein; 13384-11892 [Arabidopsis
  misc_feature (5)..(192): Homolog of NCBI NO: 21553531 NR Description: unknown [Arabidopsis thaliana]
  misc_feature (2)..(192): Homolog of NCBI NO: 34903114 NR Description: unnamed protein product [Oryza sativa (japonica
MAALARRAGGSPAAALWAAARGFASVGSDIVSAAPGVSLQKARSWDEGVATKFSTTPLKDIFHGKKVVIFGLPGAYTGVCSQSHVPSYKNNIDKLKAKGIDSVICVAVNDPYVLNGWAEKLQAKDAIEFYGDLDGSFHKSLDLEIDLSAALLGRRSHRWSAFVDDGKIKAFNVEKAPSDFKVSGAEVILDQI

SEQ ID NO: 62225 - DNA, 745 bp, Triticum aestivum
  misc_feature (1)..(745): Ceres Seq. ID no. 15224932
attaagtgtccgcggctgctagctcctcctccctctgtggtacgatcatcctcctctgctacgttgaccaagatggccgcgcgccttgcgcttgtggcgacgctcctgtgcgccggagccgcggccgccgcggcgcagcaggcgagcaacgtccgcgcgacctaccactactaccgcccggccgagaacggctgggacctgggcgcccctgccgtgagcgcctactgctccacctgggacgccggcaagccgtactcgtggcggtccaagtacggctggacggccttctgcggccccgccggcccccgcggccaggcgtcgtgcgggaggtgcatccgggtgaccaacacggggacgggggcgcagatcacggccaggatcgtggaccagtgcgccaacggcgggctggacctcgactgggacaccgtgttcgtcaagatcgataccgatggcatggggtaccagaggggccacctcatcgtcaactacgagttcgtcgactgcggcgacaaccacatcaacttccatggaaagaacgagacgctaccggccagcactggtgctgttgagtaagtaaaagctagtagcacatgcatgcattgatgttgcattgttgcgctgtacgcaaacatgtatgcatgcatggcacggaagttgaataagtcaaacgggaagttggaatgaatttcatgtatgaatcttatgattgtaacagcggaaagtgaaataaatctcagaagttgac

SEQ ID NO: 62226 - protein, 190 aa, Triticum aestivum
  peptide (1)..(190): Ceres Seq. ID no. 15224933
  misc_feature (47)..(168): Pfam Name: Barwin family Pfam Description: Barwin family
  misc_feature (53)..(172): Homolog of NCBI NO: 6002595 NR Description: pathogenesis-related protein 4 [Triticum aestivum]
  misc_feature (53)..(172): Homolog of NCBI NO: 6048569 NR Description: PR-4 [Triticum aestivum]
  misc_feature (46)..(170): Homolog of NCBI NO: 626038 NR Description: barwin homolog wheatwin1 - wheat
  misc_feature (46)..(170): Homolog of NCBI NO: 1588926 NR Description: pathogenesis-related protein
  misc_feature (46)..(170): Homolog of NCBI NO: 442693 NR Description: Barwin, Basic Barley Seed Protein (Nmr, 20
  misc_feature (46)..(170): Homolog of NCBI NO: 114832 NR Description: BARWIN
  misc_feature (25)..(171): Homolog of NCBI NO: 38018635 NR Description: pathogenesis-related protein 4b
  misc_feature (25)..(170): Homolog of NCBI NO: 34925030 NR Description: Wheatwin1 precursor (Pathogenesis-related protein
  misc_feature (25)..(170): Homolog of NCBI NO: 7442145 NR Description: pathogenesis-related protein 4 - barley
  misc_feature (25)..(170): Homolog of NCBI NO: 34925032 NR Description: Wheatwin2 precursor (Pathogenesis-related protein
IKCPRLLAPPPSVVRSSSSATLTKMAARLALVATLLCAGAAAAAAQQASNVRATYHYYRPAENGWDLGAPAVSAYCSTWDAGKPYSWRSKYGWTAFCGPAGPRGQASCGRCIRVTNTGTGAQITARIVDQCANGGLDLDWDTVFVKIDTDGMGYQRGHLIVNYEFVDCGDNHINFHGKNETLPASTGAVE

SEQ ID NO: 62227 - protein, 166 aa, Triticum aestivum
  peptide (1)..(166): Ceres Seq. ID no. 15224934
  misc_feature (23)..(144): Pfam Name: Barwin family Pfam Description: Barwin family
  misc_feature (29)..(148): Homolog of NCBI NO: 6002595 NR Description: pathogenesis-related protein 4 [Triticum aestivum]
  misc_feature (29)..(148): Homolog of NCBI NO: 6048569 NR Description: PR-4 [Triticum aestivum]
  misc_feature (22)..(146): Homolog of NCBI NO: 626038 NR Description: barwin homolog wheatwin1 - wheat
  misc_feature (22)..(146): Homolog of NCBI NO: 1588926 NR Description: pathogenesis-related protein
  misc_feature (22)..(146): Homolog of NCBI NO: 442693 NR Description: Barwin, Basic Barley Seed Protein (Nmr, 20
  misc_feature (22)..(146): Homolog of NCBI NO: 114832 NR Description: BARWIN
  misc_feature (1)..(147): Homolog of NCBI NO: 38018635 NR Description: pathogenesis-related protein 4b
  misc_feature (1)..(146): Homolog of NCBI NO: 34925030 NR Description: Wheatwin1 precursor (Pathogenesis-related protein
  misc_feature (1)..(146): Homolog of NCBI NO: 7442145 NR Description: pathogenesis-related protein 4 - barley
  misc_feature (1)..(146): Homolog of NCBI NO: 34925032 NR Description: Wheatwin2 precursor (Pathogenesis-related protein
MAARLALVATLLCAGAAAAAAQQASNVRATYHYYRPAENGWDLGAPAVSAYCSTWDAGKPYSWRSKYGWTAFCGPAGPRGQASCGRCIRVTNTGTGAQITARIVDQCANGGLDLDWDTVFVKIDTDGMGYQRGHLIVNYEFVDCGDNHINFHGKNETLPASTGAVE

SEQ ID NO: 62228 - DNA, 889 bp, Triticum aestivum
  misc_feature (1)..(889): Ceres Seq. ID no. 12587358
actttcccttaaaaaaaaggtgaggagggtgtggatcaatcgaatccaatcgaatcctaagctgaggatggcggcggtgctcaaggtgtatgcggaccggctgtcgcagccgtcgcgcgccatcatcatcttgtgcaaggtcaaccggatcgacttccaggagctcaccgtggatctcgccaagggacaacaccgcgcaccagaattcaccaaaatcaaccccatggcacaggtcccaacaatcgtcgatggaagattcaaactctttgaaagccatgccattctgaggtatcttgccaccgtcttccccggggttccagatcactggtatccggccgacttatttaccagagcaaaactcgagtctgtcttggattggcatcactctaatctgcgccgtggtgcagcaacctatgtactgcacaccgcgttgggtcctgctctcggcctcacaccgaatcctgaaaccgcaaaagaggccgagaagttgctgtcgcgatcactgggaacgatcgaaaccgtgtggctcaaaggcgatgcaaaattcttgaatggcaacccccagccatcaatcgcagacctcagcctcgtgtgcgagataatgcagctggaggttgttggtgatgagcgacgtgacagaattctgggacctcacgacaaggtgcgcgcttggatggagaatgtgaagaaggccaccagccctcattttgatgaggtccatgagctcatcttcaaactcaaggcacgcttgaacccagcagcatccaagctctgaagagatggatcctacacacatttacccaattcttctttcttcttgtcttgggattaaaacaagtactagcatccatgtactgtacgatgaaagaaagaaatactagtatgtttc

SEQ ID NO: 62229 - protein, 257 aa, Triticum aestivum
  peptide (1)..(257): Ceres Seq. ID no. 12587359
  misc_feature (118)..(232): Pfam Name: Glutathione S-transferase, C-terminal domain Pfam Description: Glutathione S-transferase, C-terminal domain
  misc_feature (23)..(250): Homolog of NCBI NO: 15430709 NR Description: putative glutathione S-transferase OsGSTT1
LSLKKKVRRVWINRIQSNPKLRMAAVLKVYADRLSQPSRAIIILCKVNRIDFQELTVDLAKGQHRAPEFTKINPMAQVPTIVDGRFKLFESHAILRYLATVFPGVPDHWYPADLFTRAKLESVLDWHHSNLRRGAATYVLHTALGPALGLTPNPETAKEAEKLLSRSLGTIETVWLKGDAKFLNGNPQPSIADLSLVCEIMQLEVVGDERRDRILGPHDKVRAWMENVKKATSPHFDEVHELIFKLKARLNPAASKL

SEQ ID NO: 62230 - protein, 235 aa, Triticum aestivum
  peptide (1)..(235): Ceres Seq. ID no. 12587360
  misc_feature (96)..(210): Pfam Name: Glutathione S-transferase, C-terminal domain Pfam Description: Glutathione S-transferase, C-terminal domain
  misc_feature (1)..(228): Homolog of NCBI NO: 15430709 NR Description: putative glutathione S-transferase OsGSTT1
MAAVLKVYADRLSQPSRAIIILCKVNRIDFQELTVDLAKGQHRAPEFTKINPMAQVPTIVDGRFKLFESHAILRYLATVFPGVPDHWYPADLFTRAKLESVLDWHHSNLRRGAATYVLHTALGPALGLTPNPETAKEAEKLLSRSLGTIETVWLKGDAKFLNGNPQPSIADLSLVCEIMQLEVVGDERRDRILGPHDKVRAWMENVKKATSPHFDEVHELIFKLKARLNPAASKL

SEQ ID NO: 62231 - protein, 183 aa, Triticum aestivum
  peptide (1)..(183): Ceres Seq. ID no. 12587361
  misc_feature (44)..(158): Pfam Name: Glutathione S-transferase, C-terminal domain Pfam Description: Glutathione S-transferase, C-terminal domain
  misc_feature (1)..(176): Homolog of NCBI NO: 15430709 NR Description: putative glutathione S-transferase OsGSTT1
MAQVPTIVDGRFKLFESHAILRYLATVFPGVPDHWYPADLFTRAKLESVLDWHHSNLRRGAATYVLHTALGPALGLTPNPETAKEAEKLLSRSLGTIETVWLKGDAKFLNGNPQPSIADLSLVCEIMQLEVVGDERRDRILGPHDKVRAWMENVKKATSPHFDEVHELIFKLKARLNPAASKL

SEQ ID NO: 62232 - DNA, 897 bp, Triticum aestivum
  misc_feature (1)..(897): Ceres Seq. ID no. 12584664
acgacgcggtctctcctccgctccgctccggtcaacccaagttcctcctcgcctcccaagccgtcttcctcctcctcgcagtgatggctgatgaggatgagtaccgatgcttcgttgggaacctgtcctggtccacaactgatgaaagcctcaaggatgcattctcaaaatatggcaaagttaccgaggcaaaggtggttatggacaagttttctggacgttcacgtggatttgcctttgtgacctttgatgagaagaaagccatggaagaagctatcgaggacatgaatggattggacttggaagggagggccatcactgttgataaagctcagcctcaaggggctggtagagatcgtaacggtgaccgtgattttgatcgtgaccgtgggtctcgtggtggccgtgactatggcggtggtcgtgcgccgcgtggtggtggtggtggggactgcttcaagtgcggcaaacctggacactttgctagagagtgtccagatggtgacggcgggagaggtgaccgatatggtggcagagatgataggtatggtggtggtagatctgaccgtggcggtgatcgttctgaccgtggcggcgatcgttctgaccgtgaccgttctgaccgtggcggcgaccgttctgatcgtgacggtgatcgatctgagcgtggcagtgaccgatattctagccgtagccgagatggtggaagcgggggtgatcgttacagtcgtgaccgatcaggtccctactgatggcctggatcttgagaagtgtgtttcatccaggtatgaaaaccctatctactatcatgaggtgtgtttccttgtgtctgaaactttgtgatcatgtatttgaatcataatgatgtcccgtgagtaagcagatcctttattacag

SEQ ID NO: 62233 - protein, 249 aa, Triticum aestivum
  peptide (1)..(249): Ceres Seq. ID no. 12584665
  misc_feature (36)..(107): Pfam Name: RNA recognition motif. (a.k.a. RRM, RBD, or RNP domain) Pfam Description: RNA recognition motif. (a.k.a. RRM, RBD, or RNP
  misc_feature (28)..(204): Homolog of NCBI NO: 1076672 NR Description: probable glycine rich RNA binding protein -
  misc_feature (32)..(208): Homolog of NCBI NO: 21388660 NR Description: glycine-rich RNA-binding protein [Physcomitrella
  misc_feature (28)..(245): Homolog of NCBI NO: 15237666 NR Description: glycine-rich RNA-binding protein
  misc_feature (28)..(247): Homolog of NCBI NO: 31712074 NR Description: putative RNA-binding protein
  misc_feature (28)..(242): Homolog of NCBI NO: 33146923 NR Description: glycine-rich RNA-binding protein-like
  misc_feature (28)..(165): Homolog of NCBI NO: 15982739 NR Description: AT3g26420/F20C19_14 [Arabidopsis thaliana]
  misc_feature (28)..(249): Homolog of NCBI NO: 15231557 NR Description: glycine-rich RNA-binding protein
  misc_feature (28)..(234): Homolog of NCBI NO: 2129944 NR Description: RNA-binding protein RZ-1 - wood tobacco
  misc_feature (28)..(203): Homolog of NCBI NO: 12659074 NR Description: RNA-binding protein [Triticum aestivum]
  misc_feature (28)..(222): Homolog of NCBI NO: 40714682 NR Description: putative RNA binding protein
DAVSPPLRSGQPKFLLASQAVFLLLAVMADEDEYRCFVGNLSWSTTDESLKDAFSKYGKVTEAKVVMDKFSGRSRGFAFVTFDEKKAMEEAIEDMNGLDLEGRAITVDKAQPQGAGRDRNGDRDFDRDRGSRGGRDYGGGRAPRGGGGGDCFKCGKPGHFARECPDGDGGRGDRYGGRDDRYGGGRSDRGGDRSDRGGDRSDRDRSDRGGDRSDRDGDRSERGSDRYSSRSRDGGSGGDRYSRDRSGPY

SEQ ID NO: 62234 - protein, 222 aa, Triticum aestivum
  peptide (1)..(222): Ceres Seq. ID no. 12584666
  misc_feature (9)..(80): Pfam Name: RNA recognition motif. (a.k.a. RRM, RBD, or RNP domain) Pfam Description: RNA recognition motif. (a.k.a. RRM, RBD, or RNP
  misc_feature (1)..(177): Homolog of NCBI NO: 1076672 NR Description: probable glycine rich RNA binding protein -
  misc_feature (5)..(181): Homolog of NCBI NO: 21388660 NR Description: glycine-rich RNA-binding protein [Physcomitrella
  misc_feature (1)..(218): Homolog of NCBI NO: 15237666 NR Description: glycine-rich RNA-binding protein
  misc_feature (1)..(220): Homolog of NCBI NO: 31712074 NR Description: putative RNA-binding protein
  misc_feature (1)..(215): Homolog of NCBI NO: 33146923 NR Description: glycine-rich RNA-binding protein-like
  misc_feature (1)..(138): Homolog of NCBI NO: 15982739 NR Description: AT3g26420/F20C19_14 [Arabidopsis thaliana]
  misc_feature (1)..(222): Homolog of NCBI NO: 15231557 NR Description: glycine-rich RNA-binding protein
  misc_feature (1)..(207): Homolog of NCBI NO: 2129944 NR Description: RNA-binding protein RZ-1 - wood tobacco
  misc_feature (1)..(176): Homolog of NCBI NO: 12659074 NR Description: RNA-binding protein [Triticum aestivum]
  misc_feature (1)..(195): Homolog of NCBI NO: 40714682 NR Description: putative RNA binding protein
MADEDEYRCFVGNLSWSTTDESLKDAFSKYGKVTEAKVVMDKFSGRSRGFAFVTFDEKKAMEEAIEDMNGLDLEGRAITVDKAQPQGAGRDRNGDRDFDRDRGSRGGRDYGGGRAPRGGGGGDCFKCGKPGHFARECPDGDGGRGDRYGGRDDRYGGGRSDRGGDRSDRGGDRSDRDRSDRGGDRSDRDGDRSERGSDRYSSRSRDGGSGGDRYSRDRSGPY

SEQ ID NO: 62235 - protein, 184 aa, Triticum aestivum
  peptide (1)..(184): Ceres Seq. ID no. 12584667
MDWTWKGGPSLLIKLSLKGLVEIVTVTVILIVTVGLVVAVTMAVVVRRVVVVVGTASSAANLDTLLESVQMVTAGEVTDMVAEMIGMVVVDLTVAVIVLTVAAIVLTVTVLTVAATVLIVTVIDLSVAVTDILAVAEMVEAGVIVTVVTDQVPTDGLDLEKCVSSRYENPIYYHEVCFLVSETL

SEQ ID NO: 62236 - DNA, 778 bp, Triticum aestivum
  misc_feature (1)..(778): Ceres Seq. ID no. 13596564
agctatcatcctgctagcacccgtgaactccagccattcacgctgcgtcgatcgtttggtttcgtgcgtgcgttgtttgtgatcgtgtgatctgttcgggagatggaggcttacatgctgttcccgcggagcaatggaaagagctgcgaggaggagcaggaggaggacatcggctgcccgtccgagtccgaggtgtcggcggccggctccatgctgtcgtcggacgaggagctcgacgacgacgccacctccagctccagctcctccggatccaccgacaacttccagatgtcctccctcatggcgcagctcccgctcaagaggggtctgtccaagttcttcgacggcaagtcgcagtcgttcgcgtcgctcgcggcggtgggcggcctggaggacctggccaagccgccgggcaagcggatcaagacgtcgcggagctgcgaggtcgggctgcaggacgcgcaccgccggcggttcgcgcgccacaatgccgcggccttcaagaaggtgtccaaagggcggctgtccgcgctcggcagggcgccgccgctccggccgctgacagcgagcgcggcgaggcccaagggcttgcccgtgcgggctccgctgttcgtttaggagatttcgcccgcagattagtcgtgtcggttgtggcgtgctcaaagagcagttggtgcggttgttacgtggattttgacatggtaactgaccggaaggtggccggctggtcgatggatgtgtaaatacagaaatgagaaacatgccttgttcagtatcc

SEQ ID NO: 62237 - protein, 171 aa, Triticum aestivum
  peptide (1)..(171): Ceres Seq. ID no. 13596565
  misc_feature (41)..(166): Homolog of NCBI NO: 18396462 NR Description: expressed protein [Arabidopsis thaliana]
  misc_feature (41)..(166): Homolog of NCBI NO: 6714420 NR Description: hypothetical protein [Arabidopsis thaliana]
  misc_feature (18)..(122): Homolog of NCBI NO: 20159729 NR Description: unknown cold induced protein [Deschampsia
  misc_feature (17)..(112): Homolog of NCBI NO: 34909358 NR Description: P0638D12.11 [Oryza sativa (japonica
  misc_feature (20)..(144): Homolog of NCBI NO: 15241248 NR Description: expressed protein [Arabidopsis thaliana]
  misc_feature (1)..(113): Homolog of NCBI NO: 38346806 NR Description: OSJNBa0088A01.13 [Oryza sativa (japonica
MEAYMLFPRSNGKSCEEEQEEDIGCPSESEVSAAGSMLSSDEELDDDATSSSSSSGSTDNFQMSSLMAQLPLKRGLSKFFDGKSQSFASLAAVGGLEDLAKPPGKRIKTSRSCEVGLQDAHRRRFARHNAAAFKKVSKGRLSALGRAPPLRPLTASAARPKGLPVRAPLFV

SEQ ID NO: 62238 - protein, 167 aa, Triticum aestivum
  peptide (1)..(167): Ceres Seq. ID no. 13596566
  misc_feature (37)..(162): Homolog of NCBI NO: 18396462 NR Description: expressed protein [Arabidopsis thaliana]
  misc_feature (37)..(162): Homolog of NCBI NO: 6714420 NR Description: hypothetical protein [Arabidopsis thaliana]
  misc_feature (14)..(118): Homolog of NCBI NO: 20159729 NR Description: unknown cold induced protein [Deschampsia
  misc_feature (13)..(108): Homolog of NCBI NO: 34909358 NR Description: P0638D12.11 [Oryza sativa (japonica
  misc_feature (16)..(140): Homolog of NCBI NO: 15241248 NR Description: expressed protein [Arabidopsis thaliana]
  misc_feature (1)..(109): Homolog of NCBI NO: 38346806 NR Description: OSJNBa0088A01.13 [Oryza sativa (japonica
MLFPRSNGKSCEEEQEEDIGCPSESEVSAAGSMLSSDEELDDDATSSSSSSGSTDNFQMSSLMAQLPLKRGLSKFFDGKSQSFASLAAVGGLEDLAKPPGKRIKTSRSCEVGLQDAHRRRFARHNAAAFKKVSKGRLSALGRAPPLRPLTASAARPKGLPVRAPLFV

SEQ ID NO: 62239 - protein, 142 aa, Triticum aestivum
  peptide (1)..(142): Ceres Seq. ID no. 13596567
  misc_feature (1)..(142): Homolog of NCBI NO: 17505548 NR Description: Putative mitochondrial protein, nematode specific
MERAARRSRRRTSAARPSPRCRRPAPCCRRTRSSTTTPPPAPAPPDPPTTSRCPPSWRSSRSRGVCPSSSTASRSRSRRSRRWAAWRTWPSRRASGSRRRGAARSGCRTRTAGGSRATMPRPSRRCPKGGCPRSAGRRRSGR

SEQ ID NO: 62240 - DNA, 703 bp, Triticum aestivum
  misc_feature (1)..(703): Ceres Seq. ID no. 13583505
aaaaaaaacgtgaccccctccccgtccctacccctcttcctcctcggacaagccctccccctcgccgccgccgccgccgccgccgccccgcaggtcgccggctccgcttcgcgccgtaccgatggcggaagaagcagctgccaatgcggcgaagaaggaggaggaggagttcagcaccgggcccctgtccctgctcctcatgagcgtcaagaacaatactcaggtgcttatcaactgccggaacaacaagaagctacttggtcgcgtgagggcatttgaccgtcattgcaacatggttcttgagaatgtccgggagatgtggactgaggttccaaagactggcaaaggcaagaagaaggcccttccagtgaacaaggacaggttcatcagcaagatgttcctccgcggcgactcggtcatcattgttctcaggaacccgaaatgagttagacgacgacgacgacacatcgtacgcccagaagagtctctttgctatgtagtcgctgttaagtttgtgatactgaatactctaaaacagtgagtgcttaagagatgatatcaagccgagatttagcagtattgattaccggtccagtgttgtagtttgggatgttctgagttttgcctgtcctgtatctaaattgcgctcgtagtttgtatttggaccatcaatatatcggcagaacacaatttaaaaagtttg

SEQ ID NO: 62241 - protein, 107 aa, Triticum aestivum
  peptide (1)..(107): Ceres Seq. ID no. 13583506
  misc_feature (25)..(104): Pfam Name: LSM domain Pfam Description: LSM domain
  misc_feature (1)..(106): Homolog of NCBI NO: 17558868 NR Description: Small nuclear ribonucleoprotein (13.3 kD)
  misc_feature (1)..(106): Homolog of NCBI NO: 39592141 NR Description: Hypothetical protein CBG23345 [Caenorhabditis
  misc_feature (1)..(106): Homolog of NCBI NO: 27677236 NR Description: similar to Small nuclear ribonucleoprotein Sm D2
  misc_feature (1)..(106): Homolog of NCBI NO: 22203734 NR Description: small nuclear ribonucleoprotein D2-like protein
  misc_feature (1)..(106): Homolog of NCBI NO: 21357623 NR Description: CG1249-PA [Drosophila melanogaster]
  misc_feature (1)..(106): Homolog of NCBI NO: 4759158 NR Description: small nuclear ribonucleoprotein polypeptide D2
  misc_feature (1)..(106): Homolog of NCBI NO: 26337731 NR Description: unnamed protein product [Mus musculus]
  misc_feature (1)..(107): Homolog of NCBI NO: 30690747 NR Description: small nuclear ribonucleo protein D2 -related
  misc_feature (4)..(107): Homolog of NCBI NO: 21554692 NR Description: small nuclear ribonucleoprotein-like protein
  misc_feature (1)..(107): Homolog of NCBI NO: 18407411 NR Description: small nuclear ribonucleo protein D2 -related
MAEEAAANAAKKEEEEFSTGPLSLLLMSVKNNTQVLINCRNNKKLLGRVRAFDRHCNMVLENVREMWTEVPKTGKGKKKALPVNKDRFISKMFLRGDSVIIVLRNPK

SEQ ID NO: 62242 - protein, 92 aa, Triticum aestivum
  peptide (1)..(92): Ceres Seq. ID no. 13583507
KKNVTPSPSLPLFLLGQALPLAAAAAAAAPQVAGSASRRTDGGRSSCQCGEEGGGGVQHRAPVPAPHERQEQYSGAYQLPEQQEATWSREGI

SEQ ID NO: 62243 - protein, 81 aa, Triticum aestivum; identical to SEQ ID NO: 12478
  peptide (1)..(81): Ceres Seq. ID no. 13583508
  misc_feature (1)..(78): Pfam Name: LSM domain Pfam Description: LSM domain
  misc_feature (1)..(80): Homolog of NCBI NO: 17558868 NR Description: Small nuclear ribonucleoprotein (13.3 kD)
  misc_feature (1)..(80): Homolog of NCBI NO: 39592141 NR Description: Hypothetical protein CBG23345 [Caenorhabditis
  misc_feature (1)..(80): Homolog of NCBI NO: 27677236 NR Description: similar to Small nuclear ribonucleoprotein Sm D2
  misc_feature (1)..(80): Homolog of NCBI NO: 22203734 NR Description: small nuclear ribonucleoprotein D2-like protein
  misc_feature (1)..(80): Homolog of NCBI NO: 21357623 NR Description: CG1249-PA [Drosophila melanogaster]
  misc_feature (1)..(80): Homolog of NCBI NO: 4759158 NR Description: small nuclear ribonucleoprotein polypeptide D2
  misc_feature (1)..(80): Homolog of NCBI NO: 26337731 NR Description: unnamed protein product [Mus musculus]
  misc_feature (1)..(81): Homolog of NCBI NO: 30690747 NR Description: small nuclear ribonucleo protein D2 -related
  misc_feature (1)..(81): Homolog of NCBI NO: 21554692 NR Description: small nuclear ribonucleoprotein-like protein
  misc_feature (1)..(81): Homolog of NCBI NO: 18407411 NR Description: small nuclear ribonucleo protein D2 -related

SEQ ID NO: 62244 - DNA, 690 bp, Triticum aestivum
  misc_feature (1)..(690): Ceres Seq. ID no. 12587363
actaaaactccggtcgaaaaaaaagagagagaaagaaacgaaaacaacagccggccgaagcctccgctgcgccgccgccggtacaggagccaagcagcgcctcccttcgtcgagcagcaacgccgccgcccggagctacgccggcgacgaatacatagaacagggcatcaacattgtcaattggagaggcttggagctgctttggcatccacagtagagcaaacaagaagtatcgacatggattccagcactacacagtctgaaggttctcagccacctgttcctcctaaaagccctaccatgtcgtcgtgccggaagaagaaaactgatgatgatgctaccttcctcaaagatgtgaaagagcacattgatgagttcatccatgcctccatggatgagcacaagacctgcttcaagaagaccatccagaagatgttcgggatgtcaaaggctgttgcggagcggtccgctgcagcaaaggaagctgaagtcgaaagtgctttgcctcttgagaccagtgtgtcccggtaggagattgcattggtggtggccagttcttgctttctggtggcatggttcttgtatcaggaatctagcaaatgtttttttcctattgttgctgtatggtcactatatattttttctgttagaaatgttgaataatattaacatgagtataaactgagactg

SEQ ID NO: 62245 - protein, 176 aa, Triticum aestivum
  peptide (1)..(176): Ceres Seq. ID no. 12587364
  misc_feature (78)..(139): Homolog of NCBI NO: 14626302 NR Description: hypothetical protein [Oryza sativa (japonica
  misc_feature (74)..(176): Homolog of NCBI NO: 15226603 NR Description: unknown protein; protein id: At2g21640.1
  misc_feature (96)..(175): Homolog of NCBI NO: 18420404 NR Description: Expressed protein
  misc_feature (99)..(175): Homolog of NCBI NO: 21553485 NR Description: unknown [Arabidopsis thaliana]
  misc_feature (80)..(175): Homolog of NCBI NO: 15230009 NR Description: unknown protein; protein id: At3g05570.1
  misc_feature (80)..(176): Homolog of NCBI NO: 40253393 NR Description: hypothetical protein [Oryza sativa (japonica
TKTPVEKKERERNENNSRPKPPLRRRRYRSQAAPPFVEQQRRRPELRRRRIHRTGHQHCQLERLGAALASTVEQTRSIDMDSSTTQSEGSQPPVPPKSPTMSSCRKKKTDDDATFLKDVKEHIDEFIHASMDEHKTCFKKTIQKMFGMSKAVAERSAAAKEAEVESALPLETSVSR

SEQ ID NO: 62246 - protein, 104 aa, Triticum aestivum
  peptide (1)..(104): Ceres Seq. ID no. 12587365
MSSSMPPWMSTRPASRRPSRRCSGCQRLLRSGPLQQRKLKSKVLCLLRPVCPGRRLHWWWPVLAFWWHGSCIRNLANVFFLLLLYGHYIFFLLEMLNNINMSIN

SEQ ID NO: 62247 - protein, 100 aa, Triticum aestivum
  peptide (1)..(100): Ceres Seq. ID no. 12587366
MPPWMSTRPASRRPSRRCSGCQRLLRSGPLQQRKLKSKVLCLLRPVCPGRRLHWWWPVLAFWWHGSCIRNLANVFFLLLLYGHYIFFLLEMLNNINMSIN

SEQ ID NO: 62248 - protein, 97 aa, Triticum aestivum
  peptide (1)..(97): Ceres Seq. ID no. 12587367
  misc_feature (1)..(60): Homolog of NCBI NO: 14626302 NR Description: hypothetical protein [Oryza sativa (japonica
  misc_feature (1)..(97): Homolog of NCBI NO: 15226603 NR Description: unknown protein; protein id: At2g21640.1
  misc_feature (17)..(96): Homolog of NCBI NO: 18420404 NR Description: Expressed protein
  misc_feature (20)..(96): Homolog of NCBI NO: 21553485 NR Description: unknown [Arabidopsis thaliana]
  misc_feature (1)..(96): Homolog of NCBI NO: 15230009 NR Description: unknown protein; protein id: At3g05570.1
  misc_feature (1)..(97): Homolog of NCBI NO: 40253393 NR Description: hypothetical protein [Oryza sativa (japonica
MDSSTTQSEGSQPPVPPKSPTMSSCRKKKTDDDATFLKDVKEHIDEFIHASMDEHKTCFKKTIQKMFGMSKAVAERSAAAKEAEVESALPLETSVSR

SEQ ID NO: 62249 - DNA, 812 bp, Triticum aestivum
  misc_feature (1)..(812): Ceres Seq. ID no. 12587328
aacaacaacaacaacatccaaaatccaaacccaagccaagaacacacgctgttctgaatctgtccatcagtctccgcttccactgattcgtccagccgagaagaagaagagctgcagaagatgagcaagctctggaccatcctcacccacctccacaccctcgcagggcctggcgtgatgctcctgtacccgctgtacgcgtcggtgcaggcgatggagagcccgtcgaagctggacgacgagcagtggctggcctactggatcctctactccttcgtcacgctcgtcgagatggtcctcgagtccctcatctactggataccgatctggtacgagctgaagctgctgttcctggcgtggctggcgctgcccaacttcaggggagcggccttcatctacgacaggttcgtcagggagcagctcaggaagcacggcctcaccaaccaccccggcagcggcatcagcagcagcaagaaggagaacggcggcaagtcgtcctcgccgttgacgtcccccaaggagaaggagaacgccaagagcaggttcctctcctttggcgctcccaagaaagaccactgaagtagattggggcagtaaccagagatccctgcggctagcttcttggcttgtggtgtttttttggtttgtttgagattttagcttgtggtcttgggagtattacatgtcttgtccaaaaaagttgtactagcactccatagatgaggccctcggttgcaggctagctagatggtggcttgtggtgttgtagtattattacatatatctgtcccgaaaaatgttccggggttggg

SEQ ID NO: 62250 - protein, 152 aa, Triticum aestivum
  peptide (1)..(152): Ceres Seq. ID no. 12587329
  misc_feature (5)..(101): Pfam Name: TB2/DP1, HVA22 family Pfam Description: TB2/DP1, HVA22 family
  misc_feature (4)..(98): Homolog of NCBI NO: 15222421 NR Description: AtHVA22c
  misc_feature (7)..(101): Homolog of NCBI NO: 15241840 NR Description: AtHVA22b-like protein
  misc_feature (7)..(101): Homolog of NCBI NO: 4884934 NR Description: AtHVA22b [Arabidopsis thaliana]
  misc_feature (4)..(98): Homolog of NCBI NO: 15221266 NR Description: AtHVA22a; protein id: At1g74520.1, supported by
  misc_feature (20)..(106): Homolog of NCBI NO: 7484787 NR Description: abscisic acid-induced protein homolog F13M23.100
  misc_feature (20)..(106): Homolog of NCBI NO: 8777395 NR Description: gene_id:MFB16.12~pir||T05517~similar to unknown
  misc_feature (1)..(106): Homolog of NCBI NO: 18416458 NR Description: abscisic acid-induced - like protein
  misc_feature (1)..(106): Homolog of NCBI NO: 18423191 NR Description: putative protein
  misc_feature (1)..(104): Homolog of NCBI NO: 33342176 NR Description: hypothetical protein [Triticum aestivum]
  misc_feature (1)..(111): Homolog of NCBI NO: 1076715 NR Description: abscisic acid-induced protein HVA22 - barley
MSKLWTILTHLHTLAGPGVMLLYPLYASVQAMESPSKLDDEQWLAYWILYSFVTLVEMVLESLIYWIPIWYELKLLFLAWLALPNFRGAAFIYDRFVREQLRKHGLTNHPGSGISSSKKENGGKSSSPLTSPKEKENAKSRFLSFGAPKKDH

SEQ ID NO: 62251 - protein, 133 aa, Triticum aestivum
  peptide (1)..(133): Ceres Seq. ID no. 12587330
  misc_feature (1)..(82): Pfam Name: TB2/DP1, HVA22 family Pfam Description: TB2/DP1, HVA22 family
  misc_feature (1)..(79): Homolog of NCBI NO: 15222421 NR Description: AtHVA22c
  misc_feature (1)..(82): Homolog of NCBI NO: 15241840 NR Description: AtHVA22b-like protein
  misc_feature (1)..(82): Homolog of NCBI NO: 4884934 NR Description: AtHVA22b [Arabidopsis thaliana]
  misc_feature (1)..(79): Homolog of NCBI NO: 15221266 NR Description: AtHVA22a; protein id: At1g74520.1, supported by
  misc_feature (1)..(87): Homolog of NCBI NO: 7484787 NR Description: abscisic acid-induced protein homolog F13M23.100
  misc_feature (1)..(87): Homolog of NCBI NO: 8777395 NR Description: gene_id:MFB16.12~pir||T05517~similar to unknown
  misc_feature (1)..(87): Homolog of NCBI NO: 18416458 NR Description: abscisic acid-induced - like protein
  misc_feature (1)..(87): Homolog of NCBI NO: 18423191 NR Description: putative protein
  misc_feature (1)..(85): Homolog of NCBI NO: 33342176 NR Description: hypothetical protein [Triticum aestivum]
  misc_feature (1)..(92): Homolog of NCBI NO: 1076715 NR Description: abscisic acid-induced protein HVA22 - barley
MLLYPLYASVQAMESPSKLDDEQWLAYWILYSFVTLVEMVLESLIYWIPIWYELKLLFLAWLALPNFRGAAFIYDRFVREQLRKHGLTNHPGSGISSSKKENGGKSSSPLTSPKEKENAKSRFLSFGAPKKDH

SEQ ID NO: 62252 - protein, 121 aa, Triticum aestivum
  peptide (1)..(121): Ceres Seq. ID no. 12587331
  misc_feature (1)..(70): Pfam Name: TB2/DP1, HVA22 family Pfam Description: TB2/DP1, HVA22 family
  misc_feature (1)..(67): Homolog of NCBI NO: 15222421 NR Description: AtHVA22c
  misc_feature (1)..(70): Homolog of NCBI NO: 15241840 NR Description: AtHVA22b-like protein
  misc_feature (1)..(70): Homolog of NCBI NO: 4884934 NR Description: AtHVA22b [Arabidopsis thaliana]
  misc_feature (1)..(67): Homolog of NCBI NO: 15221266 NR Description: AtHVA22a; protein id: At1g74520.1, supported by
  misc_feature (1)..(75): Homolog of NCBI NO: 7484787 NR Description: abscisic acid-induced protein homolog F13M23.100
  misc_feature (1)..(75): Homolog of NCBI NO: 8777395 NR Description: gene_id:MFB16.12~pir||T05517~similar to unknown
  misc_feature (1)..(75): Homolog of NCBI NO: 18416458 NR Description: abscisic acid-induced - like protein
  misc_feature (1)..(75): Homolog of NCBI NO: 18423191 NR Description: putative protein
  misc_feature (1)..(73): Homolog of NCBI NO: 33342176 NR Description: hypothetical protein [Triticum aestivum]
  misc_feature (1)..(80): Homolog of NCBI NO: 1076715 NR Description: abscisic acid-induced protein HVA22 - barley
MESPSKLDDEQWLAYWILYSFVTLVEMVLESLIYWIPIWYELKLLFLAWLALPNFRGAAFIYDRFVREQLRKHGLTNHPGSGISSSKKENGGKSSSPLTSPKEKENAKSRFLSFGAPKKDH

SEQ ID NO: 62253 - DNA, 703 bp, Triticum aestivum
  misc_feature (1)..(703): Ceres Seq. ID no. 13583509
aactccccagcccagcttggcctagctgccaccacccctcttcctcctcctcctaggctagctccctccggcagactctcccttccatggcggatcggcacggcgagggcggcgtggcctcggcgcggcggccggggcgcacggacctggacgacccgtcgacgacgctgctgcagcgcgtgcaggcgcacctcccgaacgcgacgcaggtggtgggcctgctgaccctgctgctcgccggcgcggcgctgctggtgctggcggggctgacgttcacgggcgcggtggtggcgctcgtcttcctcggcccgctggcgctgctgaccagccccatctgggtgccgttctccttcgcgctcctggtcgtggccgtggcggcgctctccttcgtcgggttcgccgtggccgccctcgccgcggccacctgggcgtaccggtacttcacggggcggcaccccgtgggcgccgaccgcgtggatcgcgcccgcagccgcctcgccgacaccgccagccacgtcaaggactacgcccgccgcgagtacggcggatacctcggcaaccgcaccaaggacgccgccccgggcgcctaggcacgtcgcggctagatcgttattacgatatgttcttctctctttgcgtctctgtactctcccagctgttggtaatctcgtcgtcttcacgtgtatgaactactattagttcc

SEQ ID NO: 62254 - protein, 167 aa, Triticum aestivum
  peptide (1)..(167): Ceres Seq. ID no. 13583510
  misc_feature (39)..(155): Pfam Name: Oleosin Pfam Description: Oleosin
  misc_feature (37)..(153): Homolog of NCBI NO: 3914199 NR Description: OLEOSIN 1
  misc_feature (37)..(153): Homolog of NCBI NO: 2119749 NR Description: oleosin - almond
  misc_feature (28)..(151): Homolog of NCBI NO: 27754701 NR Description: putative oleosin protein [Arabidopsis thaliana]
  misc_feature (28)..(151): Homolog of NCBI NO: 15225211 NR Description: oleosin [Arabidopsis thaliana]
  misc_feature (31)..(153): Homolog of NCBI NO: 7442009 NR Description: oleosin-like protein, salt stress-induced - sweet
  misc_feature (34)..(153): Homolog of NCBI NO: 29170509 NR Description: oleosin [Corylus avellana]
  misc_feature (30)..(150): Homolog of NCBI NO: 5381321 NR Description: 15 kDa oleosin [Sesamum indicum]
  misc_feature (22)..(167): Homolog of NCBI NO: 21311555 NR Description: 15.8 kDa oleosin [Theobroma cacao]
  misc_feature (19)..(167): Homolog of NCBI NO: 15222021 NR Description: oleosin [Arabidopsis thaliana]
  misc_feature (22)..(167): Homolog of NCBI NO: 15229674 NR Description: oleosin [Arabidopsis thaliana]
MADRHGEGGVASARRPGRTDLDDPSTTLLQRVQAHLPNATQVVGLLTLLLAGAALLVLAGLTFTGAVVALVFLGPLALLTSPIWVPFSFALLVVAVAALSFVGFAVAALAAATWAYRYFTGRHPVGADRVDRARSRLADTASHVKDYARREYGGYLGNRTKDAAPGA

SEQ ID NO: 62255 - DNA, 633 bp, Triticum aestivum
  misc_feature (1)..(633): Ceres Seq. ID no. 13583494
ctcgaaggcggaagttctcgaagacgtaaacctgccagctccctccccaacccctggaaacgctctggtagtctccgccgcgggagaggcggagatggagaacgcggtggtgctccgggagtggttcgaccgcgtcgacgccgccggcaccggcaacatcacggctcctcagctccagagcgcgctggccgtgggcaacctcgacttccccctctccgtcgtgcagcagatgatcaggatgtacgactttgatcggaacggcaccatgagcttcgaagagttcttggctcttaacaagttccttcagaaggtgcagactgttttctcctccctagaaaggggccgtggatttctcagccttgaggatgtgtatgaggcgttaatcaaactcggtttctctttggattcacctgccttttacactgtctgtgagagcttcgacaagagcaagaaagggatggttcgtttggatgagttcatatcgatctgcatctttgtgcagtcagctcgtaacttgttcagctcatttgacacaaccaagcaagggaaagtgactttggatttcaaccagttcgtctactgcacggcaaactgcaggatatagctgtattacctgaaacctgtacatggaag

SEQ ID NO: 62256 - protein, 200 aa, Triticum aestivum
  peptide (1)..(200): Ceres Seq. ID no. 13583495
  misc_feature (12)..(192): Homolog of NCBI NO: 34853323 NR Description: similar to ALG-2 [Rattus norvegicus]
  misc_feature (41)..(197): Homolog of NCBI NO: 17512472 NR Description: RIKEN cDNA 2600002E23 gene [Mus musculus]
  misc_feature (12)..(192): Homolog of NCBI NO: 7019485 NR Description: programmed cell death 6; apoptosis-linked gene 2
  misc_feature (12)..(192): Homolog of NCBI NO: 26346917 NR Description: unnamed protein product [Mus musculus]
  misc_feature (14)..(198): Homolog of NCBI NO: 19921976 NR Description: CG17765-PA [Drosophila melanogaster]
  misc_feature (38)..(192): Homolog of NCBI NO: 39595321 NR Description: Hypothetical protein CBG03955 [Caenorhabditis
  misc_feature (42)..(192): Homolog of NCBI NO: 28277280 NR Description: Similar to programmed cell death 6 [Xenopus
  misc_feature (2)..(192): Homolog of NCBI NO: 8745027 NR Description: probable possible programmed cell death protein,
  misc_feature (38)..(192): Homolog of NCBI NO: 3024652 NR Description: Sorcin
  misc_feature (14)..(192): Homolog of NCBI NO: 8745028 NR Description: probable possible programmed cell death protein,
SKAEVLEDVNLPAPSPTPGNALVVSAAGEAEMENAVVLREWFDRVDAAGTGNITAPQLQSALAVGNLDFPLSVVQQMIRMYDFDRNGTMSFEEFLALNKFLQKVQTVFSSLERGRGFLSLEDVYEALIKLGFSLDSPAFYTVCESFDKSKKGMVRLDEFISICIFVQSARNLFSSFDTTKQGKVTLDFNQFVYCTANCRI

SEQ ID NO: 62257 - protein, 169 aa, Triticum aestivum
  peptide (1)..(169): Ceres Seq. ID no. 13583496
  misc_feature (1)..(161): Homolog of NCBI NO: 34853323 NR Description: similar to ALG-2 [Rattus norvegicus]
  misc_feature (10)..(166): Homolog of NCBI NO: 17512472 NR Description: RIKEN cDNA 2600002E23 gene [Mus musculus]
  misc_feature (1)..(161): Homolog of NCBI NO: 7019485 NR Description: programmed cell death 6; apoptosis-linked gene 2
  misc_feature (1)..(161): Homolog of NCBI NO: 26346917 NR Description: unnamed protein product [Mus musculus]
  misc_feature (1)..(167): Homolog of NCBI NO: 19921976 NR Description: CG17765-PA [Drosophila melanogaster]
  misc_feature (7)..(161): Homolog of NCBI NO: 39595321 NR Description: Hypothetical protein CBG03955 [Caenorhabditis
  misc_feature (11)..(161): Homolog of NCBI NO: 28277280 NR Description: Similar to programmed cell death 6 [Xenopus
  misc_feature (1)..(161): Homolog of NCBI NO: 8745027 NR Description: probable possible programmed cell death protein,
  misc_feature (7)..(161): Homolog of NCBI NO: 3024652 NR Description: Sorcin
  misc_feature (1)..(161): Homolog of NCBI NO: 8745028 NR Description: probable possible programmed cell death protein,
MENAVVLREWFDRVDAAGTGNITAPQLQSALAVGNLDFPLSVVQQMIRMYDFDRNGTMSFEEFLALNKFLQKVQTVFSSLERGRGFLSLEDVYEALIKLGFSLDSPAFYTVCESFDKSKKGMVRLDEFISICIFVQSARNLFSSFDTTKQGKVTLDFNQFVYCTANCRI

SEQ ID NO: 62258 - protein, 124 aa, Triticum aestivum
  peptide (1)..(124): Ceres Seq. ID no. 13583497
  misc_feature (1)..(116): Homolog of NCBI NO: 34853323 NR Description: similar to ALG-2 [Rattus norvegicus]
  misc_feature (1)..(121): Homolog of NCBI NO: 17512472 NR Description: RIKEN cDNA 2600002E23 gene [Mus musculus]
  misc_feature (1)..(116): Homolog of NCBI NO: 7019485 NR Description: programmed cell death 6; apoptosis-linked gene 2
  misc_feature (1)..(116): Homolog of NCBI NO: 26346917 NR Description: unnamed protein product [Mus musculus]
  misc_feature (1)..(122): Homolog of NCBI NO: 19921976 NR Description: CG17765-PA [Drosophila melanogaster]
  misc_feature (1)..(116): Homolog of NCBI NO: 39595321 NR Description: Hypothetical protein CBG03955 [Caenorhabditis
  misc_feature (1)..(116): Homolog of NCBI NO: 28277280 NR Description: Similar to programmed cell death 6 [Xenopus
  misc_feature (1)..(116): Homolog of NCBI NO: 8745027 NR Description: probable possible programmed cell death protein,
  misc_feature (1)..(116): Homolog of NCBI NO: 3024652 NR Description: Sorcin
  misc_feature (1)..(116): Homolog of NCBI NO: 8745028 NR Description: probable possible programmed cell death protein,
MIRMYDFDRNGTMSFEEFLALNKFLQKVQTVFSSLERGRGFLSLEDVYEALIKLGFSLDSPAFYTVCESFDKSKKGMVRLDEFISICIFVQSARNLFSSFDTTKQGKVTLDFNQFVYCTANCRI

SEQ ID NO: 62259 - DNA, 574 bp, Triticum aestivum
  misc_feature (1)..(574): Ceres Seq. ID no. 12584760
cggaaaagctttttttttaaaaaaaaaaatttttttttttttttttttttttttttttttttttttttttttttttttttttttttttttttttttttttttttttttttttttttttttttttctaaagtacatgtttcttgtcatattatatataatttgtgatcaaagacaaacaaataatcagtatcaaataatcccgcactacaacctcgtaaaaggggaaaaaatgccttttggttactgccagttcgttacagaatgatttacatatcggttctttggctgttgtcatctctacttccctaaaacaaccttctaaggaaacttcttcttggtcttcttgattttacatcttttattctcccagcctttaacaaagcttcctcggcaattggtttccattgctgagcacaagaaaaacggaggcccatccctacagtcagcccacgcaacagttgtatcgtccgaagcaccgaaaataattcctctgggaagctctctactccaactttattcagtgaagaatcatcagcaaagggcgagagcacggttactccaggcggtaatcttg

SEQ ID NO: 62260 - protein, 87 aa, Triticum aestivum
  peptide (1)..(87): Ceres Seq. ID no. 12584761
  misc_feature (11)..(53): Homolog of NCBI NO: 40548804 NR Description: NADH dehydrogenase subunit 6 [Dirofilaria
  misc_feature (6)..(42): Homolog of NCBI NO: 23488286 NR Description: Uba1 gene product-related [Plasmodium yoelii
  misc_feature (1)..(54): Homolog of NCBI NO: 19481967 NR Description: WSSV375 [shrimp white spot syndrome virus]
  misc_feature (11)..(51): Homolog of NCBI NO: 40548804 NR Description: NADH dehydrogenase subunit 6 [Dirofilaria
  misc_feature (1)..(54): Homolog of NCBI NO: 17158421 NR Description: wsv319 [shrimp white spot syndrome virus]
  misc_feature (19)..(44): Homolog of NCBI NO: 34897812 NR Description: P0514G12.26 [Oryza sativa (japonica
  misc_feature (11)..(66): Homolog of NCBI NO: 23613703 NR Description: hypothetical protein [Plasmodium falciparum 3D7]
  misc_feature (13)..(50): Homolog of NCBI NO: 23486076 NR Description: Eukaryotic ribosomal protein L18, putative
  misc_feature (10)..(48): Homolog of NCBI NO: 23486076 NR Description: Eukaryotic ribosomal protein L18, putative
  misc_feature (8)..(71): Homolog of NCBI NO: 23487594 NR Description: hypothetical protein [Plasmodium yoelii yoelii]
GKAFFLKKKIFFFFFFFFFFFFFFFFFFFFFFFFFFFFFFFLKYMFLVILYIICDQRQTNNQYQIIPHYNLVKGEKMPFGYCQFVTE

SEQ ID NO: 62261 - protein, 54 aa, Triticum aestivum
  peptide (1)..(54): Ceres Seq. ID no. 12584762
  misc_feature (10)..(51): Homolog of NCBI NO: 23613703 NR Description: hypothetical protein [Plasmodium falciparum 3D7]
  misc_feature (10)..(38): Homolog of NCBI NO: 40548804 NR Description: NADH dehydrogenase subunit 6 [Dirofilaria
  misc_feature (10)..(41): Homolog of NCBI NO: 40548804 NR Description: NADH dehydrogenase subunit 6 [Dirofilaria
  misc_feature (18)..(42): Homolog of NCBI NO: 34897812 NR Description: P0514G12.26 [Oryza sativa (japonica
  misc_feature (14)..(49): Homolog of NCBI NO: 23482639 NR Description: hypothetical protein [Plasmodium yoelii yoelii]
  misc_feature (10)..(32): Homolog of NCBI NO: 34897812 NR Description: P0514G12.26 [Oryza sativa (japonica
  misc_feature (2)..(44): Homolog of NCBI NO: 23487594 NR Description: hypothetical protein [Plasmodium yoelii yoelii]
  misc_feature (10)..(54): Homolog of NCBI NO: 23486076 NR Description: Eukaryotic ribosomal protein L18, putative
RKSFFFKKKNFFFFFFFFFFFFFFFFFFFFFFFFFFFFFFFSKVHVSCHIIYNL

SEQ ID NO: 62262 - protein, 43 aa, Triticum aestivum
  peptide (1)..(43): Ceres Seq. ID no. 12584763
  misc_feature (1)..(22): Homolog of NCBI NO: 23613703 NR Description: hypothetical protein [Plasmodium falciparum 3D7]
  misc_feature (1)..(27): Homolog of NCBI NO: 23487594 NR Description: hypothetical protein [Plasmodium yoelii yoelii]
MFLVILYIICDQRQTNNQYQIIPHYNLVKGEKMPFGYCQFVTE

SEQ ID NO: 62263 - DNA, 859 bp, Triticum aestivum
  misc_feature (1)..(859): Ceres Seq. ID no. 12584695
attcgttccgcggccgcttcttcagcacaggcacggcgatctgtcccacggcggcgatggcgctctcctcctccaggccacaccacctcctccgccgcttccacgcttccgcgcgggctctgtcgcgggtggaaccgcacgagttctcgcagcccagcgactacctcgggagctgggcggagcgcgcccccgccacggtcgccgcgggcggcggcgacacacgggaggcttgggcacggctggagcgcctgcgcaaggggtacgcgcgcgaggttggggagctacggcgtcagtacgcctacgaggcgcaactgctggaggccgagcggcagcgcaaggcggaggcacgtgccgaggccgcccgcctcgccaacgaggagcgcaaagccgccaaggctgccgccgctcagaccagggcggccgagcgccgcgccttcgagctcgatttccgccaggccctcatgaaagaaagagctcagaagccggagagccggaggaacaaggagaagctgaaagcacagaagaaggcggagcacagggagctcttgcgcaggcagagttctgtttgggttgctgaggataaaatggaaaagaaaattcttgaggctatcatgcataccacccctctttgaggttcatgctgtgaggtctgcaggaaactagatgatgtatcctggacagtacaaatgaagcttgtttgctattccctcttaagaactactatttcgcagttgtctaaggaataacgacatttcttctagccttaagtttttttgtttctgaagctgtgttgtaatgttcagttgttagactggacgaacatcgagccggcgttgtgtttcggaatttaattttcttc

SEQ ID NO: 62264 - protein, 209 aa, Triticum aestivum
  peptide (1)..(209): Ceres Seq. ID no. 12584696
  misc_feature (89)..(201): Pfam Name: Caldesmon Pfam Description: Caldesmon
  misc_feature (30)..(154): Homolog of NCBI NO: 10177150 NR Description: gene_id:K21P3.8~unknown protein [Arabidopsis
  misc_feature (30)..(209): Homolog of NCBI NO: 21618271 NR Description: unknown [Arabidopsis thaliana]
  misc_feature (30)..(209): Homolog of NCBI NO: 18423002 NR Description: expressed protein
SFRGRFFSTGTAICPTAAMALSSSRPHHLLRRFHASARALSRVEPHEFSQPSDYLGSWAERAPATVAAGGGDTREAWARLERLRKGYAREVGELRRQYAYEAQLLEAERQRKAEARAEAARLANEERKAAKAAAAQTRAAERRAFELDFRQALMKERAQKPESRRNKEKLKAQKKAEHRELLRRQSSVWVAEDKMEKKILEAIMHTTPL

SEQ ID NO: 62265 - protein, 191 aa, Triticum aestivum
  peptide (1)..(191): Ceres Seq. ID no. 12584697
  misc_feature (71)..(183): Pfam Name: Caldesmon Pfam Description: Caldesmon
  misc_feature (12)..(136): Homolog of NCBI NO: 10177150 NR Description: gene_id:K21P3.8~unknown protein [Arabidopsis
  misc_feature (12)..(191): Homolog of NCBI NO: 21618271 NR Description: unknown [Arabidopsis thaliana]
  misc_feature (12)..(191): Homolog of NCBI NO: 18423002 NR Description: expressed protein
MALSSSRPHHLLRRFHASARALSRVEPHEFSQPSDYLGSWAERAPATVAAGGGDTREAWARLERLRKGYAREVGELRRQYAYEAQLLEAERQRKAEARAEAARLANEERKAAKAAAAQTRAAERRAFELDFRQALMKERAQKPESRRNKEKLKAQKKAEHRELLRRQSSVWVAEDKMEKKILEAIMHTTPL

SEQ ID NO: 62266 - protein, 191 aa, Triticum aestivum
  peptide (1)..(191): Ceres Seq. ID no. 12584698
FVPRPLLQHRHGDLSHGGDGALLLQATPPPPPLPRFRAGSVAGGTARVLAAQRLPRELGGARPRHGRRGRRRHTGGLGTAGAPAQGVRARGWGATASVRLRGATAGGRAAAQGGGTCRGRPPRQRGAQSRQGCRRSDQGGRAPRLRARFPPGPHERKSSEAGEPEEQGEAESTEEGGAQGALAQAEFCLGC

SEQ ID NO: 62267 - DNA, 1687 bp, Triticum aestivum
  misc_feature (1)..(1687): Ceres Seq. ID no. 13596803
ccttcccccttccccgtctgactttttctccaagttcaactccgccgcccgccccctctccccgatcccgggagagagagagagagatgtcctggcggtgggctctggcgcggcgcgtcgccacgctcgtcggcggcggcaccggcggcccaggcgccgcccaggcgcagaggctcttctcctcctccggcgccctcccggggaggctccaccctgcgccgcctcagattcggaacaaggtggtgggttgcagaggagctgctttcgtgaactcgcggtggctgcatgatgccacccaatgccagactcgccaggacggagtttcgagggctgaagaacaacatgatccatttgaattggttgctgatgaactatcgattcttggaaatagactacggtccatggtggttgctgaggtccctaaactagaatcagctgctgaatatttttttaaagtaggagctgagggaaaaagattccgacctacggttttattgctgatggcatcagctctgaaattcccaataccagaatcgacagatgttggagttttcagtatattggcaagtaagctgcgcacacggcagcaaaacattgccgagataactgaaatgatccatgttgcaagtcttctgcatgatgatgttctggatgatgctgacactaggcgaggtgtcacttcattgaattgcattatgggcaacaagctttctgttttggctggtgactttctcctgtccagagcatgtgtggcacttgcagcacttgggaatacagaggtggtatctctaatggcaactgcagttggacatctagttactggtgaaactatgcaaatgtcaacaagcagagagcaacggcgaagtatggagtactacttgcagaagacgtactacaaaacagcatcattgatatcaaacagttgcaaggctgttgctattcttgcagggcacactgctgagatttcagtgcttgcatacgaatatggtcgaaacctgggtctagccttccagttgatcgacgatgttcttgatttcacaggaacctctgcttcacttgggaagggttcattatctgatattcgtcatggaatcattactgctccaatgctatatgcgatggaagaattcccacaactacaagatgtcgttgaccagggttttgacaatcctgcaaatgttgagatcgccttggactacctccagaagagccggggaatcgaaagaacaaaagagcttgcgcaagaacacgttaaccttgcggtcaaagccatcgaatctctcccagacagtgacgatgaagatgttctgatttcaaggcgcgctcttattgatatcacacagagagtcatcacaaggacaaaatagcatgattatacacagggtggagaagataaggcggagtttcgccacaggtgtagtgttccgcttggaaatttttggtcgccttggtcattgcattctttccattgcccgggttttgtgtaacatttgatgagacttcagggtaaccattcctgggaatcatcctaagtcgcagctgtagtggttttagttactggtggcagcagaatctgtgtattaatatcacgattggcgattgcacgatgacctgatcataagactgtaaccttataaatcgaagtatgtaacactatatacgaggaaaaagtaacctgcttgtgttg

SEQ ID NO: 62268 - protein, 454 aa, Triticum aestivum
  peptide (1)..(454): Ceres Seq. ID no. 13596804
  misc_feature (141)..(413): Pfam Name: Polyprenyl synthetase Pfam Description: Polyprenyl synthetase
  misc_feature (102)..(454): Homolog of NCBI NO: 29165656 NR Description: Similar to trans-prenyltransferase [Homo sapiens]
  misc_feature (100)..(454): Homolog of NCBI NO: 9507201 NR Description: trans-prenyltransferase [Mus musculus]
  misc_feature (134)..(239): Homolog of NCBI NO: 25314274 NR Description: probable trans-prenyltransferase
  misc_feature (255)..(454): Homolog of NCBI NO: 25314274 NR Description: probable trans-prenyltransferase
  misc_feature (134)..(454): Homolog of NCBI NO: 30686146 NR Description: geranyl diphosphate synthase
  misc_feature (134)..(454): Homolog of NCBI NO: 11322972 NR Description: geranyl diphosphate synthase [Citrus sinensis]
  misc_feature (108)..(454): Homolog of NCBI NO: 11322965 NR Description: geranyl diphosphate synthase [Arabidopsis
  misc_feature (108)..(454): Homolog of NCBI NO: 20260214 NR Description: putative trans-prenyltransferase [Arabidopsis
  misc_feature (56)..(454): Homolog of NCBI NO: 27261729 NR Description: geranylgeranyl diphosphate synthase [Citrus
  misc_feature (78)..(454): Homolog of NCBI NO: 12055493 NR Description: geranyl diphosphat synthase [Quercus robur]
FPLPRLTFSPSSTPPPAPSPRSREREREMSWRWALARRVATLVGGGTGGPGAAQAQRLFSSSGALPGRLHPAPPQIRNKVVGCRGAAFVNSRWLHDATQCQTRQDGVSRAEEQHDPFELVADELSILGNRLRSMVVAEVPKLESAAEYFFKVGAEGKRFRPTVLLLMASALKFPIPESTDVGVFSILASKLRTRQQNIAEITEMIHVASLLHDDVLDDADTRRGVTSLNCIMGNKLSVLAGDFLLSRACVALAALGNTEVVSLMATAVGHLVTGETMQMSTSREQRRSMEYYLQKTYYKTASLISNSCKAVAILAGHTAEISVLAYEYGRNLGLAFQLIDDVLDFTGTSASLGKGSLSDIRHGIITAPMLYAMEEFPQLQDVVDQGFDNPANVEIALDYLQKSRGIERTKELAQEHVNLAVKAIESLPDSDDEDVLISRRALIDITQRVITRTK

SEQ ID NO: 62269 - protein, 426 aa, Triticum aestivum
  peptide (1)..(426): Ceres Seq. ID no. 13596805
  misc_feature (113)..(385): Pfam Name: Polyprenyl synthetase Pfam Description: Polyprenyl synthetase
  misc_feature (74)..(426): Homolog of NCBI NO: 29165656 NR Description: Similar to trans-prenyltransferase [Homo sapiens]
  misc_feature (72)..(426): Homolog of NCBI NO: 9507201 NR Description: trans-prenyltransferase [Mus musculus]
  misc_feature (106)..(211): Homolog of NCBI NO: 25314274 NR Description: probable trans-prenyltransferase
  misc_feature (227)..(426): Homolog of NCBI NO: 25314274 NR Description: probable trans-prenyltransferase
  misc_feature (106)..(426): Homolog of NCBI NO: 30686146 NR Description: geranyl diphosphate synthase
  misc_feature (106)..(426): Homolog of NCBI NO: 11322972 NR Description: geranyl diphosphate synthase [Citrus sinensis]
  misc_feature (80)..(426): Homolog of NCBI NO: 11322965 NR Description: geranyl diphosphate synthase [Arabidopsis
  misc_feature (80)..(426): Homolog of NCBI NO: 20260214 NR Description: putative trans-prenyltransferase [Arabidopsis
  misc_feature (28)..(426): Homolog of NCBI NO: 27261729 NR Description: geranylgeranyl diphosphate synthase [Citrus
  misc_feature (50)..(426): Homolog of NCBI NO: 12055493 NR Description: geranyl diphosphat synthase [Quercus robur]
MSWRWALARRVATLVGGGTGGPGAAQAQRLFSSSGALPGRLHPAPPQIRNKVVGCRGAAFVNSRWLHDATQCQTRQDGVSRAEEQHDPFELVADELSILGNRLRSMVVAEVPKLESAAEYFFKVGAEGKRFRPTVLLLMASALKFPIPESTDVGVFSILASKLRTRQQNIAEITEMIHVASLLHDDVLDDADTRRGVTSLNCIMGNKLSVLAGDFLLSRACVALAALGNTEVVSLMATAVGHLVTGETMQMSTSREQRRSMEYYLQKTYYKTASLISNSCKAVAILAGHTAEISVLAYEYGRNLGLAFQLIDDVLDFTGTSASLGKGSLSDIRHGIITAPMLYAMEEFPQLQDVVDQGFDNPANVEIALDYLQKSRGIERTKELAQEHVNLAVKAIESLPDSDDEDVLISRRALIDITQRVITRTK

SEQ ID NO: 62270 - protein, 321 aa, Triticum aestivum
  peptide (1)..(321): Ceres Seq. ID no. 13596806
  misc_feature (8)..(280): Pfam Name: Polyprenyl synthetase Pfam Description: Polyprenyl synthetase
  misc_feature (1)..(321): Homolog of NCBI NO: 29165656 NR Description: Similar to trans-prenyltransferase [Homo sapiens]
  misc_feature (1)..(321): Homolog of NCBI NO: 9507201 NR Description: trans-prenyltransferase [Mus musculus]
  misc_feature (1)..(106): Homolog of NCBI NO: 25314274 NR Description: probable trans-prenyltransferase
  misc_feature (122)..(321): Homolog of NCBI NO: 25314274 NR Description: probable trans-prenyltransferase
  misc_feature (1)..(321): Homolog of NCBI NO: 30686146 NR Description: geranyl diphosphate synthase
  misc_feature (1)..(321): Homolog of NCBI NO: 11322972 NR Description: geranyl diphosphate synthase [Citrus sinensis]
  misc_feature (1)..(321): Homolog of NCBI NO: 11322965 NR Description: geranyl diphosphate synthase [Arabidopsis
  misc_feature (1)..(321): Homolog of NCBI NO: 20260214 NR Description: putative trans-prenyltransferase [Arabidopsis
  misc_feature (1)..(321): Homolog of NCBI NO: 27261729 NR Description: geranylgeranyl diphosphate synthase [Citrus
  misc_feature (1)..(321): Homolog of NCBI NO: 12055493 NR Description: geranyl diphosphat synthase [Quercus robur]
MVVAEVPKLESAAEYFFKVGAEGKRFRPTVLLLMASALKFPIPESTDVGVFSILASKLRTRQQNIAEITEMIHVASLLHDDVLDDADTRRGVTSLNCIMGNKLSVLAGDFLLSRACVALAALGNTEVVSLMATAVGHLVTGETMQMSTSREQRRSMEYYLQKTYYKTASLISNSCKAVAILAGHTAEISVLAYEYGRNLGLAFQLIDDVLDFTGTSASLGKGSLSDIRHGIITAPMLYAMEEFPQLQDVVDQGFDNPANVEIALDYLQKSRGIERTKELAQEHVNLAVKAIESLPDSDDEDVLISRRALIDITQRVITRTK

SEQ ID NO: 62271 - DNA, 1783 bp, Triticum aestivum
  misc_feature (1)..(1783): Ceres Seq. ID no. 13502952
ctagaacatcctaatcgaaaagaacaaaagcaagaagtctgctacccaatcccatctactaccccccatctctcttcctgctccgtggtgtacttgtggtctcgaggatgaggagctccatggccctcttggcggcggcgctgctgctgctggtgtcgctggcggcggcggcggacatgtcgatcgtgtcgtacggggagcggagcgaggaggaggtgcggcggatgtacgccgagtggatgtccgagcaccgcaggacgtacaacgccatcggcgaggaggagcgccgcttcgaggtcttcagggacaacctccgctacatcgaccagcacaacgccgccgccgacgccgggctccactccttccgcctcggcctcaaccgcttcgccgacctcaccaacgaggagtaccgcagcacgtacctgggcgcccggaccaagccggaccgggagcggaagctcagcgccaggtaccaggccgacgacaacgaggagctgccggagaccgtcgactggaggaagaagggggccgttgctgccatcaaggaccagggcggctgcgggagctgctgggctttctcagcaatagcagctgttgaaggcatcaaccagattgttacgggcgacatgatccctctgtccgagcaagagcttgttgactgtgacacttcatacaacgagggatgcaatggaggtctgatggactatgcgtttgagttcatcattaacaatggcggtatcgactctgaggaggactacccctacaaggagagggacaaccgttgcgatgctaacaagaaaaatgcgaaggttgttaccattgatgggtacgaggatgtgcccgtgaacagtgagaagagtctgcagaaggcagttgcaaaccagcccatcagtgttgcgattgaggctggtggcagggcattccagctctacaaatcgggtatcttcactggaacctgtggaacagcacttgaccatggtgtcgccgccgttggttatggtacagagaacggcaaggactactggctcgtcaggaactcctggggtaccgtctggggagaggatggttacatccggatggagcgtaacatcaaggcatccagtggcaaatgtggtattgccgttgagccttcctacccgacgaagacgggcgagaacccccctaaccccggcccaactccaccatctcccgccccaccgtcttccgtctgtgacagctacaacgagtgccccgcgagcacgacctgctgctgcatctacgagtacggcaaggagtgcttcgcctggggctgttgcccactcgagggtgctacctgctgcgatgatcactacagctgctgccctcataactatcccatctgcaacacccagcagggaacctgccttgcggccaaggacagtccactgtcagtgaaggctcagaggcgtaccctggccaagcctatcggtgctttctctgtcattgcaactgacggcaagaaaagtagcgcgtaaacatttgcatcaccacaatcctacagccaacggccatggtggttaacttctgcaaatgatcacctggtgacccacgatagaaggcgcagcatggcaatagctgtgctctcaagtatcttctttatagtagatgctcctgtacataatcctaaaatcgggttcggttgttcacagaaccgccacatttgcttttgcatatgtatatgtaaattcagcacattcccaggcagtttggggctgctattgttatatggaattcatcaagaaacaagataagcagatttcttgtc

SEQ ID NO: 62272 - protein, 461 aa, Triticum aestivum
  peptide (1)..(461): Ceres Seq. ID no. 13502953
  misc_feature (130)..(344): Pfam Name: Papain family cysteine protease Pfam Description: Papain family cysteine protease
  misc_feature (4)..(461): Homolog of NCBI NO: 7435801 NR Description: cysteine proteinase (EC 3.4.22.-) precursor -
  misc_feature (4)..(461): Homolog of NCBI NO: 5777889 NR Description: cysteine protease [Solanum tuberosum]
  misc_feature (12)..(450): Homolog of NCBI NO: 7435791 NR Description: cysteine proteinase (EC 3.4.22.-) 3 precursor -
  misc_feature (1)..(445): Homolog of NCBI NO: 18401614 NR Description: cysteine proteinase RD21A [Arabidopsis thaliana]
  misc_feature (1)..(445): Homolog of NCBI NO: 14517542 NR Description: F2G19.31/F2G19.31 [Arabidopsis thaliana]
  misc_feature (3)..(461): Homolog of NCBI NO: 7435806 NR Description: cysteine proteinase mir3 (EC 3.4.22.-) - maize
  misc_feature (1)..(426): Homolog of NCBI NO: 10241433 NR Description: putative oryzain alpha precursor
  misc_feature (1)..(461): Homolog of NCBI NO: 6682829 NR Description: cysteine protease component of protease-inhibitor
  misc_feature (1)..(461): Homolog of NCBI NO: 38345906 NR Description: OSJNBb0059K02.8 [Oryza sativa (japonica
  misc_feature (1)..(461): Homolog of NCBI NO: 129231 NR Description: Oryzain alpha chain precursor
MRSSMALLAAALLLLVSLAAAADMSIVSYGERSEEEVRRMYAEWMSEHRRTYNAIGEEERRFEVFRDNLRYIDQHNAAADAGLHSFRLGLNRFADLTNEEYRSTYLGARTKPDRERKLSARYQADDNEELPETVDWRKKGAVAAIKDQGGCGSCWAFSAIAAVEGINQIVTGDMIPLSEQELVDCDTSYNEGCNGGLMDYAFEFIINNGGIDSEEDYPYKERDNRCDANKKNAKVVTIDGYEDVPVNSEKSLQKAVANQPISVAIEAGGRAFQLYKSGIFTGTCGTALDHGVAAVGYGTENGKDYWLVRNSWGTVWGEDGYIRMERNIKASSGKCGIAVEPSYPTKTGENPPNPGPTPPSPAPPSSVCDSYNECPASTTCCCIYEYGKECFAWGCCPLEGATCCDDHYSCCPHNYPICNTQQGTCLAAKDSPLSVKAQRRTLAKPIGAFSVIATDGKKSSA

SEQ ID NO: 62273 - protein, 457 aa, Triticum aestivum
  peptide (1)..(457): Ceres Seq. ID no. 13502954
  misc_feature (126)..(340): Pfam Name: Papain family cysteine protease Pfam Description: Papain family cysteine protease
  misc_feature (1)..(457): Homolog of NCBI NO: 7435801 NR Description: cysteine proteinase (EC 3.4.22.-) precursor -
  misc_feature (1)..(457): Homolog of NCBI NO: 5777889 NR Description: cysteine protease [Solanum tuberosum]
  misc_feature (8)..(446): Homolog of NCBI NO: 7435791 NR Description: cysteine proteinase (EC 3.4.22.-) 3 precursor -
  misc_feature (1)..(441): Homolog of NCBI NO: 18401614 NR Description: cysteine proteinase RD21A [Arabidopsis thaliana]
  misc_feature (1)..(441): Homolog of NCBI NO: 14517542 NR Description: F2G19.31/F2G19.31 [Arabidopsis thaliana]
  misc_feature (1)..(457): Homolog of NCBI NO: 7435806 NR Description: cysteine proteinase mir3 (EC 3.4.22.-) - maize
  misc_feature (1)..(422): Homolog of NCBI NO: 10241433 NR Description: putative oryzain alpha precursor
  misc_feature (1)..(457): Homolog of NCBI NO: 6682829 NR Description: cysteine protease component of protease-inhibitor
  misc_feature (1)..(457): Homolog of NCBI NO: 38345906 NR Description: OSJNBb0059K02.8 [Oryza sativa (japonica
  misc_feature (1)..(457): Homolog of NCBI NO: 129231 NR Description: Oryzain alpha chain precursor
MALLAAALLLLVSLAAAADMSIVSYGERSEEEVRRMYAEWMSEHRRTYNAIGEEERRFEVFRDNLRYIDQHNAAADAGLHSFRLGLNRFADLTNEEYRSTYLGARTKPDRERKLSARYQADDNEELPETVDWRKKGAVAAIKDQGGCGSCWAFSAIAAVEGINQIVTGDMIPLSEQELVDCDTSYNEGCNGGLMDYAFEFIINNGGIDSEEDYPYKERDNRCDANKKNAKVVTIDGYEDVPVNSEKSLQKAVANQPISVAIEAGGRAFQLYKSGIFTGTCGTALDHGVAAVGYGTENGKDYWLVRNSWGTVWGEDGYIRMERNIKASSGKCGIAVEPSYPTKTGENPPNPGPTPPSPAPPSSVCDSYNECPASTTCCCIYEYGKECFAWGCCPLEGATCCDDHYSCCPHNYPICNTQQGTCLAAKDSPLSVKAQRRTLAKPIGAFSVIATDGKKSSA

SEQ ID NO: 62274 - protein, 438 aa, Triticum aestivum
  peptide (1)..(438): Ceres Seq. ID no. 13502955
  misc_feature (107)..(321): Pfam Name: Papain family cysteine protease Pfam Description: Papain family cysteine protease
  misc_feature (1)..(438): Homolog of NCBI NO: 7435801 NR Description: cysteine proteinase (EC 3.4.22.-) precursor -
  misc_feature (1)..(438): Homolog of NCBI NO: 5777889 NR Description: cysteine protease [Solanum tuberosum]
  misc_feature (1)..(427): Homolog of NCBI NO: 7435791 NR Description: cysteine proteinase (EC 3.4.22.-) 3 precursor -
  misc_feature (1)..(422): Homolog of NCBI NO: 18401614 NR Description: cysteine proteinase RD21A [Arabidopsis thaliana]
  misc_feature (1)..(422): Homolog of NCBI NO: 14517542 NR Description: F2G19.31/F2G19.31 [Arabidopsis thaliana]
  misc_feature (1)..(438): Homolog of NCBI NO: 7435806 NR Description: cysteine proteinase mir3 (EC 3.4.22.-) - maize
  misc_feature (1)..(403): Homolog of NCBI NO: 10241433 NR Description: putative oryzain alpha precursor
  misc_feature (1)..(438): Homolog of NCBI NO: 6682829 NR Description: cysteine protease component of protease-inhibitor
  misc_feature (1)..(438): Homolog of NCBI NO: 38345906 NR Description: OSJNBb0059K02.8 [Oryza sativa (japonica
  misc_feature (1)..(438): Homolog of NCBI NO: 129231 NR Description: Oryzain alpha chain precursor
MSIVSYGERSEEEVRRMYAEWMSEHRRTYNAIGEEERRFEVFRDNLRYIDQHNAAADAGLHSFRLGLNRFADLTNEEYRSTYLGARTKPDRERKLSARYQADDNEELPETVDWRKKGAVAAIKDQGGCGSCWAFSAIAAVEGINQIVTGDMIPLSEQELVDCDTSYNEGCNGGLMDYAFEFIINNGGIDSEEDYPYKERDNRCDANKKNAKVVTIDGYEDVPVNSEKSLQKAVANQPISVAIEAGGRAFQLYKSGIFTGTCGTALDHGVAAVGYGTENGKDYWLVRNSWGTVWGEDGYIRMERNIKASSGKCGIAVEPSYPTKTGENPPNPGPTPPSPAPPSSVCDSYNECPASTTCCCIYEYGKECFAWGCCPLEGATCCDDHYSCCPHNYPICNTQQGTCLAAKDSPLSVKAQRRTLAKPIGAFSVIATDGKKSSA

SEQ ID NO: 62275 - DNA, 1372 bp, Triticum aestivum
  misc_feature (1)..(1372): Ceres Seq. ID no. 13596807
gtgtctggcactggcactgagatggcactgccggtgagctcggccggcctcgtctcgctcctcgtcccctgcctcctctccttcgtcctcctccgcttctccgccctgctggaccccggcgccgccgtgccccgcgtcaagaggtcccctcccctgcccctgcgcttccgccatgacggcgccttcaagatcctccaggtggcggacatgcacttcggcaacggcgccgccacgcgctgccgggacgtggcgccggaggtcggcggcgcgcgctgctccgaccgcaacaccacgcgcttcctgcgccggctcatcgaagcggagaggcccgacctcatagccttcaccggggataacatatttgggggcagtgcaactgatgcagcagaatcactgctcagagcaattagccctgctatagagtacaaggtaccatgggccgccatattaggaaatcatgaccaggaatctacaatgacgcgagaggaactgatgatgttcttgtctttgatggattactcagtatctcaagtaaaccctcctggttttctggtacatgggtttggcaattaccatgttggcatacatgggccatttggatcggggttggtcaatactagtctgcttaacctttacttcctggatagtggggatcgtgaagtggtcgacggaattaaaacttatggatggatcaaagaatctcaacttgcttggctcagtgctacttcaagagaactccagaaaaattcgcttgcccccgcgttatcattcttccacatcccaaatccagaagtccgagagctgtggtacacagattttaagggtgagtatcaggaaggagtggcttgctcattaattaactctggtgtccttgacaccctcgtctccatgggagatgtgaaaggtgtctttcttggtcatgatcatcttaatgatttctgtggcaaccttaacggcatatggttctgttatggcggtggctttggttaccatgcctatggaaggcctcattggccgaggagagctcgggtaatttacactcaactcaagaaagggcagaggtcatggatgggagtcgagtcgatacagacttggaagttgcttgacgacgagaacctttccaagatcgatgagcaggttctctggagagacagtgacaatgactcttaccagagtgtccacttgtaagctccggacactaaaagatctctttgtatgttgtaaacatatttgatcaattacaatacatcaaattggtaggtttgatcaaattagtcatggttggccatggaccaaattagacacctgtatatgatactgctgtatcttgttcatatgcaaatcccttgcttgggttgttgagaccagttcc

SEQ ID NO: 62276 - protein, 395 aa, Triticum aestivum
  peptide (1)..(395): Ceres Seq. ID no. 15221975
  misc_feature (62)..(311): Pfam Name: Calcineurin-like phosphoesterase Pfam Description: Calcineurin-like phosphoesterase
  misc_feature (97)..(345): Homolog of NCBI NO: 15896061 NR Description: Predicted phosphohydrolase, Icc family
  misc_feature (59)..(393): Homolog of NCBI NO: 6323393 NR Description: Dose-Dependent Cell cycle Regulator; Ylr361cp
  misc_feature (46)..(381): Homolog of NCBI NO: 40740622 NR Description: hypothetical protein AN3604.2 [Aspergillus
  misc_feature (54)..(329): Homolog of NCBI NO: 30267809 NR Description: hypothetical protein [Arabidopsis thaliana]
  misc_feature (54)..(382): Homolog of NCBI NO: 30267807 NR Description: hypothetical protein [Arabidopsis thaliana]
  misc_feature (54)..(382): Homolog of NCBI NO: 25763519 NR Description: probable phosphoesterase (EC 3.1.-.-) At2g46880 -
  misc_feature (54)..(394): Homolog of NCBI NO: 15226455 NR Description: calcineurin-like phosphoesterase family
  misc_feature (54)..(385): Homolog of NCBI NO: 7208777 NR Description: putative PTS protein [Cicer arietinum]
  misc_feature (54)..(387): Homolog of NCBI NO: 15242654 NR Description: calcineurin-like phosphoesterase family
  misc_feature (21)..(387): Homolog of NCBI NO: 15242042 NR Description: Calcineurin-like phosphoesterase family
VSGTGTEMALPVSSAGLVSLLVPCLLSFVLLRFSALLDPGAAVPRVKRSPPLPLRFRHDGAFKILQVADMHFGNGAATRCRDVAPEVGGARCSDRNTTRFLRRLIEAERPDLIAFTGDNIFGGSATDAAESLLRAISPAIEYKVPWAAILGNHDQESTMTREELMMFLSLMDYSVSQVNPPGFLVHGFGNYHVGIHGPFGSGLVNTSLLNLYFLDSGDREVVDGIKTYGWIKESQLAWLSATSRELQKNSLAPALSFFHIPNPEVRELWYTDFKGEYQEGVACSLINSGVLDTLVSMGDVKGVFLGHDHLNDFCGNLNGIWFCYGGGFGYHAYGRPHWPRRARVIYTQLKKGQRSWMGVESIQTWKLLDDENLSKIDEQVLWRDSDNDSYQSVHL

SEQ ID NO: 62277 - protein, 388 aa, Triticum aestivum
  peptide (1)..(388): Ceres Seq. ID no. 15221976
  misc_feature (55)..(304): Pfam Name: Calcineurin-like phosphoesterase Pfam Description: Calcineurin-like phosphoesterase
  misc_feature (90)..(338): Homolog of NCBI NO: 15896061 NR Description: Predicted phosphohydrolase, Icc family
  misc_feature (52)..(386): Homolog of NCBI NO: 6323393 NR Description: Dose-Dependent Cell cycle Regulator; Ylr361cp
  misc_feature (39)..(374): Homolog of NCBI NO: 40740622 NR Description: hypothetical protein AN3604.2 [Aspergillus
  misc_feature (47)..(322): Homolog of NCBI NO: 30267809 NR Description: hypothetical protein [Arabidopsis thaliana]
  misc_feature (47)..(375): Homolog of NCBI NO: 30267807 NR Description: hypothetical protein [Arabidopsis thaliana]
  misc_feature (47)..(375): Homolog of NCBI NO: 25763519 NR Description: probable phosphoesterase (EC 3.1.-.-) At2g46880 -
  misc_feature (47)..(387): Homolog of NCBI NO: 15226455 NR Description: calcineurin-like phosphoesterase family
  misc_feature (47)..(378): Homolog of NCBI NO: 7208777 NR Description: putative PTS protein [Cicer arietinum]
  misc_feature (47)..(380): Homolog of NCBI NO: 15242654 NR Description: calcineurin-like phosphoesterase family
  misc_feature (14)..(380): Homolog of NCBI NO: 15242042 NR Description: Calcineurin-like phosphoesterase family
MALPVSSAGLVSLLVPCLLSFVLLRFSALLDPGAAVPRVKRSPPLPLRFRHDGAFKILQVADMHFGNGAATRCRDVAPEVGGARCSDRNTTRFLRRLIEAERPDLIAFTGDNIFGGSATDAAESLLRAISPAIEYKVPWAAILGNHDQESTMTREELMMFLSLMDYSVSQVNPPGFLVHGFGNYHVGIHGPFGSGLVNTSLLNLYFLDSGDREVVDGIKTYGWIKESQLAWLSATSRELQKNSLAPALSFFHIPNPEVRELWYTDFKGEYQEGVACSLINSGVLDTLVSMGDVKGVFLGHDHLNDFCGNLNGIWFCYGGGFGYHAYGRPHWPRRARVIYTQLKKGQRSWMGVESIQTWKLLDDENLSKIDEQVLWRDSDNDSYQSVHL

SEQ ID NO: 62278 - protein, 326 aa, Triticum aestivum
  peptide (1)..(326): Ceres Seq. ID no. 15221977
  misc_feature (1)..(242): Pfam Name: Calcineurin-like phosphoesterase Pfam Description: Calcineurin-like phosphoesterase
  misc_feature (28)..(276): Homolog of NCBI NO: 15896061 NR Description: Predicted phosphohydrolase, Icc family
  misc_feature (1)..(324): Homolog of NCBI NO: 6323393 NR Description: Dose-Dependent Cell cycle Regulator; Ylr361cp
  misc_feature (1)..(312): Homolog of NCBI NO: 40740622 NR Description: hypothetical protein AN3604.2 [Aspergillus
  misc_feature (1)..(260): Homolog of NCBI NO: 30267809 NR Description: hypothetical protein [Arabidopsis thaliana]
  misc_feature (1)..(313): Homolog of NCBI NO: 30267807 NR Description: hypothetical protein [Arabidopsis thaliana]
  misc_feature (1)..(313): Homolog of NCBI NO: 25763519 NR Description: probable phosphoesterase (EC 3.1.-.-) At2g46880 -
  misc_feature (1)..(325): Homolog of NCBI NO: 15226455 NR Description: calcineurin-like phosphoesterase family
  misc_feature (1)..(316): Homolog of NCBI NO: 7208777 NR Description: putative PTS protein [Cicer arietinum]
  misc_feature (1)..(318): Homolog of NCBI NO: 15242654 NR Description: calcineurin-like phosphoesterase family
  misc_feature (1)..(318): Homolog of NCBI NO: 15242042 NR Description: Calcineurin-like phosphoesterase family
MHFGNGAATRCRDVAPEVGGARCSDRNTTRFLRRLIEAERPDLIAFTGDNIFGGSATDAAESLLRAISPAIEYKVPWAAILGNHDQESTMTREELMMFLSLMDYSVSQVNPPGFLVHGFGNYHVGIHGPFGSGLVNTSLLNLYFLDSGDREVVDGIKTYGWIKESQLAWLSATSRELQKNSLAPALSFFHIPNPEVRELWYTDFKGEYQEGVACSLINSGVLDTLVSMGDVKGVFLGHDHLNDFCGNLNGIWFCYGGGFGYHAYGRPHWPRRARVIYTQLKKGQRSWMGVESIQTWKLLDDENLSKIDEQVLWRDSDNDSYQSVHL

SEQ ID NO: 62279 - DNA, 630 bp, Triticum aestivum
  misc_feature (1)..(630): Ceres Seq. ID no. 13596513
aacatttcacatgccatctagcatcactcactgcaatcacactctatcactagctagctcagctgccctacagtgcacgcggattaactagccatggcagctcacgactcggacctcggcggcgccgtccacgtcctcctgctcccgtacccgagccagggccacatcaaccccatcctccagttcggcaagcgcctcgcctcccacgccggcgtccgctgcacgctcgccgtcacgcgctacctcctcggccagggccgggacccgtgcccgggcgccgtgcacctcgccgagatctccgacggctttgaccgcggcggcttcgccgaggccgacggcgacgtcgcggcgtacctcgcccggctggagtccgtcgggtcacgcactgtcgacgagctgctgcggtccgaggcggagaagggccggcccgtgcgcgccgtggtgtacgacgcgttcctgcagccgtgggcgccccgcgtggcccggcagcacggcgccgcgtgcgcgtccctcttcacgcaggcgcccgcggtgaacgtggcgtacgcgcacgccggtgctgggcgcnngnccgttcngntcctcgcgggcacggtgccgccggagcttcccgggctgcctgccgggctc

SEQ ID NO: 62280 - protein, 179 aa, Triticum aestivum
  peptide (1)..(179): Ceres Seq. ID no. 13596514
  misc_feature (13)..(175): Pfam Name: UDP-glucoronosyl and UDP-glucosyl transferase Pfam Description: UDP-glucoronosyl and UDP-glucosyl transferase
  misc_feature (13)..(161): Homolog of NCBI NO: 28273402 NR Description: putative Glu synthetase [Oryza sativa (japonica
  misc_feature (13)..(148): Homolog of NCBI NO: 15224372 NR Description: glycosyltransferase family [Arabidopsis thaliana]
  misc_feature (13)..(151): Homolog of NCBI NO: 15224368 NR Description: glycosyltransferase family [Arabidopsis thaliana]
  misc_feature (13)..(175): Homolog of NCBI NO: 7385017 NR Description: UDP-glucose:salicylic acid glucosyltransferase
  misc_feature (5)..(158): Homolog of NCBI NO: 38345000 NR Description: OSJNBa0052O21.3 [Oryza sativa (japonica
  misc_feature (9)..(158): Homolog of NCBI NO: 38345012 NR Description: OSJNBa0052O21.15 [Oryza sativa (japonica
  misc_feature (5)..(177): Homolog of NCBI NO: 38344998 NR Description: OSJNBa0052O21.1 [Oryza sativa (japonica
  misc_feature (1)..(158): Homolog of NCBI NO: 38345011 NR Description: OSJNBa0052O21.14 [Oryza sativa (japonica
  misc_feature (1)..(158): Homolog of NCBI NO: 38344999 NR Description: OSJNBa0052O21.2 [Oryza sativa (japonica
  misc_feature (2)..(166): Homolog of NCBI NO: 38345013 NR Description: OSJNBa0052O21.16 [Oryza sativa (japonica
  misc_feature (159)..(159): Xaa is any aa, unknown or other
  misc_feature (160)..(160): Xaa is any aa, unknown or other
  misc_feature (162)..(162): Xaa is any aa, unknown or other
  misc_feature (163)..(163): Xaa is any aa, unknown or other
MAAHDSDLGGAVHVLLLPYPSQGHINPILQFGKRLASHAGVRCTLAVTRYLLGQGRDPCPGAVHLAEISDGFDRGGFAEADGDVAAYLARLESVGSRTVDELLRSEAEKGRPVRAVVYDAFLQPWAPRVARQHGAACASLFTQAPAVNVAYAHAGAGRXXVXXLAGTVPPELPGLPAGL

SEQ ID NO: 62281 - DNA, 1286 bp, Triticum aestivum
  misc_feature (1)..(1286): Ceres Seq. ID no. 12625255
ggtccgtagttcacagccgaggtccgtaaacccttggatttcctccatctccacaccagtgcggctccagtccgtccgagaccggcatggccaccacggccgccgccgccgccgcggtcccagacgctattccagccgcggcgcccgcggccccgtccgcgcaaccgcatcccgttccagacaaatgtacgaattataaaaaccatttgcaagagtggactcaaaggaatgatcagaagttgccagcttataatactgagtcgaaacgtgaccatcatcgacttgagttcagaagcaccgttgaggtgggtggcgagcggtttcaatcagctcgcaatcatagccgccgcaaggatgcggagcaggatgctgccagagtggcatatgaaatcttggtgacaaagacagtaaatgatgatgatcatacagatgcgcttgggctgattgatcagggcgtgctgttctgcaaatcaattctccatgaatttgctgttaagacaaaagctgaacagcccacttactccgcagatcatccagaaggggtatcacccatgcccctgtttgtttcatctgtgttgtttgctgggaacacttatactggtgaagctgcaacatgtaagaaggacgcagagcagaaggctgctcgtgttgcagtcaaatctattttagctacaaagaacacttgtatgcatcaaattgtcagatcaaagaaagagcttatcattgccatcacatcttctgggttcaacaaagaaagaggagttgtaagccaggaaaactgcaatgctccaacaaatgcaattactcctataaaatttgtgcctgctggtgaagctgctggtctaactgcggatcaaggagcgaccaacgttcctgaagatgatccatgtgcacaagctgtatctggctcggaaaagcgcaagaagcacagaaaggtttgatgagaagactctcacccatcgtaacatgagattttgtcgtctatggtggtggaagtgaaggggctgctggttatgtggcgctgtgtatgacatgtttttggatcattgctaggatgcttgttggaatgacgttgactaaggcatccactgtccgtatgtttccgtgattagcttagcttggtatcaggaactcaggtttctatcgaagtggcttcgctctgtcgggaactctggatctctgtgatgtaacttgtcgttcgtcgtaccgtttccaacctgtgtttgtgtcagatcagatctcttgaggacgtgtttggttcaagcaatattacccatcattgccgt

SEQ ID NO: 62282 - protein, 284 aa, Triticum aestivum
  peptide (1)..(284): Ceres Seq. ID no. 12625256
  misc_feature (128)..(193): Pfam Name: Double-stranded RNA binding motif Pfam Description: Double-stranded RNA binding motif
  misc_feature (37)..(193): Homolog of NCBI NO: 37535422 NR Description: putative extensin [Oryza sativa (japonica
  misc_feature (37)..(244): Homolog of NCBI NO: 18401724 NR Description: expressed protein
  misc_feature (34)..(193): Homolog of NCBI NO: 27262833 NR Description: dsRNA-binding protein [Brassica oleracea var.
  misc_feature (34)..(193): Homolog of NCBI NO: 27262837 NR Description: dsRNA-binding protein [Brassica oleracea var.
  misc_feature (34)..(193): Homolog of NCBI NO: 27262835 NR Description: dsRNA-binding protein [Brassica oleracea var.
  misc_feature (34)..(193): Homolog of NCBI NO: 27262831 NR Description: dsRNA-binding protein [Brassica oleracea var.
  misc_feature (34)..(193): Homolog of NCBI NO: 9967526 NR Description: RBP2 protein [Brassica oleracea var. capitata]
  misc_feature (34)..(193): Homolog of NCBI NO: 27262829 NR Description: dsRNA-binding protein [Brassica rapa subsp. rapa]
  misc_feature (34)..(193): Homolog of NCBI NO: 8346542 NR Description: BcpLH protein [Brassica rapa]
  misc_feature (2)..(246): Homolog of NCBI NO: 40253891 NR Description: unknown protein [Oryza sativa (japonica
MATTAAAAAAVPDAIPAAAPAAPSAQPHPVPDKCTNYKNHLQEWTQRNDQKLPAYNTESKRDHHRLEFRSTVEVGGERFQSARNHSRRKDAEQDAARVAYEILVTKTVNDDDHTDALGLIDQGVLFCKSILHEFAVKTKAEQPTYSADHPEGVSPMPLFVSSVLFAGNTYTGEAATCKKDAEQKAARVAVKSILATKNTCMHQIVRSKKELIIAITSSGFNKERGVVSQENCNAPTNAITPIKFVPAGEAAGLTADQGATNVPEDDPCAQAVSGSEKRKKHRKV

SEQ ID NO: 62283 - DNA, 816 bp, Triticum aestivum
  misc_feature (1)..(816): Ceres Seq. ID no. 13596812
cctagaacattctaatcgaaaaacacacccaacccccccacccccccaccccctcccccagcagccgccgcaaaagagagcaggaagcgaggaggaactttacaagatagggcatcgaatccgcctccttcttcctcgcgcggtcgtctccgaggcctccgacatggcgaacgcggcatcgggcatggctgtggacgacgaatgcaagctcaagttcctggagctgaaggcgaagcgaacccaccgcttcatcatctacaagatagacgacaagaagaagatggttgttgtggagaaagtcggtgagcctgccctgaactatgaggactttgctgccagcctccccaccaatgaatgcagatacgcgatattcgactatgactttgtcaccgaggagaactgccaaaagagcaagatattcttcgtcgcatggtctcctgacaccgcacgcgtgaggagcaagatgatctacgcaagctccaaggagaggttcaagagggagctcgacggcatccaggtggagctgcaggcgacagacccgaccgaggtcggcttcgatgtcatccaaggccgtgccaactgagcaccatggctgtgctgctgcttaccttaagtatgagcctctgatgaggatttagcgtgctcgccgaggctggtcatgagctgtttaccatgaggcaattgtgatttgagttgccagtatgtaccacctaaggaagatgtaagctatgactggcgcgacgacaaatgtatcctttctggttgttgattcgtggatcctgatatccccttcttgcctgctaaagatcagttgcg

SEQ ID NO: 62284 - protein, 193 aa, Triticum aestivum
  peptide (1)..(193): Ceres Seq. ID no. 13596813
  misc_feature (66)..(193): Pfam Name: Cofilin/tropomyosin-type actin-binding protein Pfam Description: Cofilin/tropomyosin-type actin-binding protein
  misc_feature (55)..(193): Homolog of NCBI NO: 15223471 NR Description: actin depolymerizing factor -related [Arabidopsis
  misc_feature (55)..(193): Homolog of NCBI NO: 30697295 NR Description: actin depolymerizing factor 3 - like protein
  misc_feature (55)..(193): Homolog of NCBI NO: 18408116 NR Description: actin depolymerizing factor 2 (ADF2) [Arabidopsis
  misc_feature (62)..(193): Homolog of NCBI NO: 30697303 NR Description: actin depolymerizing factor 4 - like protein
  misc_feature (55)..(192): Homolog of NCBI NO: 17366765 NR Description: Actin-depolymerizing factor 2 (ADF 2)
  misc_feature (55)..(193): Homolog of NCBI NO: 15231309 NR Description: actin depolymerizing factor 1 (ADF1) [Arabidopsis
  misc_feature (55)..(193): Homolog of NCBI NO: 4185511 NR Description: actin depolymerizing factor 4 [Arabidopsis
  misc_feature (55)..(193): Homolog of NCBI NO: 38564721 NR Description: putative actin-depolymerizing factor 2
  misc_feature (55)..(193): Homolog of NCBI NO: 30697300 NR Description: actin depolymerizing factor 4 - like protein
  misc_feature (55)..(193): Homolog of NCBI NO: 17366768 NR Description: Actin-depolymerizing factor 1 (ADF 1)
LEHSNRKTHPTPPPPHPLPQQPPQKRAGSEEELYKIGHRIRLLLPRAVVSEASDMANAASGMAVDDECKLKFLELKAKRTHRFIIYKIDDKKKMVVVEKVGEPALNYEDFAASLPTNECRYAIFDYDFVTEENCQKSKIFFVAWSPDTARVRSKMIYASSKERFKRELDGIQVELQATDPTEVGFDVIQGRAN

SEQ ID NO: 62285 - protein, 139 aa, Triticum aestivum
  peptide (1)..(139): Ceres Seq. ID no. 13596814
  misc_feature (12)..(139): Pfam Name: Cofilin/tropomyosin-type actin-binding protein Pfam Description: Cofilin/tropomyosin-type actin-binding protein
  misc_feature (1)..(139): Homolog of NCBI NO: 15223471 NR Description: actin depolymerizing factor -related [Arabidopsis
  misc_feature (1)..(139): Homolog of NCBI NO: 30697295 NR Description: actin depolymerizing factor 3 - like protein
  misc_feature (1)..(139): Homolog of NCBI NO: 18408116 NR Description: actin depolymerizing factor 2 (ADF2) [Arabidopsis
  misc_feature (8)..(139): Homolog of NCBI NO: 30697303 NR Description: actin depolymerizing factor 4 - like protein
  misc_feature (1)..(138): Homolog of NCBI NO: 17366765 NR Description: Actin-depolymerizing factor 2 (ADF 2)
  misc_feature (1)..(139): Homolog of NCBI NO: 15231309 NR Description: actin depolymerizing factor 1 (ADF1) [Arabidopsis
  misc_feature (1)..(139): Homolog of NCBI NO: 4185511 NR Description: actin depolymerizing factor 4 [Arabidopsis
  misc_feature (1)..(139): Homolog of NCBI NO: 38564721 NR Description: putative actin-depolymerizing factor 2
  misc_feature (1)..(139): Homolog of NCBI NO: 30697300 NR Description: actin depolymerizing factor 4 - like protein
  misc_feature (1)..(139): Homolog of NCBI NO: 17366768 NR Description: Actin-depolymerizing factor 1 (ADF 1)
MANAASGMAVDDECKLKFLELKAKRTHRFIIYKIDDKKKMVVVEKVGEPALNYEDFAASLPTNECRYAIFDYDFVTEENCQKSKIFFVAWSPDTARVRSKMIYASSKERFKRELDGIQVELQATDPTEVGFDVIQGRAN

SEQ ID NO: 62286 - protein, 132 aa, Triticum aestivum
  peptide (1)..(132): Ceres Seq. ID no. 13596815
  misc_feature (5)..(132): Pfam Name: Cofilin/tropomyosin-type actin-binding protein Pfam Description: Cofilin/tropomyosin-type actin-binding protein
  misc_feature (1)..(132): Homolog of NCBI NO: 15223471 NR Description: actin depolymerizing factor -related [Arabidopsis
  misc_feature (1)..(132): Homolog of NCBI NO: 30697295 NR Description: actin depolymerizing factor 3 - like protein
  misc_feature (1)..(132): Homolog of NCBI NO: 18408116 NR Description: actin depolymerizing factor 2 (ADF2) [Arabidopsis
  misc_feature (1)..(132): Homolog of NCBI NO: 30697303 NR Description: actin depolymerizing factor 4 - like protein
  misc_feature (1)..(131): Homolog of NCBI NO: 17366765 NR Description: Actin-depolymerizing factor 2 (ADF 2)
  misc_feature (1)..(132): Homolog of NCBI NO: 15231309 NR Description: actin depolymerizing factor 1 (ADF1) [Arabidopsis
  misc_feature (1)..(132): Homolog of NCBI NO: 4185511 NR Description: actin depolymerizing factor 4 [Arabidopsis
  misc_feature (1)..(132): Homolog of NCBI NO: 38564721 NR Description: putative actin-depolymerizing factor 2
  misc_feature (1)..(132): Homolog of NCBI NO: 30697300 NR Description: actin depolymerizing factor 4 - like protein
  misc_feature (1)..(132): Homolog of NCBI NO: 17366768 NR Description: Actin-depolymerizing factor 1 (ADF 1)
MAVDDECKLKFLELKAKRTHRFIIYKIDDKKKMVVVEKVGEPALNYEDFAASLPTNECRYAIFDYDFVTEENCQKSKIFFVAWSPDTARVRSKMIYASSKERFKRELDGIQVELQATDPTEVGFDVIQGRAN

SEQ ID NO: 62287 - DNA, 1258 bp, Triticum aestivum
  misc_feature (1)..(1258): Ceres Seq. ID no. 13596816
acacaccagctcctagtagcagtgggtagcactggagagcagcagatacagacagggggctagctagcagcaatggccaggcaggatgttgcttccatgtttgccgttgctctcttcatcggagcattcgtttctgttcctacaagtgtgcaatccatcggcgtgtgctacggcgtgatcgccaacaacctcccgccggcgaacgacgtggtgcagctctacaggtccaagggcatcaccggcatgcgcatctacttcgccgacgccaaggccctctccgcgctccgtaactccggcatcagcctcatcctcgacgtcggcaacgaccagctcgccagcctcgccgccagcacctccaacgcggcgtcctgggtgcagaaaaacgtccggccatactacccggccgtgaacatcaagtacatcgccgccggtaacgaggtccagggaggcgccacccagagcatcgtgccggccatgcggaacctcaacgcggctctctccgccgctgggctcggcgccatcaaggtgtccacctccatccggttcgacgaggtggccaagtccttcccgccctccgagggcgtgttcgcgaatgcctacatgacggacgtggcccggctcctggcgagcaccggcgcgccgctgctggccaacgtgtacccctacttcgcctacaagcgcgacccgcagaacatcaagctcaactacgccacgttccggccgggacccacggtgcgggacgacaagaacgggctgacctacacgtgcctgttcgacgcgatggtggacgccgtggtcgccgccctggagaaggccggggcgccgggggtgagggtggtggtgtcggagagcgggtggccgtcggcgagcgggttcgctgcgacggcggacaacgcgagagcctacaaccagggactgatcgaccacgtcggcgggggcacgcccaagaggcgtggcgcgctggagacgtacatcttcggcatgttcaacgaaaacttcaagagaggggagctcgtggagaagcacttcgggctgttcaacccggacaagtcgccggcgtaccccatccagttcaagtgatctagtcttctagtctagtcgagctagcttacacgtgtacgtacccaggtcttctagtctagtaagtacacacgttcgacacgtactccatgggagagggaagccaatgacttcctgttcctggtggtgatacatcatcatgttatgaataaagagagggaagcagttatgaatttgt

SEQ ID NO: 62288 - protein, 335 aa, Triticum aestivum
  peptide (1)..(335): Ceres Seq. ID no. 13596817
  misc_feature (29)..(334): Pfam Name: Glycosyl hydrolases family 17 Pfam Description: Glycosyl hydrolases family 17
  misc_feature (1)..(334): Homolog of NCBI NO: 30692089 NR Description: 1,3-beta glucanase [Avena sativa]
  misc_feature (29)..(334): Homolog of NCBI NO: 226804 NR Description: endo-1,3-beta-glucanase
  misc_feature (29)..(334): Homolog of NCBI NO: 809429 NR Description: Chain A, 1,3-Beta-Glucanase (E.C.3.2.1.39)
  misc_feature (28)..(335): Homolog of NCBI NO: 585075 NR Description: GLUCAN ENDO-1,3-BETA-GLUCOSIDASE GI ((1-
  misc_feature (28)..(335): Homolog of NCBI NO: 3037080 NR Description: glucan endo-1,3-beta-glucosidase isoenzyme I
  misc_feature (1)..(334): Homolog of NCBI NO: 3068599 NR Description: beta-1,3-glucanase 2 [Hordeum vulgare]
  misc_feature (1)..(334): Homolog of NCBI NO: 21693553 NR Description: beta-1,3-glucanase II [Hordeum vulgare subsp.
  misc_feature (1)..(334): Homolog of NCBI NO: 119003 NR Description: Glucan endo-1,3-beta-glucosidase GII precursor
  misc_feature (1)..(335): Homolog of NCBI NO: 3757682 NR Description: glucan endo-1,3-beta-D-glucosidase [Triticum
  misc_feature (1)..(334): Homolog of NCBI NO: 167010 NR Description: (1-3)-beta-glucanase
MARQDVASMFAVALFIGAFVSVPTSVQSIGVCYGVIANNLPPANDVVQLYRSKGITGMRIYFADAKALSALRNSGISLILDVGNDQLASLAASTSNAASWVQKNVRPYYPAVNIKYIAAGNEVQGGATQSIVPAMRNLNAALSAAGLGAIKVSTSIRFDEVAKSFPPSEGVFANAYMTDVARLLASTGAPLLANVYPYFAYKRDPQNIKLNYATFRPGPTVRDDKNGLTYTCLFDAMVDAVVAALEKAGAPGVRVVVSESGWPSASGFAATADNARAYNQGLIDHVGGGTPKRRGALETYIFGMFNENFKRGELVEKHFGLFNPDKSPAYPIQFK

SEQ ID NO: 62289 - protein, 327 aa, Triticum aestivum
  peptide (1)..(327): Ceres Seq. ID no. 13596818
  misc_feature (21)..(326): Pfam Name: Glycosyl hydrolases family 17 Pfam Description: Glycosyl hydrolases family 17
  misc_feature (1)..(326): Homolog of NCBI NO: 30692089 NR Description: 1,3-beta glucanase [Avena sativa]
  misc_feature (21)..(326): Homolog of NCBI NO: 226804 NR Description: endo-1,3-beta-glucanase
  misc_feature (21)..(326): Homolog of NCBI NO: 809429 NR Description: Chain A, 1,3-Beta-Glucanase (E.C.3.2.1.39)
  misc_feature (20)..(327): Homolog of NCBI NO: 585075 NR Description: GLUCAN ENDO-1,3-BETA-GLUCOSIDASE GI ((1-
  misc_feature (20)..(327): Homolog of NCBI NO: 3037080 NR Description: glucan endo-1,3-beta-glucosidase isoenzyme I
  misc_feature (1)..(326): Homolog of NCBI NO: 3068599 NR Description: beta-1,3-glucanase 2 [Hordeum vulgare]
  misc_feature (1)..(326): Homolog of NCBI NO: 21693553 NR Description: beta-1,3-glucanase II [Hordeum vulgare subsp.
  misc_feature (1)..(326): Homolog of NCBI NO: 119003 NR Description: Glucan endo-1,3-beta-glucosidase GII precursor
  misc_feature (1)..(327): Homolog of NCBI NO: 3757682 NR Description: glucan endo-1,3-beta-D-glucosidase [Triticum
  misc_feature (1)..(326): Homolog of NCBI NO: 167010 NR Description: (1-3)-beta-glucanase
MFAVALFIGAFVSVPTSVQSIGVCYGVIANNLPPANDVVQLYRSKGITGMRIYFADAKALSALRNSGISLILDVGNDQLASLAASTSNAASWVQKNVRPYYPAVNIKYIAAGNEVQGGATQSIVPAMRNLNAALSAAGLGAIKVSTSIRFDEVAKSFPPSEGVFANAYMTDVARLLASTGAPLLANVYPYFAYKRDPQNIKLNYATFRPGPTVRDDKNGLTYTCLFDAMVDAVVAALEKAGAPGVRVVVSESGWPSASGFAATADNARAYNQGLIDHVGGGTPKRRGALETYIFGMFNENFKRGELVEKHFGLFNPDKSPAYPIQFK

SEQ ID NO: 62290 - protein, 278 aa, Triticum aestivum
  peptide (1)..(278): Ceres Seq. ID no. 13596819
  misc_feature (1)..(277): Pfam Name: Glycosyl hydrolases family 17 Pfam Description: Glycosyl hydrolases family 17
  misc_feature (1)..(277): Homolog of NCBI NO: 30692089 NR Description: 1,3-beta glucanase [Avena sativa]
  misc_feature (1)..(277): Homolog of NCBI NO: 226804 NR Description: endo-1,3-beta-glucanase
  misc_feature (1)..(277): Homolog of NCBI NO: 809429 NR Description: Chain A, 1,3-Beta-Glucanase (E.C.3.2.1.39)
  misc_feature (1)..(278): Homolog of NCBI NO: 585075 NR Description: GLUCAN ENDO-1,3-BETA-GLUCOSIDASE GI ((1-
  misc_feature (1)..(278): Homolog of NCBI NO: 3037080 NR Description: glucan endo-1,3-beta-glucosidase isoenzyme I
  misc_feature (1)..(277): Homolog of NCBI NO: 3068599 NR Description: beta-1,3-glucanase 2 [Hordeum vulgare]
  misc_feature (1)..(277): Homolog of NCBI NO: 21693553 NR Description: beta-1,3-glucanase II [Hordeum vulgare subsp.
  misc_feature (1)..(277): Homolog of NCBI NO: 119003 NR Description: Glucan endo-1,3-beta-glucosidase GII precursor
  misc_feature (1)..(278): Homolog of NCBI NO: 3757682 NR Description: glucan endo-1,3-beta-D-glucosidase [Triticum
  misc_feature (1)..(277): Homolog of NCBI NO: 167010 NR Description: (1-3)-beta-glucanase
MRIYFADAKALSALRNSGISLILDVGNDQLASLAASTSNAASWVQKNVRPYYPAVNIKYIAAGNEVQGGATQSIVPAMRNLNAALSAAGLGAIKVSTSIRFDEVAKSFPPSEGVFANAYMTDVARLLASTGAPLLANVYPYFAYKRDPQNIKLNYATFRPGPTVRDDKNGLTYTCLFDAMVDAVVAALEKAGAPGVRVVVSESGWPSASGFAATADNARAYNQGLIDHVGGGTPKRRGALETYIFGMFNENFKRGELVEKHFGLFNPDKSPAYPIQFK

SEQ ID NO: 62291 - DNA, 1499 bp, Triticum aestivum
  misc_feature (1)..(1499): Ceres Seq. ID no. 15226216
aggagcattcattcaggcaagcagacaatcaccgcgacagacgacgagcagcagcacacacccataaaccagaagcggccgtccaagccaaggcgcccacaggacgccaccaagaactcggagccaccttccaatcgaccaagccccctccatccggccaccggatcgggcccgccgatctctcgagctccccggccgccccctcccgcggcggcgtgcaatgggggccgccgccgaggacgccgtcaggcagctcggcatcctcatggatcaagtggacgcgccgctgaggaggacgttccagaatgtgcaccaaggccaccctagagaaacaatgttgcgctttctcaaggctagagaatggaacgtttccaaggctcataaaatgcttgtagattctttgaattggaggattgaaaatgaaattgatagtgtattggagagacctatactcccagtagatttatacagatcaatacgtgattcacaacttgttggactctcaggatacaccaaggagggtcttccagtttttggcattggtgttggtcagagcacatacgacaaagcttcggtgcactactatgtgcaatctcatattcagattaacgaataccgtgatcgcataattttgcccatgttgacggaaaagtttggacgcccgatcaccacttgcgttaaagttctcgacatgactggtttaaagttgtcagcactgagccaaatgaagatgctgagttcaatatcaactgttgatgatctgaactaccctgagaagtcagagacatattacatagttaatgttccatatatattctctgcatgctggaaggttgtgaagcccctattgcaggagaggacaaaaaagaaggttaaagttttgagtggttgtgggagagatgaacttctaaagattatggactactcagctctcccccatttctgccgacgagagggatcaggctcatccaagcattcatcttccaacgccgacgattgcttctcccctgaccaccctttccacaaagagctctacgagctcaccaaccagcaatcgtcgcacaaggagctcctcaagatgggatcattgcatgtgagcatcccggagcctgacccaaacgacgcgaagatcgtcgaggtgatccaggccgagttccacaagatgggggagcagaacggatcgaccaacgggcacaaggtctgatgccgcgccaccaccgaagacggccatctgcatgcggagcaccttaaccaatgcaagcgacctccgattaaactgatgatttaacctgtccatgttggttggctccctcgggacccctggggggatatagcagcgaaggctccgtgatgcatagggtgacgccggcctgggatcatagttggaagagatgaaccggacagtgtatatccattagcatagaacctgcatatgttaaactggtactataacaagatccatggatgatggatgtttattataacagcttgtaagcttc

SEQ ID NO: 62292 - protein, 327 aa, Triticum aestivum
  peptide (1)..(327): Ceres Seq. ID no. 15226217
  misc_feature (135)..(239): Pfam Name: CRAL/TRIO domain Pfam Description: CRAL/TRIO domain
MGAAAEDAVRQLGILMDQVDAPLRRTFQNVHQGHPRETMLRFLKAREWNVSKAHKMLVDSLNWRIENEIDSVLERPILPVDLYRSIRDSQLVGLSGYTKEGLPVFGIGVGQSTYDKASVHYYVQSHIQINEYRDRIILPMLTEKFGRPITTCVKVLDMTGLKLSALSQMKMLSSISTVDDLNYPEKSETYYIVNVPYIFSACWKVVKPLLQERTKKKVKVLSGCGRDELLKIMDYSALPHFCRREGSGSSKHSSSNADDCFSPDHPFHKELYELTNQQSSHKELLKMGSLHVSIPEPDPNDAKIVEVIQAEFHKMGEQNGSTNGHKV

SEQ ID NO: 62293 - protein, 312 aa, Triticum aestivum
  peptide (1)..(312): Ceres Seq. ID no. 15226218
  misc_feature (120)..(224): Pfam Name: CRAL/TRIO domain Pfam Description: CRAL/TRIO domain
MDQVDAPLRRTFQNVHQGHPRETMLRFLKAREWNVSKAHKMLVDSLNWRIENEIDSVLERPILPVDLYRSIRDSQLVGLSGYTKEGLPVFGIGVGQSTYDKASVHYYVQSHIQINEYRDRIILPMLTEKFGRPITTCVKVLDMTGLKLSALSQMKMLSSISTVDDLNYPEKSETYYIVNVPYIFSACWKVVKPLLQERTKKKVKVLSGCGRDELLKIMDYSALPHFCRREGSGSSKHSSSNADDCFSPDHPFHKELYELTNQQSSHKELLKMGSLHVSIPEPDPNDAKIVEVIQAEFHKMGEQNGSTNGHKV

SEQ ID NO: 62294 - protein, 289 aa, Triticum aestivum
  peptide (1)..(289): Ceres Seq. ID no. 15226219
  misc_feature (97)..(201): Pfam Name: CRAL/TRIO domain Pfam Description: CRAL/TRIO domain
MLRFLKAREWNVSKAHKMLVDSLNWRIENEIDSVLERPILPVDLYRSIRDSQLVGLSGYTKEGLPVFGIGVGQSTYDKASVHYYVQSHIQINEYRDRIILPMLTEKFGRPITTCVKVLDMTGLKLSALSQMKMLSSISTVDDLNYPEKSETYYIVNVPYIFSACWKVVKPLLQERTKKKVKVLSGCGRDELLKIMDYSALPHFCRREGSGSSKHSSSNADDCFSPDHPFHKELYELTNQQSSHKELLKMGSLHVSIPEPDPNDAKIVEVIQAEFHKMGEQNGSTNGHKV

SEQ ID NO: 62295 - DNA, 1347 bp, Triticum aestivum
  misc_feature (1)..(1347): Ceres Seq. ID no. 14302840
tctctcgactcattctcacggtcgtcaccagctatcgattcgcaacacagccgtcaagcccagccccgaggaaggaaggaaggaaaggaaggaataggtcggcgccgccatggagatgctgagcatgctgaaggtggggtacacggtgctgcgcagcgagacgccggcgacggacctcgtcaacaccttcatggactgggcggctcgccggtcgctcctccttctggcgctcttcatgcccccctactacgtctacaagctcaccgcgtcggccgccgccaccgtcgcgccgcaggacgtcgcggggaaggtcgtgctcgtcacgggcgcctcctccggcatcggcgagcaaatagcttaccagtacgcgaagaagggagcgaggctggccctggtggcacggagggagggaagcctgcgcgaggtcgccgccaaggcgaccgatctcggctcgccggacgtgctcgttgtgcccggggacgtggcgaggccggaggactgtaaggcgttcgtccaggccacagtcgagcgctttggccggttggatcatctcgtgaacaatgccggtctggtcaacgtgtgctggttcgaggagatgcccgacgtcgccactttcaagcaagtcttggacgtgaacttctggggcacggtgcatccaacccacgccgctcttcctcacctgacgaggagccgcggcaagatcttcgtcaactcctcggccgcggcggtgctggcaatgcctaggatgagcttctacaatgctagcaaggctgccgtgctgagcttcgccgacaccctgcggatggagctcggcgacgaggtgggcgtcacggtggcgacgcccggatggatcgagtccgagatgaccaaggggaagcacctctccaaaggagggagagtcgaggtcgatcaagacacgagggatgctcaggtggggctgtttccggtggtgcgtgccgagcggtgcgccgaggccatcgtggacgccgtttgccgcggccggcgcagcgtcaccgtgccgctgtggtaccgggcgctgttcctctggcggtcgttggcgccggaggtgggcgacgtcctgcaacgcgtgttctaccgccggagctccggcgacgggggcaggcagatgagggcgaggagggtcctggaggtcacgggcgccaagcgcgtgctgcagccgccgtcgctgcacacctcggatatcaaacgggagtagatgctacgtgaataaatgaatgttccggtgtcgtactgcaaagaaaataagatagaatggcgaggtgtagatggatggtttgtgtaaatttaagttgcgttcgaactaagtatgattttgtttctacctac

SEQ ID NO: 62296 - protein, 368 aa, Triticum aestivum
  peptide (1)..(368): Ceres Seq. ID no. 14302841
  misc_feature (35)..(322): Homolog of NCBI NO: 15232779 NR Description: short-chain dehydrogenase/reductase family
  misc_feature (22)..(324): Homolog of NCBI NO: 15232777 NR Description: short-chain dehydrogenase/reductase family
  misc_feature (39)..(320): Homolog of NCBI NO: 15241203 NR Description: short-chain dehydrogenase/reductase family
  misc_feature (22)..(339): Homolog of NCBI NO: 15234888 NR Description: short-chain dehydrogenase/reductase family
  misc_feature (39)..(320): Homolog of NCBI NO: 8777392 NR Description: 11-beta-hydroxysteroid dehydrogenase-like
  misc_feature (22)..(322): Homolog of NCBI NO: 21311775 NR Description: steroleosin-B [Sesamum indicum]
  misc_feature (35)..(326): Homolog of NCBI NO: 15241261 NR Description: short-chain dehydrogenase/reductase family
  misc_feature (22)..(368): Homolog of NCBI NO: 15824408 NR Description: steroleosin [Sesamum indicum]
  misc_feature (22)..(368): Homolog of NCBI NO: 18423187 NR Description: short-chain dehydrogenase/reductase family
  misc_feature (1)..(368): Homolog of NCBI NO: 21742781 NR Description: OSJNBa0055C08.3 [Oryza sativa (japonica
MEMLSMLKVGYTVLRSETPATDLVNTFMDWAARRSLLLLALFMPPYYVYKLTASAAATVAPQDVAGKVVLVTGASSGIGEQIAYQYAKKGARLALVARREGSLREVAAKATDLGSPDVLVVPGDVARPEDCKAFVQATVERFGRLDHLVNNAGLVNVCWFEEMPDVATFKQVLDVNFWGTVHPTHAALPHLTRSRGKIFVNSSAAAVLAMPRMSFYNASKAAVLSFADTLRMELGDEVGVTVATPGWIESEMTKGKHLSKGGRVEVDQDTRDAQVGLFPVVRAERCAEAIVDAVCRGRRSVTVPLWYRALFLWRSLAPEVGDVLQRVFYRRSSGDGGRQMRARRVLEVTGAKRVLQPPSLHTSDIKRE

SEQ ID NO: 62297 - protein, 366 aa, Triticum aestivum
  peptide (1)..(366): Ceres Seq. ID no. 14302842
  misc_feature (33)..(320): Homolog of NCBI NO: 15232779 NR Description: short-chain dehydrogenase/reductase family
  misc_feature (20)..(322): Homolog of NCBI NO: 15232777 NR Description: short-chain dehydrogenase/reductase family
  misc_feature (37)..(318): Homolog of NCBI NO: 15241203 NR Description: short-chain dehydrogenase/reductase family
  misc_feature (20)..(337): Homolog of NCBI NO: 15234888 NR Description: short-chain dehydrogenase/reductase family
  misc_feature (37)..(318): Homolog of NCBI NO: 8777392 NR Description: 11-beta-hydroxysteroid dehydrogenase-like
  misc_feature (20)..(320): Homolog of NCBI NO: 21311775 NR Description: steroleosin-B [Sesamum indicum]
  misc_feature (33)..(324): Homolog of NCBI NO: 15241261 NR Description: short-chain dehydrogenase/reductase family
  misc_feature (20)..(366): Homolog of NCBI NO: 15824408 NR Description: steroleosin [Sesamum indicum]
  misc_feature (20)..(366): Homolog of NCBI NO: 18423187 NR Description: short-chain dehydrogenase/reductase family
  misc_feature (1)..(366): Homolog of NCBI NO: 21742781 NR Description: OSJNBa0055C08.3 [Oryza sativa (japonica
MLSMLKVGYTVLRSETPATDLVNTFMDWAARRSLLLLALFMPPYYVYKLTASAAATVAPQDVAGKVVLVTGASSGIGEQIAYQYAKKGARLALVARREGSLREVAAKATDLGSPDVLVVPGDVARPEDCKAFVQATVERFGRLDHLVNNAGLVNVCWFEEMPDVATFKQVLDVNFWGTVHPTHAALPHLTRSRGKIFVNSSAAAVLAMPRMSFYNASKAAVLSFADTLRMELGDEVGVTVATPGWIESEMTKGKHLSKGGRVEVDQDTRDAQVGLFPVVRAERCAEAIVDAVCRGRRSVTVPLWYRALFLWRSLAPEVGDVLQRVFYRRSSGDGGRQMRARRVLEVTGAKRVLQPPSLHTSDIKRE

SEQ ID NO: 62298 - protein, 363 aa, Triticum aestivum
  peptide (1)..(363): Ceres Seq. ID no. 14302843
  misc_feature (30)..(317): Homolog of NCBI NO: 15232779 NR Description: short-chain dehydrogenase/reductase family
  misc_feature (17)..(319): Homolog of NCBI NO: 15232777 NR Description: short-chain dehydrogenase/reductase family
  misc_feature (34)..(315): Homolog of NCBI NO: 15241203 NR Description: short-chain dehydrogenase/reductase family
  misc_feature (17)..(334): Homolog of NCBI NO: 15234888 NR Description: short-chain dehydrogenase/reductase family
  misc_feature (34)..(315): Homolog of NCBI NO: 8777392 NR Description: 11-beta-hydroxysteroid dehydrogenase-like
  misc_feature (17)..(317): Homolog of NCBI NO: 21311775 NR Description: steroleosin-B [Sesamum indicum]
  misc_feature (30)..(321): Homolog of NCBI NO: 15241261 NR Description: short-chain dehydrogenase/reductase family
  misc_feature (17)..(363): Homolog of NCBI NO: 15824408 NR Description: steroleosin [Sesamum indicum]
  misc_feature (17)..(363): Homolog of NCBI NO: 18423187 NR Description: short-chain dehydrogenase/reductase family
  misc_feature (1)..(363): Homolog of NCBI NO: 21742781 NR Description: OSJNBa0055C08.3 [Oryza sativa (japonica
MLKVGYTVLRSETPATDLVNTFMDWAARRSLLLLALFMPPYYVYKLTASAAATVAPQDVAGKVVLVTGASSGIGEQIAYQYAKKGARLALVARREGSLREVAAKATDLGSPDVLVVPGDVARPEDCKAFVQATVERFGRLDHLVNNAGLVNVCWFEEMPDVATFKQVLDVNFWGTVHPTHAALPHLTRSRGKIFVNSSAAAVLAMPRMSFYNASKAAVLSFADTLRMELGDEVGVTVATPGWIESEMTKGKHLSKGGRVEVDQDTRDAQVGLFPVVRAERCAEAIVDAVCRGRRSVTVPLWYRALFLWRSLAPEVGDVLQRVFYRRSSGDGGRQMRARRVLEVTGAKRVLQPPSLHTSDIKRE

SEQ ID NO: 62299 - DNA, 1711 bp, Triticum aestivum
  misc_feature (1)..(1711): Ceres Seq. ID no. 13596925
ctgtaactcccgctttcagctcactccgatcaatctcgatttgccagccctccgcgacgccggcaggtcgctgttgagcctgactactccccgtagcggacatgggatcgacggcgctcggtggtgcggctccggcgcgcgccggattggcccccaagagtggagtccttggatctactttcaagccatgtggtggtttcaagctcaaaacaactactaaggttggacgctcttcagtttgtgtgagggtatccattgcttcttcaccacaaaaacagtactctcctaagacatcagcagttaaatcaggggaggaagtgcgcattgcggtgctaggagccagcggttataccggggctgagattgttcggcttctagcaaaccaccctcagttccgtatcacagtgatgaccgcagacagaaaagctggtgaacagtttggatctgtatttcctcacttgataacacaagacctgccaaatttagttgcgattaaagatgcagatttttcagatgttgatgctgttttttgttgcttgccacatggaacaacacaggaaattattaaaggcttaccccaacaactgaagattgttgatctctctgcggatttccgattgcgtaacatcaatgagtatgctgagtggtatggccatgctcatagggcaccagaacttcaggaagaggctgtttatggtttgacggaggttcttcgagatgaaataagaaatgcacggcttgttgccaacccgggatgttatcccacgtctattcagctccctcttgttcctctaataaaggcaaaactgatcaagctgagcaatataataattgatgcaaaatctggggttaccggggcaggacgtggagctaaggaagcaaatctgtacaccgagatagctgaaggcattcatgcttatggaataaaaggccaccgtcatgttcctgaggttgaacaaggattgtcagaggctgctgaatccaaagttactatcagcttcactccaaatcttatctgcatgaaacgtgggatgcaatctactatgtttgttgaaatggcacctggagtgactgtcagtgatttgtatcagcatctcaagtctacttatgagggtgaagaatttgtcaagctgttaaatggcagcaatgttcctcacacacgccatgttgttggatcaaattactgcttcatgaatgtcttcgaggacagaattcctggaagggcaatcatcatctctgtcatagacaatcttgtaaagggagcatctggccaggccgtgcagaacctcaatctgatgatgggactgcctgagaacatggggctgcaatatcagcccctatttccttgatatgttgtgcctttgttgtgctctttctcgatgatgctttggagttaagcacccatctctgttttccgttgagaagcaaagagctgaatgtcggagtgtaaccaaactcgctcaacagcaaaacttggtttgtgctggtgtagtatttagagaggagcaacaattagcagttgaataagagtatgaactgagtggcttggtgtaatgaaagtccaaaggctattatatcctacagtggattgttgtcatgagatcaataaagcagtgtaaaacccgattcagagacatcaaccattgctgtcagcattggataatagttagaagtgtgttacttttaaatattaaaggataaattagttttc

SEQ ID NO: 62300 - protein, 415 aa, Triticum aestivum
  peptide (1)..(415): Ceres Seq. ID no. 13596926
  misc_feature (228)..(386): Pfam Name: Semialdehyde dehydrogenase, dimerisation domain Pfam Description: Semialdehyde dehydrogenase, dimerisation domain
  misc_feature (64)..(415): Homolog of NCBI NO: 23054526 NR Description: hypothetical protein [Geobacter metallireducens]
  misc_feature (75)..(415): Homolog of NCBI NO: 22956652 NR Description: hypothetical protein [Rhodobacter sphaeroides]
  misc_feature (74)..(415): Homolog of NCBI NO: 28376951 NR Description: N-acetyl-gamma-glutamyl-phosphate reductase (N-acetyl-glutamate semialdehyde dehydrogenase) (NAGSA
  misc_feature (74)..(415): Homolog of NCBI NO: 6714965 NR Description: N-acetyl-gamma-glutamyl-phosphate reductase
  misc_feature (141)..(415): Homolog of NCBI NO: 23013472 NR Description: hypothetical protein [Magnetospirillum
  misc_feature (64)..(415): Homolog of NCBI NO: 22968389 NR Description: hypothetical protein [Rhodospirillum rubrum]
  misc_feature (64)..(415): Homolog of NCBI NO: 25284367 NR Description: hypothetical protein At2g19940 [imported] -
  misc_feature (64)..(415): Homolog of NCBI NO: 18399202 NR Description: N-acetyl-gamma-glutamyl-phosphate reductase
  misc_feature (20)..(415): Homolog of NCBI NO: 16604368 NR Description: At2g19940/F6F22.3 [Arabidopsis thaliana]
  misc_feature (19)..(415): Homolog of NCBI NO: 37535658 NR Description: putative N-acetyl-gamma-glutamyl-phosphate
MGSTALGGAAPARAGLAPKSGVLGSTFKPCGGFKLKTTTKVGRSSVCVRVSIASSPQKQYSPKTSAVKSGEEVRIAVLGASGYTGAEIVRLLANHPQFRITVMTADRKAGEQFGSVFPHLITQDLPNLVAIKDADFSDVDAVFCCLPHGTTQEIIKGLPQQLKIVDLSADFRLRNINEYAEWYGHAHRAPELQEEAVYGLTEVLRDEIRNARLVANPGCYPTSIQLPLVPLIKAKLIKLSNIIIDAKSGVTGAGRGAKEANLYTEIAEGIHAYGIKGHRHVPEVEQGLSEAAESKVTISFTPNLICMKRGMQSTMFVEMAPGVTVSDLYQHLKSTYEGEEFVKLLNGSNVPHTRHVVGSNYCFMNVFEDRIPGRAIIISVIDNLVKGASGQAVQNLNLMMGLPENMGLQYQPLFP

SEQ ID NO: 62301 - protein, 313 aa, Triticum aestivum
  peptide (1)..(313): Ceres Seq. ID no. 13596927
  misc_feature (126)..(284): Pfam Name: Semialdehyde dehydrogenase, dimerisation domain Pfam Description: Semialdehyde dehydrogenase, dimerisation domain
  misc_feature (1)..(313): Homolog of NCBI NO: 23054526 NR Description: hypothetical protein [Geobacter metallireducens]
  misc_feature (1)..(313): Homolog of NCBI NO: 22956652 NR Description: hypothetical protein [Rhodobacter sphaeroides]
  misc_feature (1)..(313): Homolog of NCBI NO: 28376951 NR Description: N-acetyl-gamma-glutamyl-phosphate reductase (N-acetyl-glutamate semialdehyde dehydrogenase) (NAGSA
  misc_feature (1)..(313): Homolog of NCBI NO: 6714965 NR Description: N-acetyl-gamma-glutamyl-phosphate reductase
  misc_feature (39)..(313): Homolog of NCBI NO: 23013472 NR Description: hypothetical protein [Magnetospirillum
  misc_feature (1)..(313): Homolog of NCBI NO: 22968389 NR Description: hypothetical protein [Rhodospirillum rubrum]
  misc_feature (1)..(313): Homolog of NCBI NO: 25284367 NR Description: hypothetical protein At2g19940 [imported] -
  misc_feature (1)..(313): Homolog of NCBI NO: 18399202 NR Description: N-acetyl-gamma-glutamyl-phosphate reductase
  misc_feature (1)..(313): Homolog of NCBI NO: 16604368 NR Description: At2g19940/F6F22.3 [Arabidopsis thaliana]
  misc_feature (1)..(313): Homolog of NCBI NO: 37535658 NR Description: putative N-acetyl-gamma-glutamyl-phosphate
MTADRKAGEQFGSVFPHLITQDLPNLVAIKDADFSDVDAVFCCLPHGTTQEIIKGLPQQLKIVDLSADFRLRNINEYAEWYGHAHRAPELQEEAVYGLTEVLRDEIRNARLVANPGCYPTSIQLPLVPLIKAKLIKLSNIIIDAKSGVTGAGRGAKEANLYTEIAEGIHAYGIKGHRHVPEVEQGLSEAAESKVTISFTPNLICMKRGMQSTMFVEMAPGVTVSDLYQHLKSTYEGEEFVKLLNGSNVPHTRHVVGSNYCFMNVFEDRIPGRAIIISVIDNLVKGASGQAVQNLNLMMGLPENMGLQYQPLFP

SEQ ID NO: 62302 - DNA, 1448 bp, Triticum aestivum
  misc_feature (1)..(1448): Ceres Seq. ID no. 13654728
agcagaggcagcggcgagagcgagagcgagcacagccgcggagacagacagacgcacgcacgcacgcacgccacgccattacaaatcgcccccagcgagccaagcaccaaaccctacccaaccaggcaaccaccgcccgccagccctcccgcggacggatcctcctgcccgccctcacctctcgccttcctctcgtctcgtctgccttttttttctctcccgccgccgcgccatggaggaggggaggagggggacgaggacggtgcgggtgcggaacatctcagatctggccggggagcgcgaggtgcgcgagttcttctccttctccggcgaaatcgaccacgtcgacatcacccctgacggggcggcggcggggaggacggcctacgtcaccttcaaggacgccaaggccctggagatcgcgctgctgctctcgggagcaacaattgtggatcgagttgtgaacataacctctgctgaagattacatctacatccctgttaatgaacagcaacttatggtgaatgaggtgacaagtacagctcctactgcagatttggaacaacctactgaggccaacgcaagccccactagcgtttatgccagcaaggctcatgatgtcatgacaactgtgatcgcaaggggttcagcaattcgacaagatgctgtgaacaaagctaaatcatttgacgagaggcatcagttgagggctaatgcgtcagctaggatcagttccttcgataggcgtgttggcctttcagagaagttaaatactgggatatcggccgtaaatgaaaaggtgaaaactgtggaccaaaggttacatgtttctgacaaaacaatggctgctttgctggttgcagagcgcaagctaaacaatacaggctctgctgtgaaaaccaacaggtatgtgtctgctggaacaagctggctaaatggtgcgttcagcaaggttgccaaggctggtcatgttgctggctcaagaacaagagaaaagttccagatagctgtgtcaaatatatcagccaaagggcctgctgtcgttgcttgagctttgttctgggactgggagctcttcttcctggggaaaatctgttggaaatcttgagcaagcaccttccattggttgtgtcatcaagctgtggcttgtaactgtgtatttctctattgattttttcttcttcttcgaggagaactttttcagggagtcttgtcagatttggtacataggggatctaaattttctttagaattttagaaccactattctttttagtgcttgtgttcaattgattataggtggtagtgacactttgcaccatgttcctggctcggtgtggtttcatgattgccattgatgtcaaatgtgtcgtgcctctactttctgcagaaattgttactcaaattgagtaatttggaacgtatgaaactgcaatgcttctttgtgt

SEQ ID NO: 62303 - protein, 349 aa, Triticum aestivum
  peptide (1)..(349): Ceres Seq. ID no. 13654729
  misc_feature (88)..(156): Pfam Name: RNA recognition motif. (a.k.a. RRM, RBD, or RNP domain) Pfam Description: RNA recognition motif. (a.k.a. RRM, RBD, or RNP
  misc_feature (167)..(334): Homolog of NCBI NO: 15237419 NR Description: RNA recognition motif (RRM)-containing protein
  misc_feature (87)..(336): Homolog of NCBI NO: 7485085 NR Description: hypothetical protein - Arabidopsis thaliana
  misc_feature (87)..(162): Homolog of NCBI NO: 38344181 NR Description: OSJNBa0053K19.20 [Oryza sativa (japonica
  misc_feature (169)..(331): Homolog of NCBI NO: 38344181 NR Description: OSJNBa0053K19.20 [Oryza sativa (japonica
  misc_feature (87)..(336): Homolog of NCBI NO: 18414951 NR Description: RNA recognition motif (RRM)-containing protein
  misc_feature (61)..(346): Homolog of NCBI NO: 34897896 NR Description: ESTs D15336(C0474),C98053(C0474) correspond to a of the predicted gene.~Similar to Arabidopsis thaliana DNA
  misc_feature (87)..(336): Homolog of NCBI NO: 30695063 NR Description: RNA recognition motif (RRM)-containing protein
  misc_feature (87)..(336): Homolog of NCBI NO: 8809670 NR Description: gene_id:MSD23.5~pir||C71447~similar to unknown
  misc_feature (85)..(343): Homolog of NCBI NO: 18421342 NR Description: RNA recognition motif (RRM)-containing protein
  misc_feature (78)..(349): Homolog of NCBI NO: 18087665 NR Description: putative arginine-rich protein [Oryza sativa]
AEAAARARASTAAETDRRTHARTPRHYKSPPASQAPNPTQPGNHRPPALPRTDPPARPHLSPSSRLVCLFFLSRRRAMEEGRRGTRTVRVRNISDLAGEREVREFFSFSGEIDHVDITPDGAAAGRTAYVTFKDAKALEIALLLSGATIVDRVVNITSAEDYIYIPVNEQQLMVNEVTSTAPTADLEQPTEANASPTSVYASKAHDVMTTVIARGSAIRQDAVNKAKSFDERHQLRANASARISSFDRRVGLSEKLNTGISAVNEKVKTVDQRLHVSDKTMAALLVAERKLNNTGSAVKTNRYVSAGTSWLNGAFSKVAKAGHVAGSRTREKFQIAVSNISAKGPAVVA

SEQ ID NO: 62304 - protein, 272 aa, Triticum aestivum
  peptide (1)..(272): Ceres Seq. ID no. 13654730
  misc_feature (11)..(79): Pfam Name: RNA recognition motif. (a.k.a. RRM, RBD, or RNP domain) Pfam Description: RNA recognition motif. (a.k.a. RRM, RBD, or RNP
  misc_feature (90)..(257): Homolog of NCBI NO: 15237419 NR Description: RNA recognition motif (RRM)-containing protein
  misc_feature (10)..(259): Homolog of NCBI NO: 7485085 NR Description: hypothetical protein - Arabidopsis thaliana
  misc_feature (10)..(85): Homolog of NCBI NO: 38344181 NR Description: OSJNBa0053K19.20 [Oryza sativa (japonica
  misc_feature (92)..(254): Homolog of NCBI NO: 38344181 NR Description: OSJNBa0053K19.20 [Oryza sativa (japonica
  misc_feature (10)..(259): Homolog of NCBI NO: 18414951 NR Description: RNA recognition motif (RRM)-containing protein
  misc_feature (1)..(269): Homolog of NCBI NO: 34897896 NR Description: ESTs D15336(C0474),C98053(C0474) correspond to a of the predicted gene.~Similar to Arabidopsis thaliana DNA
  misc_feature (10)..(259): Homolog of NCBI NO: 30695063 NR Description: RNA recognition motif (RRM)-containing protein
  misc_feature (10)..(259): Homolog of NCBI NO: 8809670 NR Description: gene_id:MSD23.5~pir||C71447~similar to unknown
  misc_feature (8)..(266): Homolog of NCBI NO: 18421342 NR Description: RNA recognition motif (RRM)-containing protein
  misc_feature (1)..(272): Homolog of NCBI NO: 18087665 NR Description: putative arginine-rich protein [Oryza sativa]
MEEGRRGTRTVRVRNISDLAGEREVREFFSFSGEIDHVDITPDGAAAGRTAYVTFKDAKALEIALLLSGATIVDRVVNITSAEDYIYIPVNEQQLMVNEVTSTAPTADLEQPTEANASPTSVYASKAHDVMTTVIARGSAIRQDAVNKAKSFDERHQLRANASARISSFDRRVGLSEKLNTGISAVNEKVKTVDQRLHVSDKTMAALLVAERKLNNTGSAVKTNRYVSAGTSWLNGAFSKVAKAGHVAGSRTREKFQIAVSNISAKGPAVVA

SEQ ID NO: 62305 - protein, 177 aa, Triticum aestivum
  peptide (1)..(177): Ceres Seq. ID no. 13654731
  misc_feature (1)..(162): Homolog of NCBI NO: 21592997 NR Description: unknown [Arabidopsis thaliana]
  misc_feature (1)..(162): Homolog of NCBI NO: 15237419 NR Description: RNA recognition motif (RRM)-containing protein
  misc_feature (1)..(164): Homolog of NCBI NO: 7485085 NR Description: hypothetical protein - Arabidopsis thaliana
  misc_feature (1)..(159): Homolog of NCBI NO: 38344181 NR Description: OSJNBa0053K19.20 [Oryza sativa (japonica
  misc_feature (1)..(164): Homolog of NCBI NO: 18414951 NR Description: RNA recognition motif (RRM)-containing protein
  misc_feature (1)..(174): Homolog of NCBI NO: 34897896 NR Description: ESTs D15336(C0474),C98053(C0474) correspond to a of the predicted gene.~Similar to Arabidopsis thaliana DNA
  misc_feature (1)..(164): Homolog of NCBI NO: 30695063 NR Description: RNA recognition motif (RRM)-containing protein
  misc_feature (1)..(164): Homolog of NCBI NO: 8809670 NR Description: gene_id:MSD23.5~pir||C71447~similar to unknown
  misc_feature (1)..(171): Homolog of NCBI NO: 18421342 NR Description: RNA recognition motif (RRM)-containing protein
  misc_feature (1)..(177): Homolog of NCBI NO: 18087665 NR Description: putative arginine-rich protein [Oryza sativa]
MVNEVTSTAPTADLEQPTEANASPTSVYASKAHDVMTTVIARGSAIRQDAVNKAKSFDERHQLRANASARISSFDRRVGLSEKLNTGISAVNEKVKTVDQRLHVSDKTMAALLVAERKLNNTGSAVKTNRYVSAGTSWLNGAFSKVAKAGHVAGSRTREKFQIAVSNISAKGPAVVA

SEQ ID NO: 62306 - DNA, 1039 bp, Triticum aestivum
  misc_feature (1)..(1039): Ceres Seq. ID no. 13596515
ccaccgattccgccggcgggactcctgtccgggaaacgccgatctagaatggcggccaacttctggacgtcgtcgcacagcaagcagctgctggacccggaggaggtggacgtggtgccggcgcaagaccgggagcggggcgtcacgcccgtggagttccgcctcgtcaagatccacatgtccttccatatatggcggttggcccagcaggtcaaagttagacaaagagtcatagctactgcaatcacgtacttcaggtgtgtgtacacaagaaagagcatgacagagtatgatcctcgtttggtagcaccagcttgtttgtatttggcatcaaaggtagaggaaagcacagtgcaagcaaggcttcttgtattttacataaagaagatgtgtggttcggatgacaagtaccgatttgaaatcaaagatatccttgaaatggaaatgaagctcctggaagcacttgactattatttggttgtttaccatccataccgtcctcttctacagttattgcaggatgctggcataacagatctgacacaatttgcctggggcctcgtcaatgatacttacaagatggatctcattctcatatatcctccttatatgattgcattggcctgcatatacattgcaagcgttcttaaagataaggacacaacctcatggtttgaagaactccgtgttgacatgaacattgttaagaatatctcaatggaaatcttggacttctacgacacctacaagattgatcctcaaaggggcctccaggaggataagatcatccctgtgatgaacaagttgccatcaaaggcctgaaggccgatttgacacctgaccatttaaccaccttacaccgcctcatctggattgtgtaaccccgtagccctgaacatcttcggaggcgagagatccagggaatggcatcaaattgttaggcgccgcgatggcaatcccaatgttagggggttatctgtaatacttaagcatctgatttctgtatcatacaaaacccaagtggaattgtttcaacttg

SEQ ID NO: 62307 - protein, 273 aa, Triticum aestivum
  peptide (1)..(273): Ceres Seq. ID no. 13596516
  misc_feature (20)..(160): Pfam Name: Cyclin, N-terminal domain Pfam Description: Cyclin, N-terminal domain
  misc_feature (17)..(270): Homolog of NCBI NO: 1705767 NR Description: Cyclin C
  misc_feature (8)..(270): Homolog of NCBI NO: 21264408 NR Description: Cyclin C
  misc_feature (11)..(270): Homolog of NCBI NO: 34783612 NR Description: Unknown (protein for IMAGE:6165083) [Homo sapiens]
  misc_feature (11)..(270): Homolog of NCBI NO: 4885119 NR Description: cyclin C [Homo sapiens]
  misc_feature (8)..(270): Homolog of NCBI NO: 729105 NR Description: Cyclin C
  misc_feature (8)..(270): Homolog of NCBI NO: 38382739 NR Description: Unknown (protein for IMAGE:6391891) [Mus musculus]
  misc_feature (17)..(270): Homolog of NCBI NO: 28828497 NR Description: similar to Mus musculus (Mouse). 16 days neonate cDNA, RIKEN full-length enriched library, clone:A130067E11
  misc_feature (17)..(272): Homolog of NCBI NO: 15239665 NR Description: cyclin family [Arabidopsis thaliana]
  misc_feature (17)..(269): Homolog of NCBI NO: 15239664 NR Description: cyclin family [Arabidopsis thaliana]
  misc_feature (17)..(273): Homolog of NCBI NO: 3334144 NR Description: G1/S-SPECIFIC CYCLIN C-TYPE
PPIPPAGLLSGKRRSRMAANFWTSSHSKQLLDPEEVDVVPAQDRERGVTPVEFRLVKIHMSFHIWRLAQQVKVRQRVIATAITYFRCVYTRKSMTEYDPRLVAPACLYLASKVEESTVQARLLVFYIKKMCGSDDKYRFEIKDILEMEMKLLEALDYYLVVYHPYRPLLQLLQDAGITDLTQFAWGLVNDTYKMDLILIYPPYMIALACIYIASVLKDKDTTSWFEELRVDMNIVKNISMEILDFYDTYKIDPQRGLQEDKIIPVMNKLPSKA

SEQ ID NO: 62308 - protein, 257 aa, Triticum aestivum
  peptide (1)..(257): Ceres Seq. ID no. 13596517
  misc_feature (4)..(144): Pfam Name: Cyclin, N-terminal domain Pfam Description: Cyclin, N-terminal domain
  misc_feature (1)..(254): Homolog of NCBI NO: 1705767 NR Description: Cyclin C
  misc_feature (1)..(254): Homolog of NCBI NO: 21264408 NR Description: Cyclin C
  misc_feature (1)..(254): Homolog of NCBI NO: 34783612 NR Description: Unknown (protein for IMAGE:6165083) [Homo sapiens]
  misc_feature (1)..(254): Homolog of NCBI NO: 4885119 NR Description: cyclin C [Homo sapiens]
  misc_feature (1)..(254): Homolog of NCBI NO: 729105 NR Description: Cyclin C
  misc_feature (1)..(254): Homolog of NCBI NO: 38382739 NR Description: Unknown (protein for IMAGE:6391891) [Mus musculus]
  misc_feature (1)..(254): Homolog of NCBI NO: 28828497 NR Description: similar to Mus musculus (Mouse). 16 days neonate cDNA, RIKEN full-length enriched library, clone:A130067E11
  misc_feature (1)..(256): Homolog of NCBI NO: 15239665 NR Description: cyclin family [Arabidopsis thaliana]
  misc_feature (1)..(253): Homolog of NCBI NO: 15239664 NR Description: cyclin family [Arabidopsis thaliana]
  misc_feature (1)..(257): Homolog of NCBI NO: 3334144 NR Description: G1/S-SPECIFIC CYCLIN C-TYPE
MAANFWTSSHSKQLLDPEEVDVVPAQDRERGVTPVEFRLVKIHMSFHIWRLAQQVKVRQRVIATAITYFRCVYTRKSMTEYDPRLVAPACLYLASKVEESTVQARLLVFYIKKMCGSDDKYRFEIKDILEMEMKLLEALDYYLVVYHPYRPLLQLLQDAGITDLTQFAWGLVNDTYKMDLILIYPPYMIALACIYIASVLKDKDTTSWFEELRVDMNIVKNISMEILDFYDTYKIDPQRGLQEDKIIPVMNKLPSKA

SEQ ID NO: 62309 - protein, 214 aa, Triticum aestivum
  peptide (1)..(214): Ceres Seq. ID no. 13596518
  misc_feature (1)..(101): Pfam Name: Cyclin, N-terminal domain Pfam Description: Cyclin, N-terminal domain
  misc_feature (1)..(211): Homolog of NCBI NO: 1705767 NR Description: Cyclin C
  misc_feature (1)..(211): Homolog of NCBI NO: 21264408 NR Description: Cyclin C
  misc_feature (1)..(211): Homolog of NCBI NO: 34783612 NR Description: Unknown (protein for IMAGE:6165083) [Homo sapiens]
  misc_feature (1)..(211): Homolog of NCBI NO: 4885119 NR Description: cyclin C [Homo sapiens]
  misc_feature (1)..(211): Homolog of NCBI NO: 729105 NR Description: Cyclin C
  misc_feature (1)..(211): Homolog of NCBI NO: 38382739 NR Description: Unknown (protein for IMAGE:6391891) [Mus musculus]
  misc_feature (1)..(211): Homolog of NCBI NO: 28828497 NR Description: similar to Mus musculus (Mouse). 16 days neonate cDNA, RIKEN full-length enriched library, clone:A130067E11
  misc_feature (1)..(213): Homolog of NCBI NO: 15239665 NR Description: cyclin family [Arabidopsis thaliana]
  misc_feature (1)..(210): Homolog of NCBI NO: 15239664 NR Description: cyclin family [Arabidopsis thaliana]
  misc_feature (1)..(214): Homolog of NCBI NO: 3334144 NR Description: G1/S-SPECIFIC CYCLIN C-TYPE
MSFHIWRLAQQVKVRQRVIATAITYFRCVYTRKSMTEYDPRLVAPACLYLASKVEESTVQARLLVFYIKKMCGSDDKYRFEIKDILEMEMKLLEALDYYLVVYHPYRPLLQLLQDAGITDLTQFAWGLVNDTYKMDLILIYPPYMIALACIYIASVLKDKDTTSWFEELRVDMNIVKNISMEILDFYDTYKIDPQRGLQEDKIIPVMNKLPSKA

SEQ ID NO: 62310 - DNA, 1638 bp, Triticum aestivum
  misc_feature (1)..(1638): Ceres Seq. ID no. 14301830
cccgatccgcctttcacggcgcgccaccctcgtcggttcactggagcacttcccactgccgcccggccgcgtggagatctgagcaggaagcccgcgccgcagcttatataacggcgcctcctcctccacattctcagcgcccatcacacccccgcagagccggaagccacacacacacgccttcctccttcctctgctcgcatctcggatcggggagaaggaggatctgaggctttcggcagggccggggacgatggcgccgctgctcaaggacgagctggacatcgtcatcccgacgatccggaacctggacttcctcgagatgtggaggcccttcttccagccgtaccacctcatcatcgtgcaggacggcgaccccacgaggaccgtcatggtgcccgagggcttcgactacgagctctacaaccgcaacgacatcaaccgcatcctcggccccaaggcctcctgcatctccttcaaggactccgcctgccgctgcttcggctacatggtctccaagaagaagtacgtctacaccatcgacgacgactgcttcgtggccaaggacccgacggggaaggacattgacgcgctggccaagcacatccagaacctgctctgcccctccacgccgctcttcttcaacaccctgtacgacccctaccaggagggcgccgacttcgtgcgcggctacccgttcagcctccgggagggcgtgcccaccgccgtgtcgcacggcctctggctcaacatccccgactacgacgcccccacgcagctggtcaagccgcgggagcgcaacggcaggtacgtcgacgccgtcatgaccatccccaagggctccctcttccccatgtgcggcatgaacctcgccttcgaccgcgagctcatcggcccggccatgtacttcggcctcatgggcgacggccagcccatcggacgctacgacgacatgtgggccggctggtgcgtcaaggtgatctgcgaccaccttgggctgggcgtcaagacggggctgccctacatctggcacagcaaggccagcaacccgttcgtgaacctgaagaaggagtacaagggcatcttctggcaggaggacatcatccccttcttccaggccgcgaagctgaccaaggaatgcgacaccgtgcagaagtgctacatctcgctctcgcagcaggtcaaggagaagctcggcaagatcgacccctacttcgtcaagctcgccgatgccatggtcacctggatcgaggcctgggacatgctcaactccaaggactccaaggaggccgatgccaacggcaagctcaaggggaggtagatcgagatcgagggagagaaccttttttgcactagcatactgagcaggcggtgaggcggcatataccggtttcttcagttcgtaggttcagtgcgtgcatcaggtattcaggttcaggctgttgtgtactacaaaacattagctgccgttctatcttacgtttacgttgagggtcgcgttaatttcccccttctttaatttcattattaagagatgatgtcgttttctcaagggtttagtactacggttatacttgtggctgctaatgtttccgtgtaatcttgtgtacactgaaatgtgagaataaaaagttgttc

SEQ ID NO: 62311 - protein, 355 aa, Triticum aestivum
  peptide (1)..(355): Ceres Seq. ID no. 14301831
  misc_feature (1)..(343): Pfam Name: Reversibly glycosylated polypeptide Pfam Description: Reversibly glycosylated polypeptide
  misc_feature (1)..(335): Homolog of NCBI NO: 19387283 NR Description: putative amylogenin [Oryza sativa (japonica
  misc_feature (86)..(321): Homolog of NCBI NO: 7488888 NR Description: type IIIa membrane protein cp-wap11 - cowpea
  misc_feature (1)..(339): Homolog of NCBI NO: 21593071 NR Description: reversibly glycosylated polypeptide-3
  misc_feature (1)..(355): Homolog of NCBI NO: 34394574 NR Description: putative reversibly glycosylated polypeptide
  misc_feature (1)..(339): Homolog of NCBI NO: 34582499 NR Description: Alpha-1,4-glucan-protein synthase
  misc_feature (3)..(345): Homolog of NCBI NO: 34582497 NR Description: Alpha-1,4-glucan-protein synthase
  misc_feature (1)..(353): Homolog of NCBI NO: 34588146 NR Description: Alpha-1,4-glucan-protein synthase
  misc_feature (1)..(353): Homolog of NCBI NO: 34915190 NR Description: reversibly glycosylated polypeptide
  misc_feature (1)..(353): Homolog of NCBI NO: 4158221 NR Description: reversibly glycosylated polypeptide
  misc_feature (1)..(351): Homolog of NCBI NO: 4158232 NR Description: reversibly glycosylated polypeptide [Triticum
MAPLLKDELDIVIPTIRNLDFLEMWRPFFQPYHLIIVQDGDPTRTVMVPEGFDYELYNRNDINRILGPKASCISFKDSACRCFGYMVSKKKYVYTIDDDCFVAKDPTGKDIDALAKHIQNLLCPSTPLFFNTLYDPYQEGADFVRGYPFSLREGVPTAVSHGLWLNIPDYDAPTQLVKPRERNGRYVDAVMTIPKGSLFPMCGMNLAFDRELIGPAMYFGLMGDGQPIGRYDDMWAGWCVKVICDHLGLGVKTGLPYIWHSKASNPFVNLKKEYKGIFWQEDIIPFFQAAKLTKECDTVQKCYISLSQQVKEKLGKIDPYFVKLADAMVTWIEAWDMLNSKDSKEADANGKLKGR

SEQ ID NO: 62312 - protein, 332 aa, Triticum aestivum
  peptide (1)..(332): Ceres Seq. ID no. 14301832
  misc_feature (1)..(320): Pfam Name: Reversibly glycosylated polypeptide Pfam Description: Reversibly glycosylated polypeptide
  misc_feature (1)..(312): Homolog of NCBI NO: 19387283 NR Description: putative amylogenin [Oryza sativa (japonica
  misc_feature (63)..(298): Homolog of NCBI NO: 7488888 NR Description: type IIIa membrane protein cp-wap11 - cowpea
  misc_feature (1)..(316): Homolog of NCBI NO: 21593071 NR Description: reversibly glycosylated polypeptide-3
  misc_feature (1)..(332): Homolog of NCBI NO: 34394574 NR Description: putative reversibly glycosylated polypeptide
  misc_feature (1)..(316): Homolog of NCBI NO: 34582499 NR Description: Alpha-1,4-glucan-protein synthase
  misc_feature (1)..(322): Homolog of NCBI NO: 34582497 NR Description: Alpha-1,4-glucan-protein synthase
  misc_feature (1)..(330): Homolog of NCBI NO: 34588146 NR Description: Alpha-1,4-glucan-protein synthase
  misc_feature (1)..(330): Homolog of NCBI NO: 34915190 NR Description: reversibly glycosylated polypeptide
  misc_feature (1)..(330): Homolog of NCBI NO: 4158221 NR Description: reversibly glycosylated polypeptide
  misc_feature (1)..(328): Homolog of NCBI NO: 4158232 NR Description: reversibly glycosylated polypeptide [Triticum
MWRPFFQPYHLIIVQDGDPTRTVMVPEGFDYELYNRNDINRILGPKASCISFKDSACRCFGYMVSKKKYVYTIDDDCFVAKDPTGKDIDALAKHIQNLLCPSTPLFFNTLYDPYQEGADFVRGYPFSLREGVPTAVSHGLWLNIPDYDAPTQLVKPRERNGRYVDAVMTIPKGSLFPMCGMNLAFDRELIGPAMYFGLMGDGQPIGRYDDMWAGWCVKVICDHLGLGVKTGLPYIWHSKASNPFVNLKKEYKGIFWQEDIIPFFQAAKLTKECDTVQKCYISLSQQVKEKLGKIDPYFVKLADAMVTWIEAWDMLNSKDSKEADANGKLKGR

SEQ ID NO: 62313 - protein, 309 aa, Triticum aestivum
  peptide (1)..(309): Ceres Seq. ID no. 14301833
  misc_feature (1)..(297): Pfam Name: Reversibly glycosylated polypeptide Pfam Description: Reversibly glycosylated polypeptide
  misc_feature (1)..(289): Homolog of NCBI NO: 19387283 NR Description: putative amylogenin [Oryza sativa (japonica
  misc_feature (40)..(275): Homolog of NCBI NO: 7488888 NR Description: type IIIa membrane protein cp-wap11 - cowpea
  misc_feature (1)..(293): Homolog of NCBI NO: 21593071 NR Description: reversibly glycosylated polypeptide-3
  misc_feature (1)..(309): Homolog of NCBI NO: 34394574 NR Description: putative reversibly glycosylated polypeptide
  misc_feature (1)..(293): Homolog of NCBI NO: 34582499 NR Description: Alpha-1,4-glucan-protein synthase
  misc_feature (1)..(299): Homolog of NCBI NO: 34582497 NR Description: Alpha-1,4-glucan-protein synthase
  misc_feature (1)..(307): Homolog of NCBI NO: 34588146 NR Description: Alpha-1,4-glucan-protein synthase
  misc_feature (1)..(307): Homolog of NCBI NO: 34915190 NR Description: reversibly glycosylated polypeptide
  misc_feature (1)..(307): Homolog of NCBI NO: 4158221 NR Description: reversibly glycosylated polypeptide
  misc_feature (1)..(305): Homolog of NCBI NO: 4158232 NR Description: reversibly glycosylated polypeptide [Triticum
MVPEGFDYELYNRNDINRILGPKASCISFKDSACRCFGYMVSKKKYVYTIDDDCFVAKDPTGKDIDALAKHIQNLLCPSTPLFFNTLYDPYQEGADFVRGYPFSLREGVPTAVSHGLWLNIPDYDAPTQLVKPRERNGRYVDAVMTIPKGSLFPMCGMNLAFDRELIGPAMYFGLMGDGQPIGRYDDMWAGWCVKVICDHLGLGVKTGLPYIWHSKASNPFVNLKKEYKGIFWQEDIIPFFQAAKLTKECDTVQKCYISLSQQVKEKLGKIDPYFVKLADAMVTWIEAWDMLNSKDSKEADANGKLKGR

SEQ ID NO: 62314 - DNA, 692 bp, Triticum aestivum
  misc_feature (1)..(692): Ceres Seq. ID no. 12584771
gcactcacactagttcactctcgcatcaactaacctcgctctcgtgcgcaggatgcggagcggtgtcagcgcgcgccttctgccgcaggcggtggccatcgccatcgccgtggccgtcgcctgctgcatggccgccgcaccgtcgtcggcgcaggggacgacgacgcccgcggacgccagcggcgcggtgccgtcgtgcgcgtcgaagctcgtgacgtgcgcgggctacctgaacaccaccgacacgccgccggagtcgtgctgcgacccgctcaaggaggcggcgaccacgcaggcggcgtgcatgtgcgccatcctcatgaacaaggccgcgctgcaggcgttcggcgtggcgccggagcagggggtgctcctcgccaagcgctgcggcgtcaccaccgacgcgtccacctgcgccaagtacaccgccggcgccggttccgatgctgcaactgcaggtagcacagccgcttcttcagcatccacgggaactgctgcttctacagttgccaagccaacggcaagcggaggaaccacgcatcccctgagcttgatcgccgcatcttcatttgtaggcttcagtttcatctggtggacgatcatggcgtagtaagagatgccaatgagtatgaactgttatgtaaaaaaaaactgtatcgtctcaataaacataactatctggttgtcacttc

SEQ ID NO: 62315 - protein, 185 aa, Triticum aestivum
  peptide (1)..(185): Ceres Seq. ID no. 12584772
  misc_feature (49)..(121): Pfam Name: Protease inhibitor/seed storage/LTP family Pfam Description: Protease inhibitor/seed storage/LTP family
  misc_feature (45)..(122): Homolog of NCBI NO: 15223104 NR Description: lipid transfer protein, putative; protein id:
  misc_feature (48)..(179): Homolog of NCBI NO: 7484433 NR Description: lipid transfer protein - Norway spruce
  misc_feature (12)..(162): Homolog of NCBI NO: 25553588 NR Description: OJ1656_E11.14 [Oryza sativa (japonica
  misc_feature (16)..(123): Homolog of NCBI NO: 25406276 NR Description: probable lipid transfer protein F6D5.5
  misc_feature (45)..(121): Homolog of NCBI NO: 6630451 NR Description: F23N19.16 [Arabidopsis thaliana]
  misc_feature (16)..(145): Homolog of NCBI NO: 21593596 NR Description: lipid transfer protein, putative [Arabidopsis
  misc_feature (16)..(145): Homolog of NCBI NO: 18410388 NR Description: lipid transfer protein, putative
  misc_feature (45)..(173): Homolog of NCBI NO: 30696757 NR Description: protease inhibitor/seed storage/lipid transfer
  misc_feature (45)..(173): Homolog of NCBI NO: 15221585 NR Description: unknown protein; protein id: At1g62790.1
  misc_feature (12)..(178): Homolog of NCBI NO: 15221052 NR Description: lipid transfer protein, putative
MRSGVSARLLPQAVAIAIAVAVACCMAAAPSSAQGTTTPADASGAVPSCASKLVTCAGYLNTTDTPPESCCDPLKEAATTQAACMCAILMNKAALQAFGVAPEQGVLLAKRCGVTTDASTCAKYTAGAGSDAATAGSTAASSASTGTAASTVAKPTASGGTTHPLSLIAASSFVGFSFIWWTIMA

SEQ ID NO: 62316 - protein, 160 aa, Triticum aestivum
  peptide (1)..(160): Ceres Seq. ID no. 12584773
  misc_feature (24)..(96): Pfam Name: Protease inhibitor/seed storage/LTP family Pfam Description: Protease inhibitor/seed storage/LTP family
  misc_feature (20)..(97): Homolog of NCBI NO: 15223104 NR Description: lipid transfer protein, putative; protein id:
  misc_feature (23)..(154): Homolog of NCBI NO: 7484433 NR Description: lipid transfer protein - Norway spruce
  misc_feature (1)..(137): Homolog of NCBI NO: 25553588 NR Description: OJ1656_E11.14 [Oryza sativa (japonica
  misc_feature (1)..(98): Homolog of NCBI NO: 25406276 NR Description: probable lipid transfer protein F6D5.5
  misc_feature (20)..(96): Homolog of NCBI NO: 6630451 NR Description: F23N19.16 [Arabidopsis thaliana]
  misc_feature (1)..(120): Homolog of NCBI NO: 21593596 NR Description: lipid transfer protein, putative [Arabidopsis
  misc_feature (1)..(120): Homolog of NCBI NO: 18410388 NR Description: lipid transfer protein, putative
  misc_feature (20)..(148): Homolog of NCBI NO: 30696757 NR Description: protease inhibitor/seed storage/lipid transfer
  misc_feature (20)..(148): Homolog of NCBI NO: 15221585 NR Description: unknown protein; protein id: At1g62790.1
  misc_feature (1)..(153): Homolog of NCBI NO: 15221052 NR Description: lipid transfer protein, putative
MAAAPSSAQGTTTPADASGAVPSCASKLVTCAGYLNTTDTPPESCCDPLKEAATTQAACMCAILMNKAALQAFGVAPEQGVLLAKRCGVTTDASTCAKYTAGAGSDAATAGSTAASSASTGTAASTVAKPTASGGTTHPLSLIAASSFVGFSFIWWTIMA

SEQ ID NO: 62317 - protein, 101 aa, Triticum aestivum
  peptide (1)..(101): Ceres Seq. ID no. 12584774
  misc_feature (1)..(38): Homolog of NCBI NO: 15223104 NR Description: lipid transfer protein, putative; protein id:
  misc_feature (1)..(95): Homolog of NCBI NO: 7484433 NR Description: lipid transfer protein - Norway spruce
  misc_feature (1)..(78): Homolog of NCBI NO: 25553588 NR Description: OJ1656_E11.14 [Oryza sativa (japonica
  misc_feature (1)..(39): Homolog of NCBI NO: 25406276 NR Description: probable lipid transfer protein F6D5.5
  misc_feature (1)..(37): Homolog of NCBI NO: 6630451 NR Description: F23N19.16 [Arabidopsis thaliana]
  misc_feature (1)..(61): Homolog of NCBI NO: 21593596 NR Description: lipid transfer protein, putative [Arabidopsis
  misc_feature (1)..(61): Homolog of NCBI NO: 18410388 NR Description: lipid transfer protein, putative
  misc_feature (1)..(89): Homolog of NCBI NO: 30696757 NR Description: protease inhibitor/seed storage/lipid transfer
  misc_feature (1)..(89): Homolog of NCBI NO: 15221585 NR Description: unknown protein; protein id: At1g62790.1
  misc_feature (1)..(94): Homolog of NCBI NO: 15221052 NR Description: lipid transfer protein, putative
MCAILMNKAALQAFGVAPEQGVLLAKRCGVTTDASTCAKYTAGAGSDAATAGSTAASSASTGTAASTVAKPTASGGTTHPLSLIAASSFVGFSFIWWTIMA

SEQ ID NO: 62318 - DNA, 722 bp, Triticum aestivum
  misc_feature (1)..(722): Ceres Seq. ID no. 13583431
cggcctacccaccccctgccgctccctgcctagggttttgagtcccgcccccctccgccgcgcaccatgggccccgacgagctccccaaggccgccgccgccggtgccgaggaggccgccccgttctccttcagcatctggccgccgacgcagcggacgcgggacgccgtggtgcggcgcctggtggacacgctggccggcgacaccctcctctgcaagcgctacggcgccgtgccggccgccgacgccgagcccgccgcgcgggccatcgaggccgaggccttcgacgccgccgccgtcaccggcggggccgccgcctccgtcgaggagggcatcgaggcgctgcagctctactccaaggaggtcagccgccgccctcctcgacttcgtcaagtcccgctccgccgccgccaaggccgagccgccggccgaggaggcgctcgccgtcaaggaggagacctcccaggcctgagccccggacgagaaccgttcgtttcgattatgcttcgagataaaattcatttgcatctagagttcgtgtgcggcgttggcctctgcttgggatgagttgcctgtaggttgttcgcgtgcctgtgctgttattgttctttcagtagctgctggttacctttttttttagtgtgttcgtttattacttccgtttgtatctgtgaacaagaattatcttcaccttgtcgtggcaatgatccaagatttgaccg

SEQ ID NO: 62319 - protein, 166 aa, Triticum aestivum
  peptide (1)..(166): Ceres Seq. ID no. 13583432
  misc_feature (9)..(140): Homolog of NCBI NO: 33146512 NR Description: putative MFP1 attachment factor 1
  misc_feature (1)..(57): Homolog of NCBI NO: 7546735 NR Description: MFP1 attachment factor 1 [Triticum aestivum]
  misc_feature (1)..(132): Homolog of NCBI NO: 37533022 NR Description: hypothetical protein [Oryza sativa (japonica
  misc_feature (9)..(143): Homolog of NCBI NO: 26006500 NR Description: Unknown protein [Oryza sativa (japonica
  misc_feature (3)..(103): Homolog of NCBI NO: 7546727 NR Description: MFP1 attachment factor 1 [Zea mays]
MGPDELPKAAAAGAEEAAPFSFSIWPPTQRTRDAVVRRLVDTLAGDTLLCKRYGAVPAADAEPAARAIEAEAFDAAAVTGGAAASVEEGIEALQLYSKEVSRRPPRLRQVPLRRRQGRAAGRGGARRQGGDLPGLSPGREPFVSIMLRDKIHLHLEFVCGVGLCLG

SEQ ID NO: 62320 - protein, 156 aa, Triticum aestivum
  peptide (1)..(156): Ceres Seq. ID no. 13583433
  misc_feature (3)..(106): Pfam Name: Extensin-like region Pfam Description: Extensin-like region
  misc_feature (8)..(120): Homolog of NCBI NO: 2129478 NR Description: chitinase (EC 3.2.1.14) precursor - beet
  misc_feature (3)..(123): Homolog of NCBI NO: 20138131 NR Description: Vegetative cell wall protein gp1 precursor
  misc_feature (3)..(150): Homolog of NCBI NO: 20138131 NR Description: Vegetative cell wall protein gp1 precursor
  misc_feature (3)..(108): Homolog of NCBI NO: 20138131 NR Description: Vegetative cell wall protein gp1 precursor
  misc_feature (18)..(108): Homolog of NCBI NO: 14253159 NR Description: VMP3 protein [Volvox carteri f. nagariensis]
  misc_feature (3)..(108): Homolog of NCBI NO: 20138131 NR Description: Vegetative cell wall protein gp1 precursor
  misc_feature (3)..(110): Homolog of NCBI NO: 20138131 NR Description: Vegetative cell wall protein gp1 precursor
  misc_feature (3)..(108): Homolog of NCBI NO: 20138131 NR Description: Vegetative cell wall protein gp1 precursor
  misc_feature (3)..(107): Homolog of NCBI NO: 14253159 NR Description: VMP3 protein [Volvox carteri f. nagariensis]
  misc_feature (126)..(148): Homolog of NCBI NO: 7546727 NR Description: MFP1 attachment factor 1 [Zea mays]
GLPTPCRSLPRVLSPAPLRRAPWAPTSSPRPPPPVPRRPPRSPSASGRRRSGRGTPWCGAWWTRWPATPSSASATAPCRPPTPSPPRGPSRPRPSTPPPSPAGPPPPSRRASRRCSSTPRRSAAALLDFVKSRSAAAKAEPPAEEALAVKEETSQA

SEQ ID NO: 62321 - DNA, 1037 bp, Triticum aestivum
  misc_feature (1)..(1037): Ceres Seq. ID no. 13596535
aacacaacaccaccgcaatctttactcgagaaaagaaaaacacaacaccgcaatcgccacctgcaccgaaccggagcaaatctccggcgagctcgagccgaagcggcgaacccgcgcgagcaggagagatggatccggacgaggtgaagtcgaagctccaaggcctggccttcggcaacgtcctggccgccgccgcccgcgactacaagaaggaagttatagctaaagagaaggctcaagcagcacctgcgatcccatgatgaagtcgatcttgatgagttactggatgacccagagcttgagaaattgcatgctgaacggcttgctgctcttaagagagaggtcgagaagcgtgaggtgctaaagaggcaaggtcatggtgaatacagggaaataaccgaaggggacttcttaggagaggtcactcgtggtgacaaggtcatctgtcatttctaccatcgtgaattttaccgctgcaagatcatggataagcatttgaaggcacttgcaccggtctatttgggaactaaattcgtcaagcttgatgccgaaaatgctcccttctttgtggcaaaactagcaatcaaaacgttgccatgtgttatattgttcaagaagggtattgctcttgatcggttggttggtttcgatgaccttggaagtaaagatgatttttctaccagggctttggaaaatgtactgaagaggaaaggtataattgaggaaaagaagaaagacgatgatgacgaagatgatgagactgacatgtcaaaggataggagggttagatcttccactgcttacgattcggattcagattgaaaagatgaagtgatatgatcctgtcttttgtaacattataattttgtctcttttgtactctagctctcggaagttccttatgatttatgtgtgccgtattgtatcgaacaagagaactggaagccggatgtattagtgatctgtcagtaactccagttttacaccagttatcggagtacaatacatatgtatgactaagtattagtgctgcaatt

SEQ ID NO: 62322 - protein, 112 aa, Triticum aestivum
  peptide (1)..(112): Ceres Seq. ID no. 15221914
  misc_feature (1)..(112): Homolog of NCBI NO: 21594045 NR Description: putative ATP binding protein [Arabidopsis
  misc_feature (1)..(112): Homolog of NCBI NO: 28277604 NR Description: Similar to ATP binding protein associated with
  misc_feature (1)..(112): Homolog of NCBI NO: 25282435 NR Description: ES cell-related protein; ATP binding protein
  misc_feature (1)..(112): Homolog of NCBI NO: 2342477 NR Description: ATP binding protein [Homo sapiens]
  misc_feature (1)..(112): Homolog of NCBI NO: 25286717 NR Description: ATP binding protein associated with cell
  misc_feature (1)..(112): Homolog of NCBI NO: 18104959 NR Description: ATP binding protein associated with cell
  misc_feature (1)..(112): Homolog of NCBI NO: 7485705 NR Description: hypothetical protein F18B3.240 - Arabidopsis
  misc_feature (1)..(112): Homolog of NCBI NO: 10177522 NR Description: contains similarity to ATP binding protein
  misc_feature (1)..(112): Homolog of NCBI NO: 30693386 NR Description: expressed protein [Arabidopsis thaliana]
  misc_feature (1)..(112): Homolog of NCBI NO: 18425069 NR Description: expressed protein [Arabidopsis thaliana]
MDKHLKALAPVYLGTKFVKLDAENAPFFVAKLAIKTLPCVILFKKGIALDRLVGFDDLGSKDDFSTRALENVLKRKGIIEEKKKDDDDEDDETDMSKDRRVRSSTAYDSDSD

SEQ ID NO: 62323 - protein, 85 aa, Triticum aestivum
  peptide (1)..(85): Ceres Seq. ID no. 15221915
  misc_feature (43)..(81): Homolog of NCBI NO: 10177522 NR Description: contains similarity to ATP binding protein
  misc_feature (43)..(81): Homolog of NCBI NO: 30693386 NR Description: expressed protein [Arabidopsis thaliana]
  misc_feature (43)..(81): Homolog of NCBI NO: 18425069 NR Description: expressed protein [Arabidopsis thaliana]
HNTTAIFTREKKNTTPQSPPAPNRSKSPASSSRSGEPARAGEMDPDEVKSKLQGLAFGNVLAAAARDYKKEVIAKEKAQAAPAIP

SEQ ID NO: 62324 - protein, 74 aa, Triticum aestivum
  peptide (1)..(74): Ceres Seq. ID no. 15221916
TQHHRNLYSRKEKHNTAIATCTEPEQISGELEPKRRTRASRRDGSGRGEVEAPRPGLRQRPGRRRPRLQEGSYS

SEQ ID NO: 62325 - DNA, 1045 bp, Triticum aestivum
  misc_feature (1)..(1045): Ceres Seq. ID no. 13598382
aggacatcaagcacctgagctccacatcgatcagtacccacggccactccactctcagctcagggactcggtgtcagggcgacccaagacagaagaatcggatccagaagaatcatggattccctgacggcgtcgacgacggcgaagcccaccctccgagtggccgcattctgcggctccctccgcaaggactcgtggcaccgcggcctcatccgcgccgcggaggagctttgcgaggagtccatcccggggctgcgcatcgaccacgtggacatctccggcctgcccatggtcaacccggacctggagaccgacggcggcaagggcttcccgccggccgtggaggcgctccgcgacagcgtccgcgccgcagactgcttcctcttcgcctcgcccgagtacaactactcggtcacagcgtccctgaagaacgcgctggactgggcgtcgaggggcaagcgcaactgctgggcggacagggcggcggcgatcgtgtgcgcggggggcgacttcggcggggccagggcgtcgctccacctccgccagatcggggtgttcctcgacctccacttcatcaacaagccggagctccacgtgagggcgtttgcggagccgcccaagttcgacgaggaggggaacctcatcgacgccgagaccagggagcggctcaggaaggtgctcctctcgctccaggccttcgcgctcaggctccagcacaacatggacgactgactgactcaagatcgatcgatgatacctggctctgtgtaccgtgcgcgctggttaatttgcattgcccttcagtttgacgacgttgtgctctatgcactagtattcgtggttccgtgagaagtctgtgctacctttgtgtaataaagcgccgaagcgtgcaaaaaaaaaaagtaataaatcgccgaagaattgcactgtaaaaaaaagaacgtgtgcgtgcgtatgtgttttaccgatgctactagtagaacgcaagggcgcatcggctacgttgagaaaacaatagaactgttgaagaaattgatattgtcgt

SEQ ID NO: 62326 - protein, 268 aa, Triticum aestivum
  peptide (1)..(268): Ceres Seq. ID no. 13598383
DIKHLSSTSISTHGHSTLSSGTRCQGDPRQKNRIQKNHGFPDGVDDGEAHPPSGRILRLPPQGLVAPRPHPRRGGALRGVHPGAAHRPRGHLRPAHGQPGPGDRRRQGLPAGRGGAPRQRPRRRLLPLRLARVQLLGHSVPEERAGLGVEGQAQLLGGQGGGDRVRGGRLRRGQGVAPPPPDRGVPRPPLHQQAGAPREGVCGAAQVRRGGEPHRRRDQGAAQEGAPLAPGLRAQAPAQHGRLTDSRSIDDTWLCVPCALVNLHCPSV

SEQ ID NO: 62327 - protein, 205 aa, Triticum aestivum
  peptide (1)..(205): Ceres Seq. ID no. 13598384
  misc_feature (14)..(187): Pfam Name: NADPH-dependent FMN reductase Pfam Description: NADPH-dependent FMN reductase
  misc_feature (13)..(201): Homolog of NCBI NO: 40549313 NR Description: YieF [Salmonella enterica]
  misc_feature (13)..(200): Homolog of NCBI NO: 22406524 NR Description: hypothetical protein [Ferroplasma acidarmanus]
  misc_feature (12)..(195): Homolog of NCBI NO: 22964797 NR Description: hypothetical protein [Rhodopseudomonas palustris]
  misc_feature (13)..(185): Homolog of NCBI NO: 23135834 NR Description: hypothetical protein [Cytophaga hutchinsonii]
  misc_feature (14)..(200): Homolog of NCBI NO: 15596401 NR Description: conserved hypothetical protein [Pseudomonas
  misc_feature (4)..(200): Homolog of NCBI NO: 5002232 NR Description: NADPH:quinone oxidoreductase [Arabidopsis
  misc_feature (4)..(200): Homolog of NCBI NO: 15232856 NR Description: NADPH:quinone oxidoreductase (NQR) [Arabidopsis
  misc_feature (10)..(200): Homolog of NCBI NO: 24745889 NR Description: NAD(P)H:quinone oxidoreductase [Solanum tuberosum]
  misc_feature (4)..(200): Homolog of NCBI NO: 34906652 NR Description: putative NADPH:quinone oxidoreductase
  misc_feature (7)..(200): Homolog of NCBI NO: 34906648 NR Description: putative NADPH:quinone oxidoreductase
MDSLTASTTAKPTLRVAAFCGSLRKDSWHRGLIRAAEELCEESIPGLRIDHVDISGLPMVNPDLETDGGKGFPPAVEALRDSVRAADCFLFASPEYNYSVTASLKNALDWASRGKRNCWADRAAAIVCAGGDFGGARASLHLRQIGVFLDLHFINKPELHVRAFAEPPKFDEEGNLIDAETRERLRKVLLSLQAFALRLQHNMDD

SEQ ID NO: 62328 - protein, 147 aa, Triticum aestivum
  peptide (1)..(147): Ceres Seq. ID no. 13598385
  misc_feature (1)..(129): Pfam Name: NADPH-dependent FMN reductase Pfam Description: NADPH-dependent FMN reductase
  misc_feature (1)..(143): Homolog of NCBI NO: 40549313 NR Description: YieF [Salmonella enterica]
  misc_feature (1)..(142): Homolog of NCBI NO: 22406524 NR Description: hypothetical protein [Ferroplasma acidarmanus]
  misc_feature (1)..(137): Homolog of NCBI NO: 22964797 NR Description: hypothetical protein [Rhodopseudomonas palustris]
  misc_feature (1)..(127): Homolog of NCBI NO: 23135834 NR Description: hypothetical protein [Cytophaga hutchinsonii]
  misc_feature (1)..(142): Homolog of NCBI NO: 15596401 NR Description: conserved hypothetical protein [Pseudomonas
  misc_feature (1)..(142): Homolog of NCBI NO: 5002232 NR Description: NADPH:quinone oxidoreductase [Arabidopsis
  misc_feature (1)..(142): Homolog of NCBI NO: 15232856 NR Description: NADPH:quinone oxidoreductase (NQR) [Arabidopsis
  misc_feature (1)..(142): Homolog of NCBI NO: 24745889 NR Description: NAD(P)H:quinone oxidoreductase [Solanum tuberosum]
  misc_feature (1)..(142): Homolog of NCBI NO: 34906652 NR Description: putative NADPH:quinone oxidoreductase
  misc_feature (1)..(142): Homolog of NCBI NO: 34906648 NR Description: putative NADPH:quinone oxidoreductase
MVNPDLETDGGKGFPPAVEALRDSVRAADCFLFASPEYNYSVTASLKNALDWASRGKRNCWADRAAAIVCAGGDFGGARASLHLRQIGVFLDLHFINKPELHVRAFAEPPKFDEEGNLIDAETRERLRKVLLSLQAFALRLQHNMDD

SEQ ID NO: 62329 - DNA, 1156 bp, Triticum aestivum
  misc_feature (1)..(1156): Ceres Seq. ID no. 13583434
attacacacctgcatctcggaatcatcgcgcagcatcaggcgattcgacctcgccgttgcccaggcgccggagacgacgacgccgacgagatgacggtgttccacttcctcaactgcgcggtcctcaccttcggcccccacgtcgtctactactccgccacccccctgtcagagtatgacacgattggcaccagtgtaaaagcagctgttgtttatcttggagcagcacttgtaaagcttgtttgtttagcaacgttcctcaaagtacctgatgcgaatgatagctttgatccctaccaggaattaatgaaaattctaattgggtttatagatgttgctggcctttattttgctttgacacagttgacccacagaaacatctcccagaaccataagttccaggctgttggtcttggctgggcttttgctgattcagttctgcacaggcttgcacctctctggattggggcacgagggcttgaatttacttgggagtacatattccaaggacttgaagcaaatgccaatcttgtgatgaccctctcccttgctgcattaggatccttgatgtggctgaggaagaacaaacctaggactttaattccaataatttatgcatgtgctctgcttctggcaacaatgccatctatcaccagttacttgcggagatcattggagtggcagactcccaaggtggttggcttcgagctctcctcctccttggttatggctttcatcagctggcagctgttctcggcttgtcagaggccgatgtaatcaacgaaacaaagcactgcgggatttgccggagatttggtgctcccaagatgtctcttgttgtacttgggcaaaattagaatgctgcttagagcctcggcgctaccgtaacatatattttgaggttcagttgcagaacgttttactttatttgtcggccatagtgcagaaacacatgatctgatgagtgctactgctactgtaacaggtgctcttgtaggaatcgagctaaaacgtagcaccttattccctgttgtatcacatattctgctcaatagcattgcatcttctagtctgaagccaagacattcacttatgccgacagattatgagaaaatacactgtcgtttcatctttggtacgatacatggttttggtc

SEQ ID NO: 62330 - protein, 258 aa, Triticum aestivum
  peptide (1)..(258): Ceres Seq. ID no. 13583435
  misc_feature (31)..(178): Homolog of NCBI NO: 27731097 NR Description: similar to seven transmembrane domain protein
  misc_feature (31)..(178): Homolog of NCBI NO: 14249166 NR Description: seven transmembrane domain protein [Homo sapiens]
  misc_feature (31)..(178): Homolog of NCBI NO: 12841501 NR Description: unnamed protein product [Mus musculus]
  misc_feature (31)..(177): Homolog of NCBI NO: 3550427 NR Description: seven transmembrane domain protein [Homo sapiens]
  misc_feature (31)..(204): Homolog of NCBI NO: 7511137 NR Description: hypothetical protein ZK418.5 - Caenorhabditis
  misc_feature (31)..(207): Homolog of NCBI NO: 39593965 NR Description: Hypothetical protein CBG16516 [Caenorhabditis
  misc_feature (31)..(253): Homolog of NCBI NO: 17556931 NR Description: Seven transmembrane domain protein like (25.0 kD)
  misc_feature (201)..(257): Homolog of NCBI NO: 15220273 NR Description: cytochrome P450 -related [Arabidopsis thaliana]
  misc_feature (140)..(203): Homolog of NCBI NO: 15220273 NR Description: cytochrome P450 -related [Arabidopsis thaliana]
  misc_feature (31)..(257): Homolog of NCBI NO: 18401831 NR Description: expressed protein [Arabidopsis thaliana]
ITHLHLGIIAQHQAIRPRRCPGAGDDDADEMTVFHFLNCAVLTFGPHVVYYSATPLSEYDTIGTSVKAAVVYLGAALVKLVCLATFLKVPDANDSFDPYQELMKILIGFIDVAGLYFALTQLTHRNISQNHKFQAVGLGWAFADSVLHRLAPLWIGARGLEFTWEYIFQGLEANANLVMTLSLAALGSLMWLRKNKPRTLIPIIYACALLLATMPSITSYLRRSLEWQTPKVVGFELSSSLVMAFISWQLFSACQRPM

SEQ ID NO: 62331 - protein, 228 aa, Triticum aestivum
  peptide (1)..(228): Ceres Seq. ID no. 13583436
  misc_feature (1)..(148): Homolog of NCBI NO: 21312420 NR Description: seven transmembrane domain protein [Mus musculus]
  misc_feature (1)..(148): Homolog of NCBI NO: 27731097 NR Description: similar to seven transmembrane domain protein
  misc_feature (1)..(148): Homolog of NCBI NO: 12841501 NR Description: unnamed protein product [Mus musculus]
  misc_feature (1)..(147): Homolog of NCBI NO: 3550427 NR Description: seven transmembrane domain protein [Homo sapiens]
  misc_feature (1)..(174): Homolog of NCBI NO: 7511137 NR Description: hypothetical protein ZK418.5 - Caenorhabditis
  misc_feature (1)..(177): Homolog of NCBI NO: 39593965 NR Description: Hypothetical protein CBG16516 [Caenorhabditis
  misc_feature (1)..(223): Homolog of NCBI NO: 17556931 NR Description: Seven transmembrane domain protein like (25.0 kD)
  misc_feature (171)..(227): Homolog of NCBI NO: 15220273 NR Description: cytochrome P450 -related [Arabidopsis thaliana]
  misc_feature (110)..(173): Homolog of NCBI NO: 15220273 NR Description: cytochrome P450 -related [Arabidopsis thaliana]
  misc_feature (1)..(227): Homolog of NCBI NO: 18401831 NR Description: expressed protein [Arabidopsis thaliana]
MTVFHFLNCAVLTFGPHVVYYSATPLSEYDTIGTSVKAAVVYLGAALVKLVCLATFLKVPDANDSFDPYQELMKILIGFIDVAGLYFALTQLTHRNISQNHKFQAVGLGWAFADSVLHRLAPLWIGARGLEFTWEYIFQGLEANANLVMTLSLAALGSLMWLRKNKPRTLIPIIYACALLLATMPSITSYLRRSLEWQTPKVVGFELSSSLVMAFISWQLFSACQRPM

SEQ ID NO: 62332 - protein, 156 aa, Triticum aestivum
  peptide (1)..(156): Ceres Seq. ID no. 13583437
  misc_feature (1)..(76): Homolog of NCBI NO: 21312420 NR Description: seven transmembrane domain protein [Mus musculus]
  misc_feature (1)..(76): Homolog of NCBI NO: 27731097 NR Description: similar to seven transmembrane domain protein
  misc_feature (1)..(76): Homolog of NCBI NO: 12841501 NR Description: unnamed protein product [Mus musculus]
  misc_feature (1)..(75): Homolog of NCBI NO: 3550427 NR Description: seven transmembrane domain protein [Homo sapiens]
  misc_feature (1)..(102): Homolog of NCBI NO: 7511137 NR Description: hypothetical protein ZK418.5 - Caenorhabditis
  misc_feature (1)..(105): Homolog of NCBI NO: 39593965 NR Description: Hypothetical protein CBG16516 [Caenorhabditis
  misc_feature (1)..(151): Homolog of NCBI NO: 17556931 NR Description: Seven transmembrane domain protein like (25.0 kD)
  misc_feature (99)..(155): Homolog of NCBI NO: 15220273 NR Description: cytochrome P450 -related [Arabidopsis thaliana]
  misc_feature (38)..(101): Homolog of NCBI NO: 15220273 NR Description: cytochrome P450 -related [Arabidopsis thaliana]
  misc_feature (1)..(155): Homolog of NCBI NO: 18401831 NR Description: expressed protein [Arabidopsis thaliana]
MKILIGFIDVAGLYFALTQLTHRNISQNHKFQAVGLGWAFADSVLHRLAPLWIGARGLEFTWEYIFQGLEANANLVMTLSLAALGSLMWLRKNKPRTLIPIIYACALLLATMPSITSYLRRSLEWQTPKVVGFELSSSLVMAFISWQLFSACQRPM

SEQ ID NO: 62333 - DNA, 776 bp, Triticum aestivum
  misc_feature (1)..(776): Ceres Seq. ID no. 12587829
gaaaaatcacaagctagcaagcccacctagctcagccacaagcctagccagtacactctagttggccacttgcttcatcaacatagcaatggcgccctccaagctcgctctcttcctcgccctgaaccaggtcctcttggcagccgtgcatggctgcgggtcgtactgcggcaatacaccggccgtcccagtgccaacatcaccgatcgccgtgtctccgcccgccatcccagtccctgcccccgccgacaaccggaggaggcagcggcacctgctcgatcaacacgctgaagctgaaggtgtgcgccaacgtactgaacctgctgaagctcaacttagccgtgctggcgagcgacgactgctgcccgctgttgggcgggctcgccgacctcgacgtcgccgtgtgcctctacaccgccatcaaggccaatgtcctcggcatcaagctcaacgtccccgtcgacctcgttctcctcctcaaccagtgcggcaagacctgccccgccgacttcacctgccccagctgatccacccatcatccctcgaaccatgcatcacaaaccatgtgtcgtcgtcatcatactcgtctttggtttgcatgccatcacacccgtcactcgtgcatgcatgcacgcttacgtgttcatttcttccagggactgcttataagatagtcgttgatcattgtattccgataggatatctaaatgcatggttcgcatatttgtaaaatgatatacatacgtggaataaaatgattcaagttgtgttaactc

SEQ ID NO: 62334 - protein, 213 aa, Triticum aestivum
  peptide (1)..(213): Ceres Seq. ID no. 12587830
  misc_feature (4)..(45): Homolog of NCBI NO: 4240035 NR Description: ZmGR1b [Zea mays]
  misc_feature (4)..(45): Homolog of NCBI NO: 4240033 NR Description: ZmGR1a [Zea mays]
MAPSKLALFLALNQVLLAAVHGCGSYCGNTPAVPVPTSPIAVSPPAIPVPAPADNRRRQRHLLDQHAEAEGVRQRTEPAEAQLSRAGERRLLPAVGRARRPRRRRVPLHRHQGQCPRHQAQRPRRPRSPPQPVRQDLPRRLHLPQLIHPSSLEPCITNHVSSSSYSSLVCMPSHPSLVHACTLTCSFLPGTAYKIVVDHCIPIGYLNAWFAYL

SEQ ID NO: 62335 - protein, 125 aa, Triticum aestivum
  peptide (1)..(125): Ceres Seq. ID no. 12587831
  misc_feature (42)..(123): Pfam Name: Protease inhibitor/seed storage/LTP family Pfam Description: Protease inhibitor/seed storage/LTP family
  misc_feature (20)..(123): Homolog of NCBI NO: 15235386 NR Description: pEARLI 1
  misc_feature (1)..(125): Homolog of NCBI NO: 38568018 NR Description: OSJNBa0070C17.10 [Oryza sativa (japonica
  misc_feature (20)..(123): Homolog of NCBI NO: 15235390 NR Description: pEARLI 1-like protein; protein id: At4g12500.1
  misc_feature (17)..(125): Homolog of NCBI NO: 2226329 NR Description: physical impedance induced protein [Zea mays]
  misc_feature (26)..(123): Homolog of NCBI NO: 37533212 NR Description: putative lipid transfer protein
  misc_feature (25)..(123): Homolog of NCBI NO: 4240035 NR Description: ZmGR1b [Zea mays]
  misc_feature (7)..(123): Homolog of NCBI NO: 37536712 NR Description: putative lipid transfer protein
  misc_feature (15)..(123): Homolog of NCBI NO: 37536718 NR Description: putative lipid transfer protein
  misc_feature (25)..(123): Homolog of NCBI NO: 4240033 NR Description: ZmGR1a [Zea mays]
  misc_feature (15)..(124): Homolog of NCBI NO: 39748092 NR Description: lipid transfer protein-like protein
MAAGRTAAIHRPSQCQHHRSPCLRPPSQSLPPPTTGGGSGTCSINTLKLKVCANVLNLLKLNLAVLASDDCCPLLGGLADLDVAVCLYTAIKANVLGIKLNVPVDLVLLLNQCGKTCPADFTCPS

SEQ ID NO: 62336 - DNA, 1330 bp, Triticum aestivum
  misc_feature (1)..(1330): Ceres Seq. ID no. 15179743
agttttccccgtcggtctcctcccccagatccacatccacccatcgccatggcgatctccccccgcctcctcctcccgctcctcctcgcggcggcggccgcctccgccttcgccggcgccaacgacctggtcggcgagctccagtccctccgctcccgctcccccgccggcgtgatccacctcaccgacacctccgtcacccgcttcctctcctcgccggccccgcgcccctactccgtcctcgtcttcttcgacgccacctcgctccactccaagaccgacctccacctcccccagctccgccgcgagttcgcgctcctctccgcctccttccacgccaacaaccccgactcctccgacctcttcttcgccgacatcgagttctccgagtcgcagcactccttctcccagttcggcgtcaactccctcccccacgtccgcctcatccgcccggagcactcccgcctcgccgactcggagcagatggaccagtcccacttctcccgcctcgccgactccatggtcgagttcgtggaggcccgcaccggcctcgaggtcggccccatcgtccgcccgcctctcgtctcccgcaaccagatgatcctgctcggcctcttgttcctgatctccatcccgttcgggatcaagaggatcatggaaggggacaccctgcttcatgaccgcaagctttggatggccggggcgctgttcgtctacttcttcagcgtctcagggggcatgtacgggatcatcaggcatacgcccatgttcatcaccgaccgggaggatccaaacaagctcgtcttcttctaccagggctcagggatgcagctcggcgcagaggggtttgctgtcggtttcctgtacaccctcgtggggctgatgatagctgtggtgacacacttgctggtgaaggtggagagcctgcagacacagcgatttgcgatgctggcagtcatggccatcgggtggtgggcagtcaggaaggtgatttacctggataactggaagactgggtacggcattcataccttctggccgagtagctggaggtaaatgttgtctcaaccggcgatcgatgcttctttcctttggttgcagaggacgcggagtcatccagatcggccatactgagatagagcatcattttggttgtaacgtcgtactagcaagtttagcatttcaattctctggtgctttattgtggaatatagagaaccgagtcattttataccgaggattttaacttgcagtattacttgaacaatggtaaatcctagctgatatttgttttcaggcagtaaccccggccaaggatattaaccgtggg

SEQ ID NO: 62337 - protein, 351 aa, Triticum aestivum
  peptide (1)..(351): Ceres Seq. ID no. 15179744
  misc_feature (24)..(344): Pfam Name: OST3 / OST6 family Pfam Description: OST3 / OST6 family
  misc_feature (41)..(326): Homolog of NCBI NO: 25402667 NR Description: protein T23J18.22 [imported] - Arabidopsis
  misc_feature (41)..(351): Homolog of NCBI NO: 15220421 NR Description: hypothetical protein [Arabidopsis thaliana]
  misc_feature (17)..(351): Homolog of NCBI NO: 15220609 NR Description: hypothetical protein [Arabidopsis thaliana]
  misc_feature (23)..(351): Homolog of NCBI NO: 14091860 NR Description: Putative protein with similarity to putative
SFPRRSPPPDPHPPIAMAISPRLLLPLLLAAAAASAFAGANDLVGELQSLRSRSPAGVIHLTDTSVTRFLSSPAPRPYSVLVFFDATSLHSKTDLHLPQLRREFALLSASFHANNPDSSDLFFADIEFSESQHSFSQFGVNSLPHVRLIRPEHSRLADSEQMDQSHFSRLADSMVEFVEARTGLEVGPIVRPPLVSRNQMILLGLLFLISIPFGIKRIMEGDTLLHDRKLWMAGALFVYFFSVSGGMYGIIRHTPMFITDREDPNKLVFFYQGSGMQLGAEGFAVGFLYTLVGLMIAVVTHLLVKVESLQTQRFAMLAVMAIGWWAVRKVIYLDNWKTGYGIHTFWPSSWR

SEQ ID NO: 62338 - protein, 335 aa, Triticum aestivum
  peptide (1)..(335): Ceres Seq. ID no. 15179745
  misc_feature (8)..(328): Pfam Name: OST3 / OST6 family Pfam Description: OST3 / OST6 family
  misc_feature (25)..(310): Homolog of NCBI NO: 25402667 NR Description: protein T23J18.22 [imported] - Arabidopsis
  misc_feature (25)..(335): Homolog of NCBI NO: 15220421 NR Description: hypothetical protein [Arabidopsis thaliana]
  misc_feature (1)..(335): Homolog of NCBI NO: 15220609 NR Description: hypothetical protein [Arabidopsis thaliana]
  misc_feature (7)..(335): Homolog of NCBI NO: 14091860 NR Description: Putative protein with similarity to putative
MAISPRLLLPLLLAAAAASAFAGANDLVGELQSLRSRSPAGVIHLTDTSVTRFLSSPAPRPYSVLVFFDATSLHSKTDLHLPQLRREFALLSASFHANNPDSSDLFFADIEFSESQHSFSQFGVNSLPHVRLIRPEHSRLADSEQMDQSHFSRLADSMVEFVEARTGLEVGPIVRPPLVSRNQMILLGLLFLISIPFGIKRIMEGDTLLHDRKLWMAGALFVYFFSVSGGMYGIIRHTPMFITDREDPNKLVFFYQGSGMQLGAEGFAVGFLYTLVGLMIAVVTHLLVKVESLQTQRFAMLAVMAIGWWAVRKVIYLDNWKTGYGIHTFWPSSWR

SEQ ID NO: 62339 - protein, 225 aa, Triticum aestivum
  peptide (1)..(225): Ceres Seq. ID no. 15179746
  misc_feature (20)..(207): Pfam Name: Formin Homology 2 Domain Pfam Description: Formin Homology 2 Domain
  misc_feature (20)..(214): Homolog of NCBI NO: 81286 NR Description: extensin - Volvox carteri (fragment)
FSPSVSSPRSTSTHRHGDLPPPPPPAPPRGGGRLRLRRRQRPGRRAPVPPLPLPRRRDPPHRHLRHPLPLLAGPAPLLRPRLLRRHLAPLQDRPPPPPAPPRVRAPLRLLPRQQPRLLRPLLRRHRVLRVAALLLPVRRQLPPPRPPHPPGALPPRRLGADGPVPLLPPRRLHGRVRGGPHRPRGRPHRPPASRLPQPDDPARPLVPDLHPVRDQEDHGRGHPAS

SEQ ID NO: 62340 - DNA, 726 bp, Triticum aestivum
  misc_feature (1)..(726): Ceres Seq. ID no. 12592975
aaatctaccaccgctctccctctcccggcctgcactcacaagcagcggcgaagccttctctgccttcctcctcctctctctttctgccatgaagccccctcacttcactggggaagcggcagccagcgcctcatgggctcacgaggtcaagcaggccctccgtgacaagctccggtggacacccgccgcgggcaccacgggcaccggcggccacggcgccgcgaggccgccgacggcctcctcggctgtgaccgccgagccggcggtgcagccggcccacggcgccgactgccggggcttggccgccgccgaggaccccatcaggagggtcatgttcttggccccctggggccacacataaacgagaaaagcaagtgcacgcacggccatgccttgtcttggccggatctgcaattgcacctcaacaaaaatatggactagtacgtatatatatgtggccgtatggaccatcaactgatgaacatgaactcatcaaggaccaattaaaaactgggactagatcgggagaagaagatgtggtgcttgaggtatttgttcatgtttctcttggagagatgcatgcatgcatggggagatctcgcctgacgggtttggtgcatatatatggcctatgggtgttgctgcctggccggttgaagctgcagctttgttgtagccatgaacctgttttttttgtttctctccagaaaatctgtaccaagagcc

SEQ ID NO: 62341 - protein, 119 aa, Triticum aestivum
  peptide (1)..(119): Ceres Seq. ID no. 12592976
  misc_feature (30)..(119): Homolog of NCBI NO: 40714687 NR Description: expressed protein [Oryza sativa (japonica
NLPPLSLSRPALTSSGEAFSAFLLLSLSAMKPPHFTGEAAASASWAHEVKQALRDKLRWTPAAGTTGTGGHGAARPPTASSAVTAEPAVQPAHGADCRGLAAAEDPIRRVMFLAPWGHT

SEQ ID NO: 62342 - protein, 91 aa, Triticum aestivum
  peptide (1)..(91): Ceres Seq. ID no. 12592977
MWPYGPSTDEHELIKDQLKTGTRSGEEDVVLEVFVHVSLGEMHACMGRSRLTGLVHIYGLWVLLPGRLKLQLCCSHEPVFFVSLQKICTKS

SEQ ID NO: 62343 - protein, 90 aa, Triticum aestivum
  peptide (1)..(90): Ceres Seq. ID no. 12592978
  misc_feature (1)..(90): Homolog of NCBI NO: 40714687 NR Description: expressed protein [Oryza sativa (japonica
MKPPHFTGEAAASASWAHEVKQALRDKLRWTPAAGTTGTGGHGAARPPTASSAVTAEPAVQPAHGADCRGLAAAEDPIRRVMFLAPWGHT

SEQ ID NO: 62344 - DNA, 986 bp, Triticum aestivum
  misc_feature (1)..(986): Ceres Seq. ID no. 14302449
aaaaatcgccttcgtctttccccgtcgtctccaccaacgccagtttttccccgtcgtctccaccaacgccagtccaaatccaaacccgaaggaggaagagaggctagctagctagggttccgcctcccgccggccggagagagggagagagaggatgacgacggcggcgcggccaacgtgggcgccagcgaagggcgggaacgagcagggcggcacgcgtatcttcgggccctccgggaagtactcctcccgcgacctcgccgcacacacctccctcaagcccagaaaagagggacaacaaactcaagaggaggtacagaagaggaatcttagggatgaacttgaggagcgtgaacgcaagcacttctcatccaaggataagtcctatgttgacgagagggaccggcgaaaaagttcaggcctgctcttagaaggttcaaaacgggatgaggataagatagttccacgtgaaattgatgcagatgactctgacgtggaactaaaaagtgatgatgaaagcgacgatgatgacgacgacgatgacactgaggcactaatggcagagcttgaaaggattaaaaaagaaagagccgaggacaggcttagaaaggagcgtcagcaagcagaagaagaggccaagatgaaggaggctgagctgatgcgaggaaacccactgatcaatatgaataattctggctccttcaatgtgaagagaaggtgggatgatgatgttgtattcaagaaccaggctcgtggagagactaagacaccgaaacggttcatcaatgacaccatcagaagtgatttccaccgcaagtttctgcataggtacatgaaatgatgctgctgtatgctttatgttgtctggacagtatgcatgctgaaagagcctgtgatgtttctgtattctgaagatcgatttgtatgacataactgtaacagctacgttatcttaatggtgatatgtttaccctgttcctaagagt

SEQ ID NO: 62345 - protein, 228 aa, Triticum aestivum; identical to SEQ ID NO: 55870
  peptide (1)..(228): Ceres Seq. ID no. 14302450
  misc_feature (1)..(228): Pfam Name: Cwf15/Cwc15 cell cycle control protein Pfam Description: Cwf15/Cwc15 cell cycle control protein
  misc_feature (1)..(228): Homolog of NCBI NO: 17564200 NR Description: adrenal gland protein AD-002 like (26.1 kD)
  misc_feature (1)..(228): Homolog of NCBI NO: 39582427 NR Description: Hypothetical protein CBG22646 [Caenorhabditis
  misc_feature (1)..(228): Homolog of NCBI NO: 7705475 NR Description: hypothetical protein HSPC148 [Homo sapiens]
  misc_feature (1)..(228): Homolog of NCBI NO: 27719369 NR Description: similar to RIKEN cDNA 0610040D20
  misc_feature (1)..(228): Homolog of NCBI NO: 6523797 NR Description: adrenal gland protein AD-002 [Homo sapiens]
  misc_feature (1)..(228): Homolog of NCBI NO: 12963537 NR Description: RIKEN cDNA 0610040D20 [Mus musculus]
  misc_feature (1)..(228): Homolog of NCBI NO: 18399903 NR Description: expressed protein [Arabidopsis thaliana]
  misc_feature (1)..(228): Homolog of NCBI NO: 15451186 NR Description: Unknown protein [Arabidopsis thaliana]
  misc_feature (1)..(228): Homolog of NCBI NO: 21592359 NR Description: unknown [Arabidopsis thaliana]
  misc_feature (1)..(228): Homolog of NCBI NO: 34897750 NR Description: ESTs AU032852(S15362),AU070591(S5037) correspond a region of the predicted gene.~Similar to Caenorhabditis elegans

SEQ ID NO: 62346 - DNA, 1003 bp, Triticum aestivum
  misc_feature (1)..(1003): Ceres Seq. ID no. 15173911
gactttggcttgatcaagtaggtatatatacatatcctctgctgctcctcccccgcaaacgatcgacgggcctggccggcgcagcctgcgacgtccgagctcccgccgcgccgtctccggccatggggttccccctggtgtgctactgcgtcgccatccccaagccgatcatcgccttctgcaagctcgtcgccgccgtccgggacgccctcctcctgctgctctccctcgtcggcctctgccgctccccgcgccgctccgtccacgacgccccgctgcccgaggaggtcaaggagcgcctcccggccgtcgagttctccttgctggcgcgtccggcgcagcagcagcaggggtgccacgacggggacgccgcggcggcggcgacgtgcatcgtgtgcctggagcggctgcgggcggcggacgaggtgcggcggctgggcaactgcgcgcacgccttccaccgcggctgcatcgacgggtggatcgacctcggccggaccacctgcccgctgtgccgctcccacctactgccccgccccgcggagggacggcccgctcgccagcctcctcacgcgcgtttggtgacgaccaaccgcgccactcgttcgttagctccaaggccacgtctttccttgtcccagcgcggtggcggccgacacagagattcgcgatctcgaccggctgcacgtatatttattgtgggtttacatcgtctcaaaatcgggattttatttagtaatttagtttagggcgccactttgtatagccatccaatcacgaggtcaccaataggtgcacaagcatagttttttttttccgtagagaaggattagtcggtcaaatatatgcgtggtcgtgtttggctagtggatctgaaatgtcaacagctcgagaacgcatgtcgctgttcgacttgtccaatcccactcgtgggactacgacgtacagttgtagtataactcatacttgattcttcatatcaaattgatgattgtttgctgcc

SEQ ID NO: 62347 - protein, 248 aa, Triticum aestivum
  peptide (1)..(248): Ceres Seq. ID no. 15173912
  misc_feature (129)..(171): Pfam Name: Zinc finger, C3HC4 type (RING finger) Pfam Description: Zinc finger, C3HC4 type (RING finger)
  misc_feature (98)..(173): Homolog of NCBI NO: 21554155 NR Description: RING zinc finger protein-like [Arabidopsis
  misc_feature (120)..(184): Homolog of NCBI NO: 34907968 NR Description: P0446G04.15 [Oryza sativa (japonica
  misc_feature (117)..(188): Homolog of NCBI NO: 15227929 NR Description: RING zinc finger protein -related [Arabidopsis
  misc_feature (125)..(182): Homolog of NCBI NO: 25410884 NR Description: probable RING-H2 finger protein RHA2b
  misc_feature (125)..(182): Homolog of NCBI NO: 18379162 NR Description: C3HC4-type zinc finger protein family (RHA2b)
  misc_feature (41)..(177): Homolog of NCBI NO: 15222553 NR Description: RING-H2 finger protein, putative [Arabidopsis
  misc_feature (41)..(180): Homolog of NCBI NO: 34897812 NR Description: P0514G12.26 [Oryza sativa (japonica
  misc_feature (121)..(189): Homolog of NCBI NO: 34903102 NR Description: unnamed protein product [Oryza sativa (japonica
  misc_feature (96)..(177): Homolog of NCBI NO: 32488512 NR Description: OSJNBa0011J08.19 [Oryza sativa (japonica
  misc_feature (41)..(182): Homolog of NCBI NO: 38345870 NR Description: OSJNBa0064M23.12 [Oryza sativa (japonica
LWLDQVGIYTYPLLLLPRKRSTGLAGAACDVRAPAAPSPAMGFPLVCYCVAIPKPIIAFCKLVAAVRDALLLLLSLVGLCRSPRRSVHDAPLPEEVKERLPAVEFSLLARPAQQQQGCHDGDAAAAATCIVCLERLRAADEVRRLGNCAHAFHRGCIDGWIDLGRTTCPLCRSHLLPRPAEGRPARQPPHARLVTTNRATRSLAPRPRLSLSQRGGGRHRDSRSRPAARIFIVGLHRLKIGILFSNLV

SEQ ID NO: 62348 - protein, 208 aa, Triticum aestivum
  peptide (1)..(208): Ceres Seq. ID no. 15173913
  misc_feature (89)..(131): Pfam Name: Zinc finger, C3HC4 type (RING finger) Pfam Description: Zinc finger, C3HC4 type (RING finger)
  misc_feature (58)..(133): Homolog of NCBI NO: 21554155 NR Description: RING zinc finger protein-like [Arabidopsis
  misc_feature (80)..(144): Homolog of NCBI NO: 34907968 NR Description: P0446G04.15 [Oryza sativa (japonica
  misc_feature (77)..(148): Homolog of NCBI NO: 15227929 NR Description: RING zinc finger protein -related [Arabidopsis
  misc_feature (85)..(142): Homolog of NCBI NO: 25410884 NR Description: probable RING-H2 finger protein RHA2b
  misc_feature (85)..(142): Homolog of NCBI NO: 18379162 NR Description: C3HC4-type zinc finger protein family (RHA2b)
  misc_feature (1)..(137): Homolog of NCBI NO: 15222553 NR Description: RING-H2 finger protein, putative [Arabidopsis
  misc_feature (1)..(140): Homolog of NCBI NO: 34897812 NR Description: P0514G12.26 [Oryza sativa (japonica
  misc_feature (81)..(149): Homolog of NCBI NO: 34903102 NR Description: unnamed protein product [Oryza sativa (japonica
  misc_feature (56)..(137): Homolog of NCBI NO: 32488512 NR Description: OSJNBa0011J08.19 [Oryza sativa (japonica
  misc_feature (1)..(142): Homolog of NCBI NO: 38345870 NR Description: OSJNBa0064M23.12 [Oryza sativa (japonica
MGFPLVCYCVAIPKPIIAFCKLVAAVRDALLLLLSLVGLCRSPRRSVHDAPLPEEVKERLPAVEFSLLARPAQQQQGCHDGDAAAAATCIVCLERLRAADEVRRLGNCAHAFHRGCIDGWIDLGRTTCPLCRSHLLPRPAEGRPARQPPHARLVTTNRATRSLAPRPRLSLSQRGGGRHRDSRSRPAARIFIVGLHRLKIGILFSNLV

SEQ ID NO: 62349 - DNA, 1191 bp, Triticum aestivum
  misc_feature (1)..(1191): Ceres Seq. ID no. 12625265
gattccccacagccaaaaagagagaaaacatcggaagaggacgggagagggaggaaatttggagtcgagggggcaggagaaggggagagcagagaagcttggagggcggagcgcgtcggcgatggacggcgagtggtggaggaagaagtgggtggcgtgggcggcggcggcggccatcttcgtggtgctcatgctcgtcacgcccgccatcccgcaggacgaggactaccacgacttcgccgaccagcgcgacctcttcctagggatccctaacacattgaatgtgctctcaaatatccctttcctctttgttggtctcgctgggctcatcctgtgccactacaaaaactacttcaggctatgctcacagggggagctctggagttggacactcttctatgctggtgtcactactgtcggtgttggttcatcctactaccatctctacccaaacgatgccaccttagtttgggacagattgcctatgacgattgctttcacgtctattgtggccattttcatcattgaaagggttgatgatagagcaggaacaaagtcccttgcaccccttgttattgctggtgcactgagcatcctgtactggagtttctttgatgatcttcggccatatgcaataatccagttcgttccatgcattgtaatacctgtgatggctatagttattccaccaatgtatacacattcaagctactggttgtgggcagcaggattttaccttcttgccaaagtggaagaggctgcggacaaacctatatataggtggacacatgacattgttagcggacacactcttaaacatctatgtgctgcgatggtacctgttttcttgactctcatgttggcaaagaggacaattgaacctgatagggtaagcttactccagatgtggaagatcagttggagagaacgtggttcccaagatagcaacactgtagacgtcaaatatgattatgctgcagtttcaactacgtctgaacaacagtagatatgtgttcttcatatgtactctactcccgaagtgtaaaaatagcatcgatctgaatatcaggagccccagcttgcacggttgtgtatcattgcctgctaatcaacgttcgtatgttgttgttcctgatcaaaacttcctgatcatatcttgtacaggaaggaaaaatatatattagttccctt

SEQ ID NO: 62350 - protein, 334 aa, Triticum aestivum
  peptide (1)..(334): Ceres Seq. ID no. 12625266
  misc_feature (58)..(294): Homolog of NCBI NO: 27376099 NR Description: blr0988 [Bradyrhizobium japonicum]
  misc_feature (33)..(112): Homolog of NCBI NO: 34903592 NR Description: P0419B01.9 [Oryza sativa (japonica
  misc_feature (205)..(293): Homolog of NCBI NO: 34903592 NR Description: P0419B01.9 [Oryza sativa (japonica
  misc_feature (61)..(293): Homolog of NCBI NO: 23029224 NR Description: hypothetical protein [Microbulbifer degradans
  misc_feature (49)..(294): Homolog of NCBI NO: 29653854 NR Description: membrane protein, putative [Coxiella burnetii RSA
  misc_feature (46)..(296): Homolog of NCBI NO: 15239801 NR Description: putative protein; protein id: At5g11870.1
  misc_feature (52)..(330): Homolog of NCBI NO: 15223970 NR Description: unknown protein; protein id: At1g71190.1
  misc_feature (47)..(332): Homolog of NCBI NO: 34905818 NR Description: P0483G10.13 [Oryza sativa (japonica
IPHSQKERKHRKRTGEGGNLESRGQEKGRAEKLGGRSASAMDGEWWRKKWVAWAAAAAIFVVLMLVTPAIPQDEDYHDFADQRDLFLGIPNTLNVLSNIPFLFVGLAGLILCHYKNYFRLCSQGELWSWTLFYAGVTTVGVGSSYYHLYPNDATLVWDRLPMTIAFTSIVAIFIIERVDDRAGTKSLAPLVIAGALSILYWSFFDDLRPYAIIQFVPCIVIPVMAIVIPPMYTHSSYWLWAAGFYLLAKVEEAADKPIYRWTHDIVSGHTLKHLCAAMVPVFLTLMLAKRTIEPDRVSLLQMWKISWRERGSQDSNTVDVKYDYAAVSTTSEQQ

SEQ ID NO: 62351 - protein, 294 aa, Triticum aestivum
  peptide (1)..(294): Ceres Seq. ID no. 12625267
  misc_feature (18)..(254): Homolog of NCBI NO: 27376099 NR Description: blr0988 [Bradyrhizobium japonicum]
  misc_feature (1)..(72): Homolog of NCBI NO: 34903592 NR Description: P0419B01.9 [Oryza sativa (japonica
  misc_feature (165)..(253): Homolog of NCBI NO: 34903592 NR Description: P0419B01.9 [Oryza sativa (japonica
  misc_feature (21)..(253): Homolog of NCBI NO: 23029224 NR Description: hypothetical protein [Microbulbifer degradans
  misc_feature (9)..(254): Homolog of NCBI NO: 29653854 NR Description: membrane protein, putative [Coxiella burnetii RSA
  misc_feature (6)..(256): Homolog of NCBI NO: 15239801 NR Description: putative protein; protein id: At5g11870.1
  misc_feature (12)..(290): Homolog of NCBI NO: 15223970 NR Description: unknown protein; protein id: At1g71190.1
  misc_feature (7)..(292): Homolog of NCBI NO: 34905818 NR Description: P0483G10.13 [Oryza sativa (japonica
MDGEWWRKKWVAWAAAAAIFVVLMLVTPAIPQDEDYHDFADQRDLFLGIPNTLNVLSNIPFLFVGLAGLILCHYKNYFRLCSQGELWSWTLFYAGVTTVGVGSSYYHLYPNDATLVWDRLPMTIAFTSIVAIFIIERVDDRAGTKSLAPLVIAGALSILYWSFFDDLRPYAIIQFVPCIVIPVMAIVIPPMYTHSSYWLWAAGFYLLAKVEEAADKPIYRWTHDIVSGHTLKHLCAAMVPVFLTLMLAKRTIEPDRVSLLQMWKISWRERGSQDSNTVDVKYDYAAVSTTSEQQ

SEQ ID NO: 62352 - protein, 271 aa, Triticum aestivum
  peptide (1)..(271): Ceres Seq. ID no. 12625268
  misc_feature (1)..(231): Homolog of NCBI NO: 27376099 NR Description: blr0988 [Bradyrhizobium japonicum]
  misc_feature (1)..(49): Homolog of NCBI NO: 34903592 NR Description: P0419B01.9 [Oryza sativa (japonica
  misc_feature (142)..(230): Homolog of NCBI NO: 34903592 NR Description: P0419B01.9 [Oryza sativa (japonica
  misc_feature (1)..(230): Homolog of NCBI NO: 23029224 NR Description: hypothetical protein [Microbulbifer degradans
  misc_feature (1)..(231): Homolog of NCBI NO: 29653854 NR Description: membrane protein, putative [Coxiella burnetii RSA
  misc_feature (1)..(233): Homolog of NCBI NO: 15239801 NR Description: putative protein; protein id: At5g11870.1
  misc_feature (1)..(267): Homolog of NCBI NO: 15223970 NR Description: unknown protein; protein id: At1g71190.1
  misc_feature (1)..(269): Homolog of NCBI NO: 34905818 NR Description: P0483G10.13 [Oryza sativa (japonica
MLVTPAIPQDEDYHDFADQRDLFLGIPNTLNVLSNIPFLFVGLAGLILCHYKNYFRLCSQGELWSWTLFYAGVTTVGVGSSYYHLYPNDATLVWDRLPMTIAFTSIVAIFIIERVDDRAGTKSLAPLVIAGALSILYWSFFDDLRPYAIIQFVPCIVIPVMAIVIPPMYTHSSYWLWAAGFYLLAKVEEAADKPIYRWTHDIVSGHTLKHLCAAMVPVFLTLMLAKRTIEPDRVSLLQMWKISWRERGSQDSNTVDVKYDYAAVSTTSEQQ

SEQ ID NO: 62353 - DNA, 587 bp, Triticum aestivum
  misc_feature (1)..(587): Ceres Seq. ID no. 13596922
agaacatcctaatcgaaaaactcctccacactcttaagctaagctaagcaagccagcatctcgatctactcttcctccagcaatggcgtcgtccaggagagccctcatcctgctggccgtcgtgctggcggcggtgccggcggcgctgagccagaagacgacggccccggcgcccgaggcggcgcccgagacgccggaggcgcctgcggcggggacgacgcccaaggcggcggcggcgccgaacgtgacggcggtgctggagaaggccgggcagtacaccaagttcatccggctgatggcgtcgacgcagcaggacacgcagctgaacgcgcaggccaacgactcggacacgggcttcacggtgttcgcccccaccgacagcgccttcaacagcctcaagccgggcaccctcaactcgctctcgcagcaggaccaggtgacgctggtgcaggcccacatcgtccccaccttctactccatggagtccttcgagaccgccagcaaccccgtccgcacccaggcctccggcaccgacgggccctgcaccgtcaacgtcaccgccaccagcaacagcgccgtcaacgtct

SEQ ID NO: 62354 - protein, 168 aa, Triticum aestivum
  peptide (1)..(168): Ceres Seq. ID no. 13596923
  misc_feature (57)..(167): Pfam Name: Fasciclin domain Pfam Description: Fasciclin domain
  misc_feature (8)..(167): Homolog of NCBI NO: 15239344 NR Description: fasciclin-like arabinogalactan-protein (FLA12)
  misc_feature (1)..(167): Homolog of NCBI NO: 18379157 NR Description: fasciclin-like arabinogalactan-protein (FLA9)
  misc_feature (1)..(167): Homolog of NCBI NO: 24417458 NR Description: unknown [Arabidopsis thaliana]
  misc_feature (1)..(167): Homolog of NCBI NO: 21553590 NR Description: arabinogalactan protein-like [Arabidopsis
  misc_feature (39)..(167): Homolog of NCBI NO: 30841338 NR Description: arabinogalactan protein [Gossypium hirsutum]
  misc_feature (41)..(167): Homolog of NCBI NO: 5919185 NR Description: arabinogalactan protein Pop14A9 [Populus x
  misc_feature (39)..(167): Homolog of NCBI NO: 21553523 NR Description: arabinogalactan protein-like [Arabidopsis
  misc_feature (39)..(167): Homolog of NCBI NO: 15242651 NR Description: fasciclin-like arabinogalactan-protein (FLA11)
  misc_feature (33)..(167): Homolog of NCBI NO: 2129473 NR Description: arabinogalactan-like protein - loblolly pine
  misc_feature (1)..(167): Homolog of NCBI NO: 34910950 NR Description: putative arabinogalactan-like protein
MASSRRALILLAVVLAAVPAALSQKTTAPAPEAAPETPEAPAAGTTPKAAAAPNVTAVLEKAGQYTKFIRLMASTQQDTQLNAQANDSDTGFTVFAPTDSAFNSLKPGTLNSLSQQDQVTLVQAHIVPTFYSMESFETASNPVRTQASGTDGPCTVNVTATSNSAVNV

SEQ ID NO: 62355 - protein, 97 aa, Triticum aestivum
  peptide (1)..(97): Ceres Seq. ID no. 13596924
  misc_feature (1)..(96): Pfam Name: Fasciclin domain Pfam Description: Fasciclin domain
  misc_feature (1)..(96): Homolog of NCBI NO: 15239344 NR Description: fasciclin-like arabinogalactan-protein (FLA12)
  misc_feature (1)..(96): Homolog of NCBI NO: 18379157 NR Description: fasciclin-like arabinogalactan-protein (FLA9)
  misc_feature (1)..(96): Homolog of NCBI NO: 24417458 NR Description: unknown [Arabidopsis thaliana]
  misc_feature (1)..(96): Homolog of NCBI NO: 21553590 NR Description: arabinogalactan protein-like [Arabidopsis
  misc_feature (1)..(96): Homolog of NCBI NO: 30841338 NR Description: arabinogalactan protein [Gossypium hirsutum]
  misc_feature (1)..(96): Homolog of NCBI NO: 5919185 NR Description: arabinogalactan protein Pop14A9 [Populus x
  misc_feature (1)..(96): Homolog of NCBI NO: 21553523 NR Description: arabinogalactan protein-like [Arabidopsis
  misc_feature (1)..(96): Homolog of NCBI NO: 15242651 NR Description: fasciclin-like arabinogalactan-protein (FLA11)
  misc_feature (1)..(96): Homolog of NCBI NO: 2129473 NR Description: arabinogalactan-like protein - loblolly pine
  misc_feature (1)..(96): Homolog of NCBI NO: 34910950 NR Description: putative arabinogalactan-like protein
MASTQQDTQLNAQANDSDTGFTVFAPTDSAFNSLKPGTLNSLSQQDQVTLVQAHIVPTFYSMESFETASNPVRTQASGTDGPCTVNVTATSNSAVNV

SEQ ID NO: 62356 - DNA, 952 bp, Triticum aestivum
  misc_feature (1)..(952): Ceres Seq. ID no. 15173907
gaaagacaaaaaccttgaggacttggctgcctagctatacttactaggcgtactctgaaattgaaatggagactccttctctgctttttctcaccaccttgttggcctttgcattcaaggcctccgttgctcaatggacgcctgcatatgcaacattctacggcggcagcgacgcgtcagacaccatgggtggtgcgtgcgggtacgggaacttgtacaatgctgggtacggggttaattcagccgcgttgagcacggcgctcttcaacaacggcgcatcatgcggcatgtgcttcactatcacctgcgacgctagcaagacgcagtcgtgcaaacagggcacgtccatcaccatcacggccaccaacttctgcccgcccaactacgccctggccagcgacaacggcggatggtgcaacccgccgcggcagcacttcgacatgtcgcaacccgcgtgggagaccatcgctgtctaccaagccggcattgtgcccgtcaactacaggagggttccctgccagaggagtgggggcatgaggttcaccattaacgggaacgactactttgagctcgtgacggtggcaaatgtcgccggtagcggcgtggtgtcccaaatgtggataaaggggtccaagaccgactggatggtaatgagcaggaactggggtgccagctggcagagcaatgcttacctcaacggccagagcttgtccttcaaggtacagaccgacgacggccgggtcgtcacggccgacaatgttgcgccatacaactggtggttcggtggcacctacacttcgtggcagcagttctaacatcttgcgaggttgatgatttcatttgtgggtactcaaataaacaggcccgatgatttcatccgaggctatatctcctattttgtttctttgtatctatgttttgcttgtccaagtttgtgtacttagcttgcctc

SEQ ID NO: 62357 - protein, 249 aa, Triticum aestivum
  peptide (1)..(249): Ceres Seq. ID no. 15173908
  misc_feature (157)..(234): Pfam Name: Pollen allergen Pfam Description: Pollen allergen
  misc_feature (1)..(249): Homolog of NCBI NO: 30697882 NR Description: expansin, putative (EXP1) [Arabidopsis thaliana]
  misc_feature (1)..(247): Homolog of NCBI NO: 11932092 NR Description: expansin [Cicer arietinum]
  misc_feature (14)..(249): Homolog of NCBI NO: 4027895 NR Description: alpha-expansin precursor [Nicotiana tabacum]
  misc_feature (7)..(245): Homolog of NCBI NO: 30519752 NR Description: expansin11 [Lycopersicon esculentum]
  misc_feature (7)..(249): Homolog of NCBI NO: 20149056 NR Description: putative expansin [Capsicum annuum]
  misc_feature (6)..(245): Homolog of NCBI NO: 34904668 NR Description: putative expansin [Oryza sativa (japonica
  misc_feature (1)..(249): Homolog of NCBI NO: 37999973 NR Description: expansin-2 [Musa acuminata]
  misc_feature (6)..(249): Homolog of NCBI NO: 9967926 NR Description: expansin [Schedonorus pratensis]
  misc_feature (1)..(249): Homolog of NCBI NO: 7489472 NR Description: expansin 3 - rice
  misc_feature (6)..(249): Homolog of NCBI NO: 34904664 NR Description: putative expansin [Oryza sativa (japonica
METPSLLFLTTLLAFAFKASVAQWTPAYATFYGGSDASDTMGGACGYGNLYNAGYGVNSAALSTALFNNGASCGMCFTITCDASKTQSCKQGTSITITATNFCPPNYALASDNGGWCNPPRQHFDMSQPAWETIAVYQAGIVPVNYRRVPCQRSGGMRFTINGNDYFELVTVANVAGSGVVSQMWIKGSKTDWMVMSRNWGASWQSNAYLNGQSLSFKVQTDDGRVVTADNVAPYNWWFGGTYTSWQQF

SEQ ID NO: 62358 - protein, 209 aa, Triticum aestivum
  peptide (1)..(209): Ceres Seq. ID no. 15173909
  misc_feature (117)..(194): Pfam Name: Pollen allergen Pfam Description: Pollen allergen
  misc_feature (1)..(209): Homolog of NCBI NO: 30697882 NR Description: expansin, putative (EXP1) [Arabidopsis thaliana]
  misc_feature (1)..(207): Homolog of NCBI NO: 11932092 NR Description: expansin [Cicer arietinum]
  misc_feature (1)..(209): Homolog of NCBI NO: 4027895 NR Description: alpha-expansin precursor [Nicotiana tabacum]
  misc_feature (1)..(205): Homolog of NCBI NO: 30519752 NR Description: expansin11 [Lycopersicon esculentum]
  misc_feature (1)..(209): Homolog of NCBI NO: 20149056 NR Description: putative expansin [Capsicum annuum]
  misc_feature (1)..(205): Homolog of NCBI NO: 34904668 NR Description: putative expansin [Oryza sativa (japonica
  misc_feature (1)..(209): Homolog of NCBI NO: 37999973 NR Description: expansin-2 [Musa acuminata]
  misc_feature (1)..(209): Homolog of NCBI NO: 9967926 NR Description: expansin [Schedonorus pratensis]
  misc_feature (1)..(209): Homolog of NCBI NO: 7489472 NR Description: expansin 3 - rice
  misc_feature (1)..(209): Homolog of NCBI NO: 34904664 NR Description: putative expansin [Oryza sativa (japonica
MGGACGYGNLYNAGYGVNSAALSTALFNNGASCGMCFTITCDASKTQSCKQGTSITITATNFCPPNYALASDNGGWCNPPRQHFDMSQPAWETIAVYQAGIVPVNYRRVPCQRSGGMRFTINGNDYFELVTVANVAGSGVVSQMWIKGSKTDWMVMSRNWGASWQSNAYLNGQSLSFKVQTDDGRVVTADNVAPYNWWFGGTYTSWQQF

SEQ ID NO: 62359 - protein, 175 aa, Triticum aestivum
  peptide (1)..(175): Ceres Seq. ID no. 15173910
  misc_feature (83)..(160): Pfam Name: Pollen allergen Pfam Description: Pollen allergen
  misc_feature (1)..(175): Homolog of NCBI NO: 30697882 NR Description: expansin, putative (EXP1) [Arabidopsis thaliana]
  misc_feature (1)..(173): Homolog of NCBI NO: 11932092 NR Description: expansin [Cicer arietinum]
  misc_feature (1)..(175): Homolog of NCBI NO: 4027895 NR Description: alpha-expansin precursor [Nicotiana tabacum]
  misc_feature (1)..(171): Homolog of NCBI NO: 30519752 NR Description: expansin11 [Lycopersicon esculentum]
  misc_feature (1)..(175): Homolog of NCBI NO: 20149056 NR Description: putative expansin [Capsicum annuum]
  misc_feature (1)..(171): Homolog of NCBI NO: 34904668 NR Description: putative expansin [Oryza sativa (japonica
  misc_feature (1)..(175): Homolog of NCBI NO: 37999973 NR Description: expansin-2 [Musa acuminata]
  misc_feature (1)..(175): Homolog of NCBI NO: 9967926 NR Description: expansin [Schedonorus pratensis]
  misc_feature (1)..(175): Homolog of NCBI NO: 7489472 NR Description: expansin 3 - rice
  misc_feature (1)..(175): Homolog of NCBI NO: 34904664 NR Description: putative expansin [Oryza sativa (japonica
MCFTITCDASKTQSCKQGTSITITATNFCPPNYALASDNGGWCNPPRQHFDMSQPAWETIAVYQAGIVPVNYRRVPCQRSGGMRFTINGNDYFELVTVANVAGSGVVSQMWIKGSKTDWMVMSRNWGASWQSNAYLNGQSLSFKVQTDDGRVVTADNVAPYNWWFGGTYTSWQQF

SEQ ID NO: 62360 - DNA, 1403 bp, Triticum aestivum
  misc_feature (1)..(1403): Ceres Seq. ID no. 13596780
cgaaaaaaaatagatcatggcgacccctcagatctaccgcaaaaccctcctccccgtcctcctcctgctcgccgccgcggcgctctacccagccgccgccgacggcgacgaggtgctcgccctcacggagtccaccttcgagaaggaggtcggccaggatcgtggcgcgctcgtcgagttctacgctccctggtgtggccactgcaagaagcttgctccagaatatgagaagcttgctgcaagttttaaaaaggctaaatcagtcttgattgccaaggttgactgcgatgagcacaagagtgtgtgcagcaagtatggagtttctggctaccccacaatccagtggtttcccaaaggttccttggagcccaagaagtatgagggtcaacgcactgctgaagcccttacagaatatgttaactctgaagcagcaaccaatgtgaagatagcagcagttccttcaagtgttgtggttctgaccgaggaaacctttgactcagttgtccttgatgaaaccaaagatgtccttgttgagttctatgccccatggtgtggtcactgcaagagtcttgctccgatatatgagaaggtggcctctgttttcaagcaagatgagggtgtcgtgattgctaatcttgatgctgacaaatacacaagcttggctgagaagtatggagtttctggttttcccacattgaagttcttcccgaagggtaacaaagctggtgaagagtatgagagcggtcgggagttggatgactttgttaagttcattaatgagaaaagtggaactagccgtgattcgaagggtcagcttacttcagaggctgggcttgtggcaagtttggatgctcttgtcaaggaattccacagtgctgctgatgacaagcggaaggaaatcctctctaaaattgaagaggaggctgcgaagctcagtggtcctgctgtcaagcacggaaagatctatgtgaatgttgcaaagaagatattgcagaagggctctgactataccaagaaggaaactgagaggcttcatcgcttgttggagaagtcgatcagtccttccaaagccgatgaattcgccatcaagaagaacattctttcagccttctcctcttagtggtggtgacccacgtgccatagtcagtagtgcaacagtaccacctgccacaagagagaagtgaagaaagacaaagagagatagagatcagagagatggcagtgaaagtttagcggcgatagatttatcttattttggttcaatgttgaacaacatctgatatctgttttctctgccgtttacctttatggttacagggatttactttagcagtaaaagggtttactcaagaacaaacagtaccaactggtaatgacattaataaatttgccatttgtgtttg

SEQ ID NO: 62361 - protein, 367 aa, Triticum aestivum
  peptide (1)..(367): Ceres Seq. ID no. 13596781
  misc_feature (32)..(139): Pfam Name: Thioredoxin Pfam Description: Thioredoxin
  misc_feature (14)..(365): Homolog of NCBI NO: 11359594 NR Description: probable protein disulfide-isomerase (EC 5.3.4.1)
  misc_feature (12)..(365): Homolog of NCBI NO: 19114496 NR Description: putative protein disulfide isomerase (EC 5.3.4.1)
  misc_feature (173)..(367): Homolog of NCBI NO: 10180029 NR Description: putative protein disulfide-isomerase [Prunus
  misc_feature (9)..(367): Homolog of NCBI NO: 2627440 NR Description: protein disulfide isomerase; PDI; P5-like
  misc_feature (9)..(367): Homolog of NCBI NO: 28829383 NR Description: similar to Dictyostelium discoideum (Slime mold).
  misc_feature (18)..(366): Homolog of NCBI NO: 7489183 NR Description: probable protein disulfide-isomerase (EC 5.3.4.1)
  misc_feature (1)..(365): Homolog of NCBI NO: 15226610 NR Description: protein disulfide isomerase family [Arabidopsis
  misc_feature (15)..(366): Homolog of NCBI NO: 729442 NR Description: PROBABLE PROTEIN DISULFIDE ISOMERASE P5 PRECURSOR
  misc_feature (1)..(367): Homolog of NCBI NO: 34894982 NR Description: putative protein disulfide isomerase
  misc_feature (1)..(367): Homolog of NCBI NO: 34897646 NR Description: putative disulfide-isomerase precursor [Oryza
MATPQIYRKTLLPVLLLLAAAALYPAAADGDEVLALTESTFEKEVGQDRGALVEFYAPWCGHCKKLAPEYEKLAASFKKAKSVLIAKVDCDEHKSVCSKYGVSGYPTIQWFPKGSLEPKKYEGQRTAEALTEYVNSEAATNVKIAAVPSSVVVLTEETFDSVVLDETKDVLVEFYAPWCGHCKSLAPIYEKVASVFKQDEGVVIANLDADKYTSLAEKYGVSGFPTLKFFPKGNKAGEEYESGRELDDFVKFINEKSGTSRDSKGQLTSEAGLVASLDALVKEFHSAADDKRKEILSKIEEEAAKLSGPAVKHGKIYVNVAKKILQKGSDYTKKETERLHRLLEKSISPSKADEFAIKKNILSAFSS

SEQ ID NO: 62362 - DNA, 1394 bp, Triticum aestivum
  misc_feature (1)..(1394): Ceres Seq. ID no. 14301576
actcttctcgtaacttccacactcgtgtccctttctttcctccccgtcgcttccgcagatcaaaattcaaaaccctagcgaactcctccgcaagcacgtgatcgaccggccatggcttccgccctcggagcccaggtggctgccgtggcgccgattggttcggatggtcgccactacaggagttgttcttcgctcaagggtaataactcccgcaataagtcatggactggaaaattagcatgggaaaacaagaccctgcaaccaagacatacgaagaaggtcttttgtatgtccgtgcaacaagcaagcaaaagtaaatgtaaagttgctattaaacctctggaactggagaatacaaaggagccacccctcaacttgtacaaaccaaagggaccctacacagcctcaattgtctccgttgagagaattgtaggtcctaaagctcctggtgaaacatgtcacattgtcattgaccatggtggtaatgtcccatactgggaaggacaaagttatggtgtcattcctccaggagagaacccaaagaaacctggggccccaaataccgtccgactctattctattgcgtctactaggtatggcgattcttttgatggaaggactgctagtctttgtgtgcgccgtgctgtttattatgatcctgaaactggaaaagaagatccttcaaagaagggtatctgcagtaacttcttgtgtgactcaaaaccaggtgacaaaattcagatcacaggcccctcaggcaaaataatgcttctgcctgaggatgacccaaacgcaactcatatcatgattggaactggcacgggtgttgctcctttccgtggctacctacgtcgtatgttcatggaagatgtcccatctttcaagtttggtggtctggcttggctctttcttggtgttgccaatactgacagcctgctctatgacgaagagttcacaaactaccttcagcagtatccagaaaatttcaggtatgacaaagcactaagccgggagcagaaaaacaagagcggtggcaagatgtatgtgcaggacaggatcgaggagtacagtgatgaaatcttcaagcttttggatgatggtgcacacatctacttctgtggtttgaaggggatgatgctagggattcaggacacactcaagagagtagctgagcaaagaggtgagagttgggatcagaagctgtcacagctgaaaaagaacaagcaatggcacgtcgaggtttactaggttacaatggctgagattgttaattattgtttcccggggagatggaaaacagaaagataagtaggtcattctcttcccattgtaaaattgtcaatattattcatacgcgtgtgcgtcgcatgattaataaaacaatgtgcaattac

SEQ ID NO: 62363 - protein, 378 aa, Triticum aestivum
  peptide (1)..(378): Ceres Seq. ID no. 14301577
  misc_feature (227)..(348): Pfam Name: Oxidoreductase NAD-binding domain Pfam Description: Oxidoreductase NAD-binding domain
  misc_feature (1)..(378): Homolog of NCBI NO: 3913650 NR Description: Ferredoxin--NADP reductase, root-type isozyme,
  misc_feature (1)..(378): Homolog of NCBI NO: 21593597 NR Description: ferrodoxin NADP oxidoreductase, putative
  misc_feature (1)..(378): Homolog of NCBI NO: 18397542 NR Description: ferredoxin--NADP(+) reductase (adrenodoxin
  misc_feature (1)..(378): Homolog of NCBI NO: 30691910 NR Description: ferredoxin--NADP(+) reductase (adrenodoxin
  misc_feature (7)..(378): Homolog of NCBI NO: 7433380 NR Description: ferredoxin-NADP reductase (EC 1.18.1.2) - garden
  misc_feature (7)..(378): Homolog of NCBI NO: 3913648 NR Description: Ferredoxin--NADP reductase, root isozyme,
  misc_feature (60)..(378): Homolog of NCBI NO: 218163 NR Description: ferredoxin-NADP+ reductase enzyme
  misc_feature (56)..(378): Homolog of NCBI NO: 1076803 NR Description: ferredoxin-NADP reductase (EC 1.18.1.2)
  misc_feature (1)..(378): Homolog of NCBI NO: 34897132 NR Description: ferredoxin-NADP+ reductase [Oryza sativa]
  misc_feature (1)..(378): Homolog of NCBI NO: 3913653 NR Description: Ferredoxin--NADP reductase, embryo isozyme,
MASALGAQVAAVAPIGSDGRHYRSCSSLKGNNSRNKSWTGKLAWENKTLQPRHTKKVFCMSVQQASKSKCKVAIKPLELENTKEPPLNLYKPKGPYTASIVSVERIVGPKAPGETCHIVIDHGGNVPYWEGQSYGVIPPGENPKKPGAPNTVRLYSIASTRYGDSFDGRTASLCVRRAVYYDPETGKEDPSKKGICSNFLCDSKPGDKIQITGPSGKIMLLPEDDPNATHIMIGTGTGVAPFRGYLRRMFMEDVPSFKFGGLAWLFLGVANTDSLLYDEEFTNYLQQYPENFRYDKALSREQKNKSGGKMYVQDRIEEYSDEIFKLLDDGAHIYFCGLKGMMLGIQDTLKRVAEQRGESWDQKLSQLKKNKQWHVEVY

SEQ ID NO: 62364 - protein, 319 aa, Triticum aestivum
  peptide (1)..(319): Ceres Seq. ID no. 14301578
  misc_feature (168)..(289): Pfam Name: Oxidoreductase NAD-binding domain Pfam Description: Oxidoreductase NAD-binding domain
  misc_feature (1)..(319): Homolog of NCBI NO: 3913650 NR Description: Ferredoxin--NADP reductase, root-type isozyme,
  misc_feature (1)..(319): Homolog of NCBI NO: 21593597 NR Description: ferrodoxin NADP oxidoreductase, putative
  misc_feature (1)..(319): Homolog of NCBI NO: 18397542 NR Description: ferredoxin--NADP(+) reductase (adrenodoxin
  misc_feature (1)..(319): Homolog of NCBI NO: 30691910 NR Description: ferredoxin--NADP(+) reductase (adrenodoxin
  misc_feature (1)..(319): Homolog of NCBI NO: 7433380 NR Description: ferredoxin-NADP reductase (EC 1.18.1.2) - garden
  misc_feature (1)..(319): Homolog of NCBI NO: 3913648 NR Description: Ferredoxin--NADP reductase, root isozyme,
  misc_feature (1)..(319): Homolog of NCBI NO: 218163 NR Description: ferredoxin-NADP+ reductase enzyme
  misc_feature (1)..(319): Homolog of NCBI NO: 1076803 NR Description: ferredoxin-NADP reductase (EC 1.18.1.2)
  misc_feature (1)..(319): Homolog of NCBI NO: 34897132 NR Description: ferredoxin-NADP+ reductase [Oryza sativa]
  misc_feature (1)..(319): Homolog of NCBI NO: 3913653 NR Description: Ferredoxin--NADP reductase, embryo isozyme,
MSVQQASKSKCKVAIKPLELENTKEPPLNLYKPKGPYTASIVSVERIVGPKAPGETCHIVIDHGGNVPYWEGQSYGVIPPGENPKKPGAPNTVRLYSIASTRYGDSFDGRTASLCVRRAVYYDPETGKEDPSKKGICSNFLCDSKPGDKIQITGPSGKIMLLPEDDPNATHIMIGTGTGVAPFRGYLRRMFMEDVPSFKFGGLAWLFLGVANTDSLLYDEEFTNYLQQYPENFRYDKALSREQKNKSGGKMYVQDRIEEYSDEIFKLLDDGAHIYFCGLKGMMLGIQDTLKRVAEQRGESWDQKLSQLKKNKQWHVEVY

SEQ ID NO: 62365 - DNA, 1282 bp, Triticum aestivum
  misc_feature (1)..(1282): Ceres Seq. ID no. 14302303
aacccaaacggcacgcccaaacccaaagccaagtcgcactcctcctcctatcctcttcctcgccgaggcggcgaccggccagcgccgcagcagcaaccccggccgccgccagctccacctccaccgcccgcgcgtctccgattcggcgaatttggggctgaggaaagaggaggagcgacttctctctgctctggtggttgcaacttcaggacaaggttttgagcttttgtctgtttccctgggatggatgccaagaagttcctgcagatggtcgaagacaagaagaagagactccttgagaagaaggaagccccactgaaatggcagcagaaactggaagcggcaattaaggccactgaagagaaggagaagaagctcaagtcaaaaaagcacaggaggcgaagctattcttcctcagagtctgacagtgaatccgagagcgacagtgatcggaaacacaggaagaggaaggaccgcaaaaggcacaggaaacatggccactctgactctgatggtgccaggaggcgcaagcacaggtcaaagaggaggagcttggactctagtgatgagagcgacagtgatgaatatgatagcgaatctgaagaagagcgcccaaggaagaagcactcgcacaggaggaagcatcaccgacactctccaaggtcagagtctgatgcttcagattacagcagcgatgatgatgagcggagatcaaccaggaaggaccacacaaggagccgcaggcgtcgccaccgatcattagacgatgaatctgaggacaagatcaggtcgaggcataggaagcgtcacagatcaagtgacgaggacaagccatcagattctgacatccataagcgtcacaggagccgctctatgtccttggatgatggtgctgctggtgagccagacaagatgaatgatggtaaggggtctcacaaaagccggcaccaccgccgccatcaccatcaccatcatgatcaccatggcaactctgctgaacccagtgacgggaagcaactcgtgtaagttgttaatgcctcagaacctgattggcgtcatcactgggctctgtgacgggaaggtttgccccagttggctagttgctgaatgaaagcatgtatctttcataatgttactgtctcggctctgctgcgacttctgaagcctgtacttgttgtactgaaaaatttggcgacaccagatgttatttccagcatttcctctgttgagacatggcttggttgctgatttggtggttaaacatgcctgtttcatttgctgc

SEQ ID NO: 62366 - protein, 260 aa, Triticum aestivum
  peptide (1)..(260): Ceres Seq. ID no. 14302304
  misc_feature (19)..(229): Pfam Name: Caldesmon Pfam Description: Caldesmon
  misc_feature (2)..(223): Homolog of NCBI NO: 17558378 NR Description: putative protein, with 4 coiled coil-4 domains
  misc_feature (36)..(249): Homolog of NCBI NO: 25151613 NR Description: putative protein (80.3 kD) (5T676)
  misc_feature (36)..(247): Homolog of NCBI NO: 39580460 NR Description: Hypothetical protein CBG20540 [Caenorhabditis
  misc_feature (2)..(221): Homolog of NCBI NO: 17542856 NR Description: putative nuclear protein (4B983) [Caenorhabditis
  misc_feature (35)..(239): Homolog of NCBI NO: 18379151 NR Description: expressed protein [Arabidopsis thaliana]
  misc_feature (27)..(255): Homolog of NCBI NO: 12834839 NR Description: unnamed protein product [Mus musculus]
  misc_feature (2)..(228): Homolog of NCBI NO: 39594465 NR Description: Hypothetical protein CBG19125 [Caenorhabditis
  misc_feature (11)..(255): Homolog of NCBI NO: 39586156 NR Description: Hypothetical protein CBG15274 [Caenorhabditis
  misc_feature (1)..(238): Homolog of NCBI NO: 18379151 NR Description: expressed protein [Arabidopsis thaliana]
  misc_feature (1)..(258): Homolog of NCBI NO: 34895374 NR Description: P0698A04.25 [Oryza sativa (japonica
MDAKKFLQMVEDKKKRLLEKKEAPLKWQQKLEAAIKATEEKEKKLKSKKHRRRSYSSSESDSESESDSDRKHRKRKDRKRHRKHGHSDSDGARRRKHRSKRRSLDSSDESDSDEYDSESEEERPRKKHSHRRKHHRHSPRSESDASDYSSDDDERRSTRKDHTRSRRRRHRSLDDESEDKIRSRHRKRHRSSDEDKPSDSDIHKRHRSRSMSLDDGAAGEPDKMNDGKGSHKSRHHRRHHHHHHDHHGNSAEPSDGKQLV

SEQ ID NO: 62367 - protein, 252 aa, Triticum aestivum
  peptide (1)..(252): Ceres Seq. ID no. 14302305
  misc_feature (11)..(221): Pfam Name: Caldesmon Pfam Description: Caldesmon
  misc_feature (1)..(215): Homolog of NCBI NO: 17558378 NR Description: putative protein, with 4 coiled coil-4 domains
  misc_feature (28)..(241): Homolog of NCBI NO: 25151613 NR Description: putative protein (80.3 kD) (5T676)
  misc_feature (28)..(239): Homolog of NCBI NO: 39580460 NR Description: Hypothetical protein CBG20540 [Caenorhabditis
  misc_feature (1)..(213): Homolog of NCBI NO: 17542856 NR Description: putative nuclear protein (4B983) [Caenorhabditis
  misc_feature (27)..(231): Homolog of NCBI NO: 18379151 NR Description: expressed protein [Arabidopsis thaliana]
  misc_feature (19)..(247): Homolog of NCBI NO: 12834839 NR Description: unnamed protein product [Mus musculus]
  misc_feature (1)..(220): Homolog of NCBI NO: 39594465 NR Description: Hypothetical protein CBG19125 [Caenorhabditis
  misc_feature (3)..(247): Homolog of NCBI NO: 39586156 NR Description: Hypothetical protein CBG15274 [Caenorhabditis
  misc_feature (1)..(230): Homolog of NCBI NO: 18379151 NR Description: expressed protein [Arabidopsis thaliana]
  misc_feature (1)..(250): Homolog of NCBI NO: 34895374 NR Description: P0698A04.25 [Oryza sativa (japonica
MVEDKKKRLLEKKEAPLKWQQKLEAAIKATEEKEKKLKSKKHRRRSYSSSESDSESESDSDRKHRKRKDRKRHRKHGHSDSDGARRRKHRSKRRSLDSSDESDSDEYDSESEEERPRKKHSHRRKHHRHSPRSESDASDYSSDDDERRSTRKDHTRSRRRRHRSLDDESEDKIRSRHRKRHRSSDEDKPSDSDIHKRHRSRSMSLDDGAAGEPDKMNDGKGSHKSRHHRRHHHHHHDHHGNSAEPSDGKQLV

SEQ ID NO: 62368 - DNA, 1628 bp, Triticum aestivum
  misc_feature (1)..(1628): Ceres Seq. ID no. 13596921
aaagaaattctcgccccccaacccaacccccaaccaaccaaccaaacccaaccgaagaagccgagccgaaccccactccgccgatcagccgctatgcgctgaggccgaatcgccgcagcccgaggaggagaagggggtggaggggatggaggggagtggcgggtccgcgtcgctgccgccgttcctcaccaagacgtacgagatggtggacgagccggccacggacgcggtggtggcgtggacgccgtccggcaccagcttcgtcgtcctcagccaggccgacttctgccgggatcttctccccaagtacttcaagcacaacaacttctccagcttcgtgcgccagctcaacacctacggctttaggaaggtagatccagaacaatgggaatttgcaaatgaagaattcctacgagatcagcggcatcggttgaaaaatatccatagacgcaagccaatattcagccattcatcacacactcagggtgccggaccattagctgatagtgaaaggagggactatgaggaggaaattgagaggctcaagtgtgataatgcatcactaaatttacagcttgagaggaagaaaactgatatggagagtaaaatgaaggctttggaagacaaactatttgctattgaggatcagcagaaaaatcttatatcttatgtcagagaaattgtgaatgcacctggatttctttctagcttcgtagaacaatctgatcatcatggaaagaagaggagactgcctaaaccaatttcattccatgatgatgcttgtactcaggggaaccagattatgcattgtgacttggtcaactcaccagctcatgaactttttaggtcatcatttgacaaaatggaatcatccttaaattccttggagaatttcttcaaagaagcgagtgaggcatttggtaatgatgtttcatctgatggtgatgtcccaggtcattcttcagctgttgttcttacagagctccattcaactggggagagtgacccccacgcgcaatcacctccgtccatgatgcatacttgttcagctggtgtaggagattcacactcttctcgtgatatagcagagtccgccagctgtccagagagtcctctgcttccccaagctcattctcgtgcagattcacgagctaaggtctccgagatagatgtcaatttagaacctgctgttacagaaaatggtccatcgagagatcaacaacccacccaagaccttcctgctgacgcaaatgatggattttggcagcagtttcttaccgagcagcctgggttgacccatgcacaccaggaggcccaatcagaacggcgagacagagaagcaaatcaaacaacagcaggagaccgcggaagtttttggttggacaagagcagcatcgaacagatgacaaaaaaactggggcatctcacctcagctgagaaaacctgagtatgtatttctcatttcttgtagctgaaaatgaccagtacagaaacattaggaccatggcacctcccagtgaggtatgcctgctaacatttactttgcagtgtatcagaattgtgtgtgttagattgttgcagactatgtgctatatactaccttgatatacgttcatactttgttagcg

SEQ ID NO: 62369 - protein, 481 aa, Triticum aestivum
  peptide (1)..(481): Ceres Seq. ID no. 15222003
  misc_feature (59)..(227): Pfam Name: HSF-type DNA-binding Pfam Description: HSF-type DNA-binding
  misc_feature (42)..(481): Homolog of NCBI NO: 16580743 NR Description: spl7 protein [Oryza sativa]
  misc_feature (42)..(481): Homolog of NCBI NO: 16580739 NR Description: heat stress transcription factor Spl7
  misc_feature (360)..(481): Homolog of NCBI NO: 15234053 NR Description: heat shock transcription factor 21 [Arabidopsis
  misc_feature (360)..(481): Homolog of NCBI NO: 3399765 NR Description: heat shock transcription factor 21 [Arabidopsis
  misc_feature (55)..(343): Homolog of NCBI NO: 15234053 NR Description: heat shock transcription factor 21 [Arabidopsis
  misc_feature (55)..(343): Homolog of NCBI NO: 3399765 NR Description: heat shock transcription factor 21 [Arabidopsis
  misc_feature (358)..(481): Homolog of NCBI NO: 5821138 NR Description: heat shock factor [Nicotiana tabacum]
  misc_feature (50)..(306): Homolog of NCBI NO: 5821138 NR Description: heat shock factor [Nicotiana tabacum]
  misc_feature (54)..(318): Homolog of NCBI NO: 2130134 NR Description: heat shock transcription factor (clone hsfb) -
  misc_feature (49)..(481): Homolog of NCBI NO: 34909524 NR Description: putative heat shock factor
KKFSPPNPTPNQPTKPNRRSRAEPHSADQPLCAEAESPQPEEEKGVEGMEGSGGSASLPPFLTKTYEMVDEPATDAVVAWTPSGTSFVVLSQADFCRDLLPKYFKHNNFSSFVRQLNTYGFRKVDPEQWEFANEEFLRDQRHRLKNIHRRKPIFSHSSHTQGAGPLADSERRDYEEEIERLKCDNASLNLQLERKKTDMESKMKALEDKLFAIEDQQKNLISYVREIVNAPGFLSSFVEQSDHHGKKRRLPKPISFHDDACTQGNQIMHCDLVNSPAHELFRSSFDKMESSLNSLENFFKEASEAFGNDVSSDGDVPGHSSAVVLTELHSTGESDPHAQSPPSMMHTCSAGVGDSHSSRDIAESASCPESPLLPQAHSRADSRAKVSEIDVNLEPAVTENGPSRDQQPTQDLPADANDGFWQQFLTEQPGLTHAHQEAQSERRDREANQTTAGDRGSFWLDKSSIEQMTKKLGHLTSAEKT

SEQ ID NO: 62370 - protein, 433 aa, Triticum aestivum
  peptide (1)..(433): Ceres Seq. ID no. 15222004
  misc_feature (11)..(179): Pfam Name: HSF-type DNA-binding Pfam Description: HSF-type DNA-binding
  misc_feature (1)..(433): Homolog of NCBI NO: 16580743 NR Description: spl7 protein [Oryza sativa]
  misc_feature (1)..(433): Homolog of NCBI NO: 16580739 NR Description: heat stress transcription factor Spl7
  misc_feature (312)..(433): Homolog of NCBI NO: 15234053 NR Description: heat shock transcription factor 21 [Arabidopsis
  misc_feature (312)..(433): Homolog of NCBI NO: 3399765 NR Description: heat shock transcription factor 21 [Arabidopsis
  misc_feature (7)..(295): Homolog of NCBI NO: 15234053 NR Description: heat shock transcription factor 21 [Arabidopsis
  misc_feature (7)..(295): Homolog of NCBI NO: 3399765 NR Description: heat shock transcription factor 21 [Arabidopsis
  misc_feature (310)..(433): Homolog of NCBI NO: 5821138 NR Description: heat shock factor [Nicotiana tabacum]
  misc_feature (2)..(258): Homolog of NCBI NO: 5821138 NR Description: heat shock factor [Nicotiana tabacum]
  misc_feature (6)..(270): Homolog of NCBI NO: 2130134 NR Description: heat shock transcription factor (clone hsfb) -
  misc_feature (1)..(433): Homolog of NCBI NO: 34909524 NR Description: putative heat shock factor
MEGSGGSASLPPFLTKTYEMVDEPATDAVVAWTPSGTSFVVLSQADFCRDLLPKYFKHNNFSSFVRQLNTYGFRKVDPEQWEFANEEFLRDQRHRLKNIHRRKPIFSHSSHTQGAGPLADSERRDYEEEIERLKCDNASLNLQLERKKTDMESKMKALEDKLFAIEDQQKNLISYVREIVNAPGFLSSFVEQSDHHGKKRRLPKPISFHDDACTQGNQIMHCDLVNSPAHELFRSSFDKMESSLNSLENFFKEASEAFGNDVSSDGDVPGHSSAVVLTELHSTGESDPHAQSPPSMMHTCSAGVGDSHSSRDIAESASCPESPLLPQAHSRADSRAKVSEIDVNLEPAVTENGPSRDQQPTQDLPADANDGFWQQFLTEQPGLTHAHQEAQSERRDREANQTTAGDRGSFWLDKSSIEQMTKKLGHLTSAEKT

SEQ ID NO: 62371 - protein, 414 aa, Triticum aestivum
  peptide (1)..(414): Ceres Seq. ID no. 15222005
  misc_feature (1)..(160): Pfam Name: HSF-type DNA-binding Pfam Description: HSF-type DNA-binding
  misc_feature (1)..(414): Homolog of NCBI NO: 16580743 NR Description: spl7 protein [Oryza sativa]
  misc_feature (1)..(414): Homolog of NCBI NO: 16580739 NR Description: heat stress transcription factor Spl7
  misc_feature (293)..(414): Homolog of NCBI NO: 15234053 NR Description: heat shock transcription factor 21 [Arabidopsis
  misc_feature (293)..(414): Homolog of NCBI NO: 3399765 NR Description: heat shock transcription factor 21 [Arabidopsis
  misc_feature (1)..(276): Homolog of NCBI NO: 15234053 NR Description: heat shock transcription factor 21 [Arabidopsis
  misc_feature (1)..(276): Homolog of NCBI NO: 3399765 NR Description: heat shock transcription factor 21 [Arabidopsis
  misc_feature (291)..(414): Homolog of NCBI NO: 5821138 NR Description: heat shock factor [Nicotiana tabacum]
  misc_feature (1)..(239): Homolog of NCBI NO: 5821138 NR Description: heat shock factor [Nicotiana tabacum]
  misc_feature (1)..(251): Homolog of NCBI NO: 2130134 NR Description: heat shock transcription factor (clone hsfb) -
  misc_feature (1)..(414): Homolog of NCBI NO: 34909524 NR Description: putative heat shock factor
MVDEPATDAVVAWTPSGTSFVVLSQADFCRDLLPKYFKHNNFSSFVRQLNTYGFRKVDPEQWEFANEEFLRDQRHRLKNIHRRKPIFSHSSHTQGAGPLADSERRDYEEEIERLKCDNASLNLQLERKKTDMESKMKALEDKLFAIEDQQKNLISYVREIVNAPGFLSSFVEQSDHHGKKRRLPKPISFHDDACTQGNQIMHCDLVNSPAHELFRSSFDKMESSLNSLENFFKEASEAFGNDVSSDGDVPGHSSAVVLTELHSTGESDPHAQSPPSMMHTCSAGVGDSHSSRDIAESASCPESPLLPQAHSRADSRAKVSEIDVNLEPAVTENGPSRDQQPTQDLPADANDGFWQQFLTEQPGLTHAHQEAQSERRDREANQTTAGDRGSFWLDKSSIEQMTKKLGHLTSAEKT

SEQ ID NO: 62372 - DNA, 1488 bp, Triticum aestivum
  misc_feature (1)..(1488): Ceres Seq. ID no. 13596541
gtggattttttagcgtgcattccctcgaacgagctcagtagagccagcctcgccggtctaggctgaatcggtaatgtaaccaaccacgccctaaacgagcaggcggaaagggtggttcagttgcgttcgctcgattgatccaaaaaaaaaagttgcgttcgctcgatcgagcagcagggaaacaagccatggagagctcgccgcccaccatcaccgtccaggtgaagttcgccggccgaaccattccggtggaactcccgacatccgcctccaccgcggagctgaagctcctcctccagccgctaaccaacgttcttccccgcggccagaaactcatctgcaaaggaaaagttcttgccgacgccgcgagtctgagctcgatgcaggttggggacagatccaaggtcatgctcatcgcttcgcagggtcttcatcagggggaaggccccatcactaagaatagcagtggtcttgcagcaagtgcaaaaagaacctcaaatgttaaggataatcaaacactaaaaccggagattatcagcaaaagccgagcggagcgttggaaaataacaggtgtcattgctttatctggttccagcttgaaggcagtgcctgaggaagtctgggactgtggctcctccatacgagtactagatgtctgtaacaacttaattgaagcaattccacagaaaattgctgcccttaaatcattaaataaattgttgctaaccgccaatgacatatctgatgggggcatcagctgggaaggtctatcatgtgttgatacattaacagttttatctttaagccaaaatcgattggtcactttacctccgagtttgggcacattgacttttctacgtgaacttcgcattgcaaataacatgcttggcagcctacctgttgaaataggtttgctgaagcagctagagattcttatagcaaataataataggataacttcgctgccttcctctataggcgattgtgaatctctctttgaggtggacttatcatcaaatcttttagccgaactaccaaaggcttgcggaaaccttcacaatctgaagactctgcatctaaggaacaatggccttaattccctaccgccaactttattcaagaagtgctggcggcttactacacttgatctccatggcactggaatcacaaatgacattcttcgacagatggagggctgggaggagtttgatgaacgtaggcggcagaagtatcaaaagcagctggattttcgtgtgggatcatcaggtgttttcgacgagggtgcggatgatgataaccggcatgcataagtgtttcttattacagacagggttttgcgcttccaatattgtcccagaattattctagaattgaacacagacacggagctgatattattcctcacattttggttgtgtatttgtttattcctctcatttcattacattttagtgccaagtgatgaaaagtggtggctacctgttaaac

SEQ ID NO: 62373 - protein, 373 aa, Triticum aestivum
  peptide (1)..(373): Ceres Seq. ID no. 15221917
  misc_feature (8)..(80): Pfam Name: Ubiquitin family Pfam Description: Ubiquitin family
  misc_feature (149)..(350): Homolog of NCBI NO: 30349057 NR Description: Hypothetical protein Y42G9A.3b [Caenorhabditis
  misc_feature (132)..(327): Homolog of NCBI NO: 24216022 NR Description: Leucine-rich repeat containing protein
  misc_feature (120)..(316): Homolog of NCBI NO: 24215152 NR Description: Leucine-rich repeat containing protein
  misc_feature (104)..(328): Homolog of NCBI NO: 23050247 NR Description: hypothetical protein [Methanosarcina barkeri]
  misc_feature (129)..(321): Homolog of NCBI NO: 24215143 NR Description: putative outermembrane protein
  misc_feature (119)..(367): Homolog of NCBI NO: 22326653 NR Description: leucine rich repeat protein family [Arabidopsis
  misc_feature (119)..(371): Homolog of NCBI NO: 11357392 NR Description: hypothetical protein F13G24.110 - Arabidopsis
  misc_feature (1)..(367): Homolog of NCBI NO: 7445541 NR Description: hypothetical protein At2g30100 [imported] -
  misc_feature (1)..(367): Homolog of NCBI NO: 30684470 NR Description: unknown protein, leucine-rich repeat -related
  misc_feature (1)..(371): Homolog of NCBI NO: 37534990 NR Description: putative leucine-rich repeat protein
MESSPPTITVQVKFAGRTIPVELPTSASTAELKLLLQPLTNVLPRGQKLICKGKVLADAASLSSMQVGDRSKVMLIASQGLHQGEGPITKNSSGLAASAKRTSNVKDNQTLKPEIISKSRAERWKITGVIALSGSSLKAVPEEVWDCGSSIRVLDVCNNLIEAIPQKIAALKSLNKLLLTANDISDGGISWEGLSCVDTLTVLSLSQNRLVTLPPSLGTLTFLRELRIANNMLGSLPVEIGLLKQLEILIANNNRITSLPSSIGDCESLFEVDLSSNLLAELPKACGNLHNLKTLHLRNNGLNSLPPTLFKKCWRLTTLDLHGTGITNDILRQMEGWEEFDERRRQKYQKQLDFRVGSSGVFDEGADDDNRHA

SEQ ID NO: 62374 - protein, 309 aa, Triticum aestivum
  peptide (1)..(309): Ceres Seq. ID no. 15221918
  misc_feature (85)..(286): Homolog of NCBI NO: 30349057 NR Description: Hypothetical protein Y42G9A.3b [Caenorhabditis
  misc_feature (68)..(263): Homolog of NCBI NO: 24216022 NR Description: Leucine-rich repeat containing protein
  misc_feature (56)..(252): Homolog of NCBI NO: 24215152 NR Description: Leucine-rich repeat containing protein
  misc_feature (40)..(264): Homolog of NCBI NO: 23050247 NR Description: hypothetical protein [Methanosarcina barkeri]
  misc_feature (65)..(257): Homolog of NCBI NO: 24215143 NR Description: putative outermembrane protein
  misc_feature (55)..(303): Homolog of NCBI NO: 22326653 NR Description: leucine rich repeat protein family [Arabidopsis
  misc_feature (55)..(307): Homolog of NCBI NO: 11357392 NR Description: hypothetical protein F13G24.110 - Arabidopsis
  misc_feature (1)..(303): Homolog of NCBI NO: 7445541 NR Description: hypothetical protein At2g30100 [imported] -
  misc_feature (1)..(303): Homolog of NCBI NO: 30684470 NR Description: unknown protein, leucine-rich repeat -related
  misc_feature (1)..(307): Homolog of NCBI NO: 37534990 NR Description: putative leucine-rich repeat protein
MQVGDRSKVMLIASQGLHQGEGPITKNSSGLAASAKRTSNVKDNQTLKPEIISKSRAERWKITGVIALSGSSLKAVPEEVWDCGSSIRVLDVCNNLIEAIPQKIAALKSLNKLLLTANDISDGGISWEGLSCVDTLTVLSLSQNRLVTLPPSLGTLTFLRELRIANNMLGSLPVEIGLLKQLEILIANNNRITSLPSSIGDCESLFEVDLSSNLLAELPKACGNLHNLKTLHLRNNGLNSLPPTLFKKCWRLTTLDLHGTGITNDILRQMEGWEEFDERRRQKYQKQLDFRVGSSGVFDEGADDDNRHA

SEQ ID NO: 62375 - protein, 300 aa, Triticum aestivum
  peptide (1)..(300): Ceres Seq. ID no. 15221919
  misc_feature (76)..(277): Homolog of NCBI NO: 30349057 NR Description: Hypothetical protein Y42G9A.3b [Caenorhabditis
  misc_feature (59)..(254): Homolog of NCBI NO: 24216022 NR Description: Leucine-rich repeat containing protein
  misc_feature (47)..(243): Homolog of NCBI NO: 24215152 NR Description: Leucine-rich repeat containing protein
  misc_feature (31)..(255): Homolog of NCBI NO: 23050247 NR Description: hypothetical protein [Methanosarcina barkeri]
  misc_feature (56)..(248): Homolog of NCBI NO: 24215143 NR Description: putative outermembrane protein
  misc_feature (46)..(294): Homolog of NCBI NO: 22326653 NR Description: leucine rich repeat protein family [Arabidopsis
  misc_feature (46)..(298): Homolog of NCBI NO: 11357392 NR Description: hypothetical protein F13G24.110 - Arabidopsis
  misc_feature (1)..(294): Homolog of NCBI NO: 7445541 NR Description: hypothetical protein At2g30100 [imported] -
  misc_feature (1)..(294): Homolog of NCBI NO: 30684470 NR Description: unknown protein, leucine-rich repeat -related
  misc_feature (1)..(298): Homolog of NCBI NO: 37534990 NR Description: putative leucine-rich repeat protein
MLIASQGLHQGEGPITKNSSGLAASAKRTSNVKDNQTLKPEIISKSRAERWKITGVIALSGSSLKAVPEEVWDCGSSIRVLDVCNNLIEAIPQKIAALKSLNKLLLTANDISDGGISWEGLSCVDTLTVLSLSQNRLVTLPPSLGTLTFLRELRIANNMLGSLPVEIGLLKQLEILIANNNRITSLPSSIGDCESLFEVDLSSNLLAELPKACGNLHNLKTLHLRNNGLNSLPPTLFKKCWRLTTLDLHGTGITNDILRQMEGWEEFDERRRQKYQKQLDFRVGSSGVFDEGADDDNRHA

SEQ ID NO: 62376 - DNA, 1020 bp, Triticum aestivum
  misc_feature (1)..(1020): Ceres Seq. ID no. 15175438
agctcaccaccaccttcactctccatgctcgcagcaagccagctagctcctcgcctcctctcgtcacactactactagcagcttctcttctcttctctttaagtaacagagagcccaagctaggtgacactagagcgtctcaagcacccgcgccatggccacctccaccttctcgctcttcttcccgccgctgcccagcagcaaaggccagtggccgtctgtagaggaggctgcctactcctacgatgaccacagctccgtcaccaccctctccccttcctccccggcctcctctgcttcctcgggatccctggtggactgcacgctctccctcggcacgccgtcgacgcgccgccccgagccagaccgtactaggcacggggctccgccgcaggcctacccgtccgtgtctgccggggccgagccctgctactaccaccagcagcagggcaggggcggcgccgccgggcacgagcagctcctggaccgccgctgcgccaactgcggcacggcgtccacgccgctctggcggaacggccctcgcggacccaagtccctctgcaacgcctgcggcatcaggttcaagaaggaggagcgccgcgcggcggagaccaatgccggcggcgggtgcggctacgtcgcgcagcgggcgcacgtgtcggcccctcgtgccgtgccgtacgcggaggaggcgcttccttacgccggcgccgtcgacgcgcccttcctggcgtggcggctgaacggcgtcccgccggccccggcgttctcgtcgtggcccgacaggcagcacggcgtgtaccagtacaactagctagtagtactagtgagtagtacgtgtaggtacgtgttagggcatggaacgcggttggtgggcgctgcaacgtttttttggggatcttgttggggacgtacggttgcacgcggccggtgggatatgcatgtgcagtagtagcactgtattttgtctgacattatcgttgagcaagcctgccaaacatatgaattatgaagtagtac

SEQ ID NO: 62377 - protein, 219 aa, Triticum aestivum
  peptide (1)..(219): Ceres Seq. ID no. 15175439
  misc_feature (98)..(154): Homolog of NCBI NO: 15232346 NR Description: GATA zinc finger protein [Arabidopsis thaliana]
  misc_feature (112)..(158): Homolog of NCBI NO: 34897256 NR Description: putative zinc finger protein
  misc_feature (77)..(162): Homolog of NCBI NO: 18409199 NR Description: GATA zinc finger protein [Arabidopsis thaliana]
  misc_feature (77)..(162): Homolog of NCBI NO: 7488381 NR Description: transcription factor homolog F18B3.150 -
  misc_feature (77)..(157): Homolog of NCBI NO: 21555178 NR Description: transcription factor-like protein [Arabidopsis
  misc_feature (44)..(158): Homolog of NCBI NO: 15224164 NR Description: GATA zinc finger protein [Arabidopsis thaliana]
  misc_feature (51)..(218): Homolog of NCBI NO: 34912080 NR Description: P0671D01.19 [Oryza sativa (japonica
  misc_feature (40)..(158): Homolog of NCBI NO: 15234463 NR Description: GATA zinc finger protein [Arabidopsis thaliana]
  misc_feature (133)..(183): Homolog of NCBI NO: 5091599 NR Description: 10A19I.2 [Oryza sativa]
  misc_feature (1)..(133): Homolog of NCBI NO: 5091599 NR Description: 10A19I.2 [Oryza sativa]
MATSTFSLFFPPLPSSKGQWPSVEEAAYSYDDHSSVTTLSPSSPASSASSGSLVDCTLSLGTPSTRRPEPDRTRHGAPPQAYPSVSAGAEPCYYHQQQGRGGAAGHEQLLDRRCANCGTASTPLWRNGPRGPKSLCNACGIRFKKEERRAAETNAGGGCGYVAQRAHVSAPRAVPYAEEALPYAGAVDAPFLAWRLNGVPPAPAFSSWPDRQHGVYQYN

SEQ ID NO: 62378 - protein, 165 aa, Triticum aestivum
  peptide (1)..(165): Ceres Seq. ID no. 15175440
  misc_feature (1)..(160): Pfam Name: Formin Homology 2 Domain Pfam Description: Formin Homology 2 Domain
  misc_feature (1)..(165): Homolog of NCBI NO: 28493118 NR Description: unknown [Tropheryma whipplei str. Twist]
  misc_feature (1)..(165): Homolog of NCBI NO: 5821143 NR Description: RNA binding protein [Homo sapiens]
  misc_feature (1)..(158): Homolog of NCBI NO: 23105033 NR Description: hypothetical protein [Azotobacter vinelandii]
  misc_feature (1)..(165): Homolog of NCBI NO: 5821145 NR Description: RNA binding protein [Homo sapiens]
  misc_feature (1)..(165): Homolog of NCBI NO: 33865132 NR Description: possible N-terminal part of IF-2 [Synechococcus
  misc_feature (1)..(165): Homolog of NCBI NO: 27375632 NR Description: blr0521 [Bradyrhizobium japonicum]
  misc_feature (1)..(165): Homolog of NCBI NO: 27375632 NR Description: blr0521 [Bradyrhizobium japonicum]
  misc_feature (1)..(165): Homolog of NCBI NO: 29828765 NR Description: putative protoporphyrinogen oxidase
  misc_feature (1)..(156): Homolog of NCBI NO: 25143299 NR Description: pre-mRNA splicing SR protein related (68.2 kD)
  misc_feature (1)..(110): Homolog of NCBI NO: 2429362 NR Description: proline rich protein [Santalum album]
MTTAPSPPSPLPPRPPLLPRDPWWTARSPSARRRRAAPSQTVLGTGLRRRPTRPCLPGPSPATTTSSRAGAAPPGTSSSWTAAAPTAARRPRRSGGTALADPSPSATPAASGSRRRSAARRRPMPAAGAATSRSGRTCRPLVPCRTRRRRFLTPAPSTRPSWRGG

SEQ ID NO: 62379 - DNA, 1126 bp, Triticum aestivum
  misc_feature (1)..(1126): Ceres Seq. ID no. 12625302
acactcgcacccgcactcccatccgccggccgcgccatggcgtcgggggtgtccacgagcatggtgctcacgctgctcggcttctgcgtcagcgtcctcttcatagtcttcgtctgctccaggctcgtctgcgcgctcgtgcgccgccgccgccgccgctcccgcgcctcggcgctcccgccgggcttcccgcccctcgccgccaactacttcttcgccgtccaggtcgacggcctgggagctcaggccgcggctggcccctgtgccggggggctggacctggccgccgtcgcctccttccccacccgcgccttcgcagctgctgcctcctccgactccgactcctcagacgcggccccgcagtgtgttgtctgtcttgcagaatacgaggacaaagatgtgctccgcactcttccttactgtggccacaatttccatatggtgtgcatagatgcttggctaaagcagcactcaacatgcccagtctgtagaatttcactgtctgactatcctgatagcaagcaaattgcgcctcctttaccaagtgcagtggtgatacctatacctatacctccttattcccctgaagcatcaatatcggatccgtgccattgcctgtttgtcggcacgggccattcgtcaagggcatcagaggttcttcagaacgaacccgaccaggcgaatcggacagtacccggtccatccttggatgggccagacgacttgacgttgtctgaggttacctctcctggcgaaataacaagcaaacagtaaaacagcacatggagagtcctcgtgtactcagcaggtcgtgatctccccagctaagctccggcaagtagctgtttggagtttcttttgtgaacaacctgtaaacttggaaacatctgcccatgtgggtgaacggatgtctgttatagattagatttccgcgggtccgatgtaaatatgagaaatctttgggtttcttgtcgaaaagccacatttgctcgataatttgactgaaaacagtccattgtatccatctatggtagcccacagagaattgttgtaggaacatcatcatcagtgcatgtaccaattcaaacagctacaaacatattgattgagatgactgttttaatgc

SEQ ID NO: 62380 - protein, 257 aa, Triticum aestivum
  peptide (1)..(257): Ceres Seq. ID no. 12625303
  misc_feature (122)..(163): Pfam Name: Zinc finger, C3HC4 type (RING finger) Pfam Description: Zinc finger, C3HC4 type (RING finger)
  misc_feature (30)..(167): Homolog of NCBI NO: 34907968 NR Description: P0446G04.15 [Oryza sativa (japonica
  misc_feature (4)..(196): Homolog of NCBI NO: 15233144 NR Description: putative protein
  misc_feature (7)..(171): Homolog of NCBI NO: 37537088 NR Description: putative zinc finger protein
  misc_feature (4)..(168): Homolog of NCBI NO: 8698835 NR Description: RING finger 1 [Oryza sativa (japonica
  misc_feature (80)..(196): Homolog of NCBI NO: 34909314 NR Description: OSJNBb0021A09.3 [Oryza sativa (japonica
  misc_feature (15)..(215): Homolog of NCBI NO: 30017522 NR Description: putative ring-H2 zinc finger protein
  misc_feature (3)..(216): Homolog of NCBI NO: 8698833 NR Description: EL5 [Oryza sativa (japonica cultivar-group)]
  misc_feature (2)..(196): Homolog of NCBI NO: 15225932 NR Description: hypothetical protein
  misc_feature (13)..(240): Homolog of NCBI NO: 34906738 NR Description: similar to ring-H2 zinc finger protein
  misc_feature (16)..(214): Homolog of NCBI NO: 38567907 NR Description: OSJNBa0088I22.3 [Oryza sativa (japonica
TLAPALPSAGRAMASGVSTSMVLTLLGFCVSVLFIVFVCSRLVCALVRRRRRRSRASALPPGFPPLAANYFFAVQVDGLGAQAAAGPCAGGLDLAAVASFPTRAFAAAASSDSDSSDAAPQCVVCLAEYEDKDVLRTLPYCGHNFHMVCIDAWLKQHSTCPVCRISLSDYPDSKQIAPPLPSAVVIPIPIPPYSPEASISDPCHCLFVGTGHSSRASEVLQNEPDQANRTVPGPSLDGPDDLTLSEVTSPGEITSKQ

SEQ ID NO: 62381 - protein, 245 aa, Triticum aestivum
  peptide (1)..(245): Ceres Seq. ID no. 12625304
  misc_feature (110)..(151): Pfam Name: Zinc finger, C3HC4 type (RING finger) Pfam Description: Zinc finger, C3HC4 type (RING finger)
  misc_feature (18)..(155): Homolog of NCBI NO: 34907968 NR Description: P0446G04.15 [Oryza sativa (japonica
  misc_feature (1)..(184): Homolog of NCBI NO: 15233144 NR Description: putative protein
  misc_feature (1)..(159): Homolog of NCBI NO: 37537088 NR Description: putative zinc finger protein
  misc_feature (1)..(156): Homolog of NCBI NO: 8698835 NR Description: RING finger 1 [Oryza sativa (japonica
  misc_feature (68)..(184): Homolog of NCBI NO: 34909314 NR Description: OSJNBb0021A09.3 [Oryza sativa (japonica
  misc_feature (3)..(203): Homolog of NCBI NO: 30017522 NR Description: putative ring-H2 zinc finger protein
  misc_feature (1)..(204): Homolog of NCBI NO: 8698833 NR Description: EL5 [Oryza sativa (japonica cultivar-group)]
  misc_feature (1)..(184): Homolog of NCBI NO: 15225932 NR Description: hypothetical protein
  misc_feature (1)..(228): Homolog of NCBI NO: 34906738 NR Description: similar to ring-H2 zinc finger protein
  misc_feature (4)..(202): Homolog of NCBI NO: 38567907 NR Description: OSJNBa0088I22.3 [Oryza sativa (japonica
MASGVSTSMVLTLLGFCVSVLFIVFVCSRLVCALVRRRRRRSRASALPPGFPPLAANYFFAVQVDGLGAQAAAGPCAGGLDLAAVASFPTRAFAAAASSDSDSSDAAPQCVVCLAEYEDKDVLRTLPYCGHNFHMVCIDAWLKQHSTCPVCRISLSDYPDSKQIAPPLPSAVVIPIPIPPYSPEASISDPCHCLFVGTGHSSRASEVLQNEPDQANRTVPGPSLDGPDDLTLSEVTSPGEITSKQ

SEQ ID NO: 62382 - protein, 237 aa, Triticum aestivum
  peptide (1)..(237): Ceres Seq. ID no. 12625305
  misc_feature (102)..(143): Pfam Name: Zinc finger, C3HC4 type (RING finger) Pfam Description: Zinc finger, C3HC4 type (RING finger)
  misc_feature (10)..(147): Homolog of NCBI NO: 34907968 NR Description: P0446G04.15 [Oryza sativa (japonica
  misc_feature (1)..(176): Homolog of NCBI NO: 15233144 NR Description: putative protein
  misc_feature (1)..(151): Homolog of NCBI NO: 37537088 NR Description: putative zinc finger protein
  misc_feature (1)..(148): Homolog of NCBI NO: 8698835 NR Description: RING finger 1 [Oryza sativa (japonica
  misc_feature (60)..(176): Homolog of NCBI NO: 34909314 NR Description: OSJNBb0021A09.3 [Oryza sativa (japonica
  misc_feature (1)..(195): Homolog of NCBI NO: 30017522 NR Description: putative ring-H2 zinc finger protein
  misc_feature (1)..(196): Homolog of NCBI NO: 8698833 NR Description: EL5 [Oryza sativa (japonica cultivar-group)]
  misc_feature (1)..(176): Homolog of NCBI NO: 15225932 NR Description: hypothetical protein
  misc_feature (1)..(220): Homolog of NCBI NO: 34906738 NR Description: similar to ring-H2 zinc finger protein
  misc_feature (1)..(194): Homolog of NCBI NO: 38567907 NR Description: OSJNBa0088I22.3 [Oryza sativa (japonica
MVLTLLGFCVSVLFIVFVCSRLVCALVRRRRRRSRASALPPGFPPLAANYFFAVQVDGLGAQAAAGPCAGGLDLAAVASFPTRAFAAAASSDSDSSDAAPQCVVCLAEYEDKDVLRTLPYCGHNFHMVCIDAWLKQHSTCPVCRISLSDYPDSKQIAPPLPSAVVIPIPIPPYSPEASISDPCHCLFVGTGHSSRASEVLQNEPDQANRTVPGPSLDGPDDLTLSEVTSPGEITSKQ

SEQ ID NO: 62383 - DNA, 1260 bp, Triticum aestivum
  misc_feature (1)..(1260): Ceres Seq. ID no. 12615264
gttgacagacttctttccttttgggctggttgtggttgatgggcatctatttgttgttgtgcggttcgtttgcttgccttttgagcccacacaataagaagaaccccaccccctcaaaaaaagaaggggacaaaggagaagaaccctaggcggctctctgtgactcaaacccccgcagcccggcgccggcgcgaagcgaagggagaagaaggcatggggcggccgtacgcagtgaaggggaagaagaagcggaagctggaaggcggcgaagcctcgcgcgcccctccggtcgacgccgaggcggtggatgaagaggtgaaggaaaatgaggaggtgatggagggggaggcggcggcagaggaggcttttgcccgaggaggtgggggaggggatccccatcgtgccccgcccggtcgacagtaagcggcggccgggcgctatcttcgtacttgagagggcctgcctcgaggtcggcaaagtcggcaagggtatgcaaatcttgaatttggatgatcacgcaaattatttaaggaagcagaatcgcaatccagctgattacaggcctgatatcattcaccaggcactactagcaatatttgatagccctctaactaaggctgggaggttacaagctgtttatgttaggactgaaaagggagtgttgtttgaaatcaagcctcatgttcgcatgccacggacgttcaaacgtttctgtggcttgatgtcacagttattgcaaaagctgagcatcacggcagttgggaagcgtgagaagctccttaatgttattaaaaatcctgttacccagtatctacctgttggcgtacggaaaattggcctttcatatagtgcggagaaggcagttaatttgtttgactatgttgctaagtccaatgatgatgaacctcttgtgtttgtggttggtgccatggcccatggaaaggttgacaaggaatactcagatgattacatacagattagcggttaccctctcagtgctgcctgctgcctgaatcgaatatgcagtgccttggagcagaaatggaacatccagtgaagggaagtttgaaaacgaacattacatctttgtgatcagatttttatgtactcattagcgctcatagtattgttgtgccttttcatgtcttatgtctacagtattagttttgtcgagacatgaatcactggctgtaaaagtattaacactgaatgtttcaagtgcttatgctccttgcagttgtcatttttggtgaaatttgc

SEQ ID NO: 62384 - protein, 188 aa, Triticum aestivum
  peptide (1)..(188): Ceres Seq. ID no. 12615265
  misc_feature (17)..(181): Pfam Name: Suppressor Mra1 Pfam Description: Suppressor Mra1
  misc_feature (1)..(187): Homolog of NCBI NO: 39591849 NR Description: Hypothetical protein CBG18338 [Caenorhabditis
  misc_feature (1)..(187): Homolog of NCBI NO: 31652262 NR Description: C2f protein [Homo sapiens]
  misc_feature (1)..(187): Homolog of NCBI NO: 2276396 NR Description: C2f [Homo sapiens]
  misc_feature (1)..(187): Homolog of NCBI NO: 24639698 NR Description: CG3527-PA [Drosophila melanogaster]
  misc_feature (1)..(187): Homolog of NCBI NO: 17555712 NR Description: Nucleolar Essential protein 1 (25.8 kD)
  misc_feature (1)..(187): Homolog of NCBI NO: 7305109 NR Description: gene rich cluster, C2f gene [Mus musculus]
  misc_feature (1)..(187): Homolog of NCBI NO: 27713326 NR Description: similar to gene rich cluster, C2f gene
  misc_feature (1)..(187): Homolog of NCBI NO: 31206307 NR Description: ENSANGP00000016225 [Anopheles gambiae]
  misc_feature (1)..(187): Homolog of NCBI NO: 21593563 NR Description: unknown [Arabidopsis thaliana]
  misc_feature (1)..(187): Homolog of NCBI NO: 15230180 NR Description: putative protein
MQILNLDDHANYLRKQNRNPADYRPDIIHQALLAIFDSPLTKAGRLQAVYVRTEKGVLFEIKPHVRMPRTFKRFCGLMSQLLQKLSITAVGKREKLLNVIKNPVTQYLPVGVRKIGLSYSAEKAVNLFDYVAKSNDDEPLVFVVGAMAHGKVDKEYSDDYIQISGYPLSAACCLNRICSALEQKWNIQ

SEQ ID NO: 62385 - protein, 122 aa, Triticum aestivum
  peptide (1)..(122): Ceres Seq. ID no. 12615266
  misc_feature (1)..(115): Pfam Name: Suppressor Mra1 Pfam Description: Suppressor Mra1
  misc_feature (1)..(121): Homolog of NCBI NO: 39591849 NR Description: Hypothetical protein CBG18338 [Caenorhabditis
  misc_feature (1)..(121): Homolog of NCBI NO: 31652262 NR Description: C2f protein [Homo sapiens]
  misc_feature (1)..(121): Homolog of NCBI NO: 2276396 NR Description: C2f [Homo sapiens]
  misc_feature (1)..(121): Homolog of NCBI NO: 24639698 NR Description: CG3527-PA [Drosophila melanogaster]
  misc_feature (1)..(121): Homolog of NCBI NO: 17555712 NR Description: Nucleolar Essential protein 1 (25.8 kD)
  misc_feature (1)..(121): Homolog of NCBI NO: 7305109 NR Description: gene rich cluster, C2f gene [Mus musculus]
  misc_feature (1)..(121): Homolog of NCBI NO: 27713326 NR Description: similar to gene rich cluster, C2f gene
  misc_feature (1)..(121): Homolog of NCBI NO: 31206307 NR Description: ENSANGP00000016225 [Anopheles gambiae]
  misc_feature (1)..(121): Homolog of NCBI NO: 21593563 NR Description: unknown [Arabidopsis thaliana]
  misc_feature (1)..(121): Homolog of NCBI NO: 15230180 NR Description: putative protein
MPRTFKRFCGLMSQLLQKLSITAVGKREKLLNVIKNPVTQYLPVGVRKIGLSYSAEKAVNLFDYVAKSNDDEPLVFVVGAMAHGKVDKEYSDDYIQISGYPLSAACCLNRICSALEQKWNIQ

SEQ ID NO: 62386 - protein, 111 aa, Triticum aestivum
  peptide (1)..(111): Ceres Seq. ID no. 12615267
  misc_feature (1)..(104): Pfam Name: Suppressor Mra1 Pfam Description: Suppressor Mra1
  misc_feature (1)..(110): Homolog of NCBI NO: 39591849 NR Description: Hypothetical protein CBG18338 [Caenorhabditis
  misc_feature (1)..(110): Homolog of NCBI NO: 31652262 NR Description: C2f protein [Homo sapiens]
  misc_feature (1)..(110): Homolog of NCBI NO: 2276396 NR Description: C2f [Homo sapiens]
  misc_feature (1)..(110): Homolog of NCBI NO: 24639698 NR Description: CG3527-PA [Drosophila melanogaster]
  misc_feature (1)..(110): Homolog of NCBI NO: 17555712 NR Description: Nucleolar Essential protein 1 (25.8 kD)
  misc_feature (1)..(110): Homolog of NCBI NO: 7305109 NR Description: gene rich cluster, C2f gene [Mus musculus]
  misc_feature (1)..(110): Homolog of NCBI NO: 27713326 NR Description: similar to gene rich cluster, C2f gene
  misc_feature (1)..(110): Homolog of NCBI NO: 31206307 NR Description: ENSANGP00000016225 [Anopheles gambiae]
  misc_feature (1)..(110): Homolog of NCBI NO: 21593563 NR Description: unknown [Arabidopsis thaliana]
  misc_feature (1)..(110): Homolog of NCBI NO: 15230180 NR Description: putative protein
MSQLLQKLSITAVGKREKLLNVIKNPVTQYLPVGVRKIGLSYSAEKAVNLFDYVAKSNDDEPLVFVVGAMAHGKVDKEYSDDYIQISGYPLSAACCLNRICSALEQKWNIQ

SEQ ID NO: 62387 - DNA, 1336 bp, Triticum aestivum
  misc_feature (1)..(1336): Ceres Seq. ID no. 12625306
ccccctcctccccgtcttcccccctcagatctccggcgaccccccggcgaatcggcgccatgtcagggcagagccagcgcctgaacgtggtgccgacggtgacgatgctgggggtggtgaaggcgcggctgatcggcgcgacgcggggccacgcgctgctcaagaagaagtcggacgcgctcacggtgcagttccgcgccatcctcaagaagatcgtcgccaccaaggagtccatgggcgaggccatgcgcgcctcctccttctcgctcgccgaggccaagtacgtggccggcgacggcgtgcgccacgtcgtgctccagtccgtccgctccgcctcgctccgcgtccgctcccaccaggagaacgtcgccggggtcaagctgcccaagttcacccacttcgtcgaccccgccggcgcctcctccggcgggccctccggcgcctcccccagcctcaccggcctcgcccgcggggggcagcaggtctctgcctgccgcgccgcccacgtcaaggccatcgaggtgctcgtcgagctcgcctcgctccagacctccttcctcaccctcgacgaggccatcaagaccaccaaccgccgcgtcaacgccctcgagaacgtcgtcaagcccaggctcgagaacaccatcacctacatcaagggcgagctcgacgagctcgagcgcgaggacttcttccggctcaagaagatccagggatacaagaggagggaggtcgagcgccagatggccgcggccaagctcttcgccgaggagcagctcgccgaggatctcgccctcaagaggggcgtctccatcgggggcgccaccaacatactcgtcggcggcggagacaaggacgaagacatcatcttctgatccccacccctgctatccaattgttcaatcgtggtggaaacaataagttctggtgctggagccccagaatgacatctgtttatagagtggcggaggtttttgtttcaggctgtgtgcaacctgaattatggccatccaagacccaaaataatctctctctgtgtacttttgggaaccaaacattgctggtgaaactagtggctatgtgcagtagtaaaaattcttttgtaccgtattactgtatttcatttccctgcacgctcgttttagttgcatatttattcagacattgtgtatctggatttcggcatgcttcgctgtgaacctgctctgctgcagacttgtatccttctttttggccgtgtattctggggcatctactctattcttttctcaacttttcctggaggaaatagatgatgtgtgataacatggcaccaagataaatattaaattctgaactc

SEQ ID NO: 62388 - protein, 397 aa, Triticum aestivum
  peptide (1)..(397): Ceres Seq. ID no. 12625307
PLLPVFPPQISGDPPANRRHVRAEPAPERGADGDDAGGGEGAADRRDAGPRAAQEEVGRAHGAVPRHPQEDRRHQGVHGRGHARLLLLARRGQVRGRRRRAPRRAPVRPLRLAPRPLPPGERRRGQAAQVHPLRRPRRRLLRRALRRLPQPHRPRPRGAAGLCLPRRPRQGHRGARRARLAPDLLPHPRRGHQDHQPPRQRPRERRQAQAREHHHLHQGRARRARARGLLPAQEDPGIQEEGGRAPDGRGQALRRGAARRGSRPQEGRLHRGRHQHTRRRRRQGRRHHLLIPTPAIQLFNRGGNNKFWCWSPRMTSVYRVAEVFVSGCVQPELWPSKTQNNLSLCTFGNQTLLVKLVAMCSSKNSFVPYYCISFPCTLVLVAYLFRHCVSGFRHASL

SEQ ID NO: 62389 - protein, 289 aa, Triticum aestivum
  peptide (1)..(289): Ceres Seq. ID no. 12625308
  misc_feature (34)..(241): Pfam Name: ATP synthase subunit D Pfam Description: ATP synthase subunit D
  misc_feature (20)..(289): Homolog of NCBI NO: 7706757 NR Description: ATPase, H+ transporting, lysosomal 34kD, V1
  misc_feature (20)..(289): Homolog of NCBI NO: 5138993 NR Description: vacuolar H-ATPase subunit D [Homo sapiens]
  misc_feature (20)..(262): Homolog of NCBI NO: 40786463 NR Description: ATPase, H+ transporting, lysosomal 34kDa, V1
  misc_feature (20)..(262): Homolog of NCBI NO: 12963799 NR Description: ATPase, H+ transporting, V1 subunit D
  misc_feature (20)..(289): Homolog of NCBI NO: 21355551 NR Description: CG8186-PA [Drosophila melanogaster]
  misc_feature (20)..(248): Homolog of NCBI NO: 28829327 NR Description: similar to Homo sapiens (Human). Vacuolar proton
  misc_feature (20)..(289): Homolog of NCBI NO: 28278870 NR Description: Similar to ATPase, H+ transporting, lysosomal
  misc_feature (20)..(289): Homolog of NCBI NO: 15231126 NR Description: v-ATPase subunit D (vATPD)
  misc_feature (20)..(289): Homolog of NCBI NO: 25529226 NR Description: H+-transporting two-sector ATPase (EC 3.6.3.14)
  misc_feature (20)..(289): Homolog of NCBI NO: 38344879 NR Description: OSJNBa0033G05.3 [Oryza sativa (japonica
PSSPSSPLRSPATPRRIGAMSGQSQRLNVVPTVTMLGVVKARLIGATRGHALLKKKSDALTVQFRAILKKIVATKESMGEAMRASSFSLAEAKYVAGDGVRHVVLQSVRSASLRVRSHQENVAGVKLPKFTHFVDPAGASSGGPSGASPSLTGLARGGQQVSACRAAHVKAIEVLVELASLQTSFLTLDEAIKTTNRRVNALENVVKPRLENTITYIKGELDELEREDFFRLKKIQGYKRREVERQMAAAKLFAEEQLAEDLALKRGVSIGGATNILVGGGDKDEDIIF

SEQ ID NO: 62390 - protein, 270 aa, Triticum aestivum
  peptide (1)..(270): Ceres Seq. ID no. 12625309
  misc_feature (15)..(222): Pfam Name: ATP synthase subunit D Pfam Description: ATP synthase subunit D
  misc_feature (1)..(270): Homolog of NCBI NO: 7706757 NR Description: ATPase, H+ transporting, lysosomal 34kD, V1
  misc_feature (1)..(270): Homolog of NCBI NO: 5138993 NR Description: vacuolar H-ATPase subunit D [Homo sapiens]
  misc_feature (1)..(243): Homolog of NCBI NO: 40786463 NR Description: ATPase, H+ transporting, lysosomal 34kDa, V1
  misc_feature (1)..(243): Homolog of NCBI NO: 12963799 NR Description: ATPase, H+ transporting, V1 subunit D
  misc_feature (1)..(270): Homolog of NCBI NO: 21355551 NR Description: CG8186-PA [Drosophila melanogaster]
  misc_feature (1)..(229): Homolog of NCBI NO: 28829327 NR Description: similar to Homo sapiens (Human). Vacuolar proton
  misc_feature (1)..(270): Homolog of NCBI NO: 28278870 NR Description: Similar to ATPase, H+ transporting, lysosomal
  misc_feature (1)..(270): Homolog of NCBI NO: 15231126 NR Description: v-ATPase subunit D (vATPD)
  misc_feature (1)..(270): Homolog of NCBI NO: 25529226 NR Description: H+-transporting two-sector ATPase (EC 3.6.3.14)
  misc_feature (1)..(270): Homolog of NCBI NO: 38344879 NR Description: OSJNBa0033G05.3 [Oryza sativa (japonica
MSGQSQRLNVVPTVTMLGVVKARLIGATRGHALLKKKSDALTVQFRAILKKIVATKESMGEAMRASSFSLAEAKYVAGDGVRHVVLQSVRSASLRVRSHQENVAGVKLPKFTHFVDPAGASSGGPSGASPSLTGLARGGQQVSACRAAHVKAIEVLVELASLQTSFLTLDEAIKTTNRRVNALENVVKPRLENTITYIKGELDELEREDFFRLKKIQGYKRREVERQMAAAKLFAEEQLAEDLALKRGVSIGGATNILVGGGDKDEDIIF

SEQ ID NO: 62391 - DNA, 1001 bp, Triticum aestivum
  misc_feature (1)..(1001): Ceres Seq. ID no. 12615268
cccagtaggtctcgcccctcccgatccgaacccagacccaaaaccaacaccggcggcggctgcagcgatggcggcggcggcgatgaacacggacgtggaggcggtcgacttcgactccgacgacgacgatctcatggacgaggagggtgccatcgaaccctcgccggcccccgctccccgcctccgatctaccatcgcagggggcggcggcggcgacgacgatgccccgcgtaagactaaggggcgcggcttccgcgaggaccccaactcctcgtccgcgcaccgcgactcgcggttagctggcgcaggccgctctggcttcgacgccctcgcctccgatggcggccctggacccgtgcgctccattgaagggtggattgtactggttactggagttcatgaagaagctcaggaggaggacctccataatattttcggggattatggtcaggtcaagaacttgcatttgaatttggatcgccggactggatttgtgaagggatatgctctaattgagtatgagaactttgagcaagccaagcgtgcaataagagaatcagacggaactgagcttctatcgcagataataagtgttgactgggcatttagtaatggccctgtcaaacagagaagtactcggaagagatcaccgaggcctaatcgctcaaggagcccaccaaggagaagatacccttaggagcgacggaagtgcgagaatcatgggctttcagttgtttgcttgtcttatcgtaatttgacggcggcccttgtctctctgtaccaatttccggtagtagttgtatggcatcttcaaggtccttactttggtggatggagccatgtttgctcttgaagtttggcttgccagtttgagacaattgtagcctttgatgttggatccgtgatgtgttggattggaatgtttgtgccacaatttaatgaacttgaagatgggtaatttgtattattatttcttctatcattattttttactcatctgc

SEQ ID NO: 62392 - protein, 231 aa, Triticum aestivum
  peptide (1)..(231): Ceres Seq. ID no. 12615269
  misc_feature (127)..(198): Pfam Name: RNA recognition motif. (a.k.a. RRM, RBD, or RNP domain) Pfam Description: RNA recognition motif. (a.k.a. RRM, RBD, or RNP
  misc_feature (77)..(229): Homolog of NCBI NO: 10197630 NR Description: MDS014 [Homo sapiens]
  misc_feature (77)..(229): Homolog of NCBI NO: 4826972 NR Description: RNA binding motif protein 8A
  misc_feature (77)..(229): Homolog of NCBI NO: 20804381 NR Description: RNA binding motif protein 8 [Oryzias latipes]
  misc_feature (77)..(229): Homolog of NCBI NO: 20804379 NR Description: RNA binding motif protein 8 [Oryzias latipes]
  misc_feature (77)..(229): Homolog of NCBI NO: 11034807 NR Description: RNA-binding protein Y14 [Xenopus laevis]
  misc_feature (77)..(229): Homolog of NCBI NO: 34784590 NR Description: Unknown (protein for MGC:68591) [Xenopus laevis]
  misc_feature (29)..(218): Homolog of NCBI NO: 25405472 NR Description: probable RNA-binding protein 35994-37391
  misc_feature (29)..(230): Homolog of NCBI NO: 21536738 NR Description: RNA-binding protein, putative [Arabidopsis
  misc_feature (29)..(230): Homolog of NCBI NO: 18403559 NR Description: RNA-binding protein, putative
  misc_feature (23)..(230): Homolog of NCBI NO: 30524687 NR Description: salt tolerance protein 4 [Beta vulgaris]
PVGLAPPDPNPDPKPTPAAAAAMAAAAMNTDVEAVDFDSDDDDLMDEEGAIEPSPAPAPRLRSTIAGGGGGDDDAPRKTKGRGFREDPNSSSAHRDSRLAGAGRSGFDALASDGGPGPVRSIEGWIVLVTGVHEEAQEEDLHNIFGDYGQVKNLHLNLDRRTGFVKGYALIEYENFEQAKRAIRESDGTELLSQIISVDWAFSNGPVKQRSTRKRSPRPNRSRSPPRRRYP

SEQ ID NO: 62393 - protein, 209 aa, Triticum aestivum
  peptide (1)..(209): Ceres Seq. ID no. 12615270
  misc_feature (105)..(176): Pfam Name: RNA recognition motif. (a.k.a. RRM, RBD, or RNP domain) Pfam Description: RNA recognition motif. (a.k.a. RRM, RBD, or RNP
  misc_feature (55)..(207): Homolog of NCBI NO: 10197630 NR Description: MDS014 [Homo sapiens]
  misc_feature (55)..(207): Homolog of NCBI NO: 4826972 NR Description: RNA binding motif protein 8A
  misc_feature (55)..(207): Homolog of NCBI NO: 20804381 NR Description: RNA binding motif protein 8 [Oryzias latipes]
  misc_feature (55)..(207): Homolog of NCBI NO: 20804379 NR Description: RNA binding motif protein 8 [Oryzias latipes]
  misc_feature (55)..(207): Homolog of NCBI NO: 11034807 NR Description: RNA-binding protein Y14 [Xenopus laevis]
  misc_feature (55)..(207): Homolog of NCBI NO: 34784590 NR Description: Unknown (protein for MGC:68591) [Xenopus laevis]
  misc_feature (7)..(196): Homolog of NCBI NO: 25405472 NR Description: probable RNA-binding protein 35994-37391
  misc_feature (7)..(208): Homolog of NCBI NO: 21536738 NR Description: RNA-binding protein, putative [Arabidopsis
  misc_feature (7)..(208): Homolog of NCBI NO: 18403559 NR Description: RNA-binding protein, putative
  misc_feature (1)..(208): Homolog of NCBI NO: 30524687 NR Description: salt tolerance protein 4 [Beta vulgaris]
MAAAAMNTDVEAVDFDSDDDDLMDEEGAIEPSPAPAPRLRSTIAGGGGGDDDAPRKTKGRGFREDPNSSSAHRDSRLAGAGRSGFDALASDGGPGPVRSIEGWIVLVTGVHEEAQEEDLHNIFGDYGQVKNLHLNLDRRTGFVKGYALIEYENFEQAKRAIRESDGTELLSQIISVDWAFSNGPVKQRSTRKRSPRPNRSRSPPRRRYP

SEQ ID NO: 62394 - protein, 204 aa, Triticum aestivum
  peptide (1)..(204): Ceres Seq. ID no. 12615271
  misc_feature (100)..(171): Pfam Name: RNA recognition motif. (a.k.a. RRM, RBD, or RNP domain) Pfam Description: RNA recognition motif. (a.k.a. RRM, RBD, or RNP
  misc_feature (50)..(202): Homolog of NCBI NO: 10197630 NR Description: MDS014 [Homo sapiens]
  misc_feature (50)..(202): Homolog of NCBI NO: 4826972 NR Description: RNA binding motif protein 8A
  misc_feature (50)..(202): Homolog of NCBI NO: 20804381 NR Description: RNA binding motif protein 8 [Oryzias latipes]
  misc_feature (50)..(202): Homolog of NCBI NO: 20804379 NR Description: RNA binding motif protein 8 [Oryzias latipes]
  misc_feature (50)..(202): Homolog of NCBI NO: 11034807 NR Description: RNA-binding protein Y14 [Xenopus laevis]
  misc_feature (50)..(202): Homolog of NCBI NO: 34784590 NR Description: Unknown (protein for MGC:68591) [Xenopus laevis]
  misc_feature (2)..(191): Homolog of NCBI NO: 25405472 NR Description: probable RNA-binding protein 35994-37391
  misc_feature (2)..(203): Homolog of NCBI NO: 21536738 NR Description: RNA-binding protein, putative [Arabidopsis
  misc_feature (2)..(203): Homolog of NCBI NO: 18403559 NR Description: RNA-binding protein, putative
  misc_feature (1)..(203): Homolog of NCBI NO: 30524687 NR Description: salt tolerance protein 4 [Beta vulgaris]
MNTDVEAVDFDSDDDDLMDEEGAIEPSPAPAPRLRSTIAGGGGGDDDAPRKTKGRGFREDPNSSSAHRDSRLAGAGRSGFDALASDGGPGPVRSIEGWIVLVTGVHEEAQEEDLHNIFGDYGQVKNLHLNLDRRTGFVKGYALIEYENFEQAKRAIRESDGTELLSQIISVDWAFSNGPVKQRSTRKRSPRPNRSRSPPRRRYP

SEQ ID NO: 62395 - DNA, 1271 bp, Triticum aestivum
  misc_feature (1)..(1271): Ceres Seq. ID no. 14313459
gcactcaacacactctctgcttcagctaacattagcagtccagcgcacacacatacagatatcgagagtgtgtgtgtaagagagacattagatcgagagcgatggcaattcctgctgatgctgctgtctcgttgaacttcccggtgatcaacatggagaagcttgagaccggggagaggggcgcggccatggaggtcatccgcgacgcctgcgagaactggggattcttcgagctgctgaaccatggcatctcgcacgagctgatggacgaggtggagcgggtgagcaaggcgaactacacggcgtgccgagaggggcagttcaaggagtttgcggcgcggacgctggaggccggcgagaagggcgccgacgtgaaggacgtggactgggagagcaccttcttcgtccgccacctccccgcctccaaccttgccgacctgcccgacctcgaccaccactacaggcaactgatcaaggaattcgcgtcggagatcgagaagctggcagagaaggtgctggacctgctgtgcgagaacctgggtctggagcagggctacctgaagcgggcgttcgccgggtccaggggcccgacgttcggcaccaaggtgagcagctacccaccgtgcccacgccccgacctggttgacggcctccgcgcgcacaccgacgccggcggcgtcatcctgctgttccaggacgaccaggtgagcgggctgcagctccttaaggacggggcctgggttgaggtgccgcccatgcgccacgccatcgtcgtcaatatcggcgaccagctggaggtgatcaccaacgggcggtacaagagcgtgatgcaccgcgtgctcacccgcgccgacggcaaccgcatgtccatcgcgtcattctacaaccccggggccgacgccgtcatcttcccggccccggcgcttgtggccgctgccggcgccacggagaagaacgagggcgaggagggcggcgccgtgtacccgaagttcgtgttcgaggactacatgaacctgtacgtgcgccacaagttcgaggccaaggagccacggttcaaggccatgaaggcagacgccgcgcccatcgccatcgcgtgataacgccgcgcccatcgagtacaagagtattttgagacgtgtttactttcttttgggcgtgccatgtatccggttagctttatgggtaatgtattttcgagtccgactcacagattcttgtccgggcatttctattttgctgattatggcatgctgttacgtgaagttaggaac

SEQ ID NO: 62396 - protein, 331 aa, Triticum aestivum
  peptide (1)..(331): Ceres Seq. ID no. 14313460
  misc_feature (163)..(263): Pfam Name: 2OG-Fe(II) oxygenase superfamily Pfam Description: 2OG-Fe(II) oxygenase superfamily
  misc_feature (12)..(330): Homolog of NCBI NO: 642062 NR Description: 1-aminocyclopropane-1-carboxylate oxidase
  misc_feature (12)..(331): Homolog of NCBI NO: 30840954 NR Description: 1-aminocyclopropane-1-carboxylate oxidase 2
  misc_feature (13)..(323): Homolog of NCBI NO: 1813891 NR Description: 1-aminocyclopropane-1-carboxylate oxidase [Betula
  misc_feature (12)..(328): Homolog of NCBI NO: 584711 NR Description: 1-aminocyclopropane-1-carboxylate oxidase 3 (ACC
  misc_feature (12)..(328): Homolog of NCBI NO: 1771345 NR Description: 1-aminocyclopropane-1-carboxylate oxidase [Musa
  misc_feature (12)..(323): Homolog of NCBI NO: 38043946 NR Description: 1-aminocyclopropane-1-carboxylate oxidase [Musa
  misc_feature (8)..(323): Homolog of NCBI NO: 12862572 NR Description: 1-aminocyclopropane-1-carboxylate oxidase
  misc_feature (12)..(323): Homolog of NCBI NO: 2769652 NR Description: ACC oxidase [Musa acuminata]
  misc_feature (12)..(323): Homolog of NCBI NO: 1326182 NR Description: 1-aminocyclopropane-1-carboxylate oxidase
  misc_feature (7)..(331): Homolog of NCBI NO: 7433198 NR Description: probable 1-aminocyclopropane-1-carboxylate
MAIPADAAVSLNFPVINMEKLETGERGAAMEVIRDACENWGFFELLNHGISHELMDEVERVSKANYTACREGQFKEFAARTLEAGEKGADVKDVDWESTFFVRHLPASNLADLPDLDHHYRQLIKEFASEIEKLAEKVLDLLCENLGLEQGYLKRAFAGSRGPTFGTKVSSYPPCPRPDLVDGLRAHTDAGGVILLFQDDQVSGLQLLKDGAWVEVPPMRHAIVVNIGDQLEVITNGRYKSVMHRVLTRADGNRMSIASFYNPGADAVIFPAPALVAAAGATEKNEGEEGGAVYPKFVFEDYMNLYVRHKFEAKEPRFKAMKADAAPIAIA

SEQ ID NO: 62397 - protein, 314 aa, Triticum aestivum
  peptide (1)..(314): Ceres Seq. ID no. 14313461
  misc_feature (146)..(246): Pfam Name: 2OG-Fe(II) oxygenase superfamily Pfam Description: 2OG-Fe(II) oxygenase superfamily
  misc_feature (1)..(313): Homolog of NCBI NO: 642062 NR Description: 1-aminocyclopropane-1-carboxylate oxidase
  misc_feature (1)..(314): Homolog of NCBI NO: 30840954 NR Description: 1-aminocyclopropane-1-carboxylate oxidase 2
  misc_feature (1)..(306): Homolog of NCBI NO: 1813891 NR Description: 1-aminocyclopropane-1-carboxylate oxidase [Betula
  misc_feature (1)..(311): Homolog of NCBI NO: 584711 NR Description: 1-aminocyclopropane-1-carboxylate oxidase 3 (ACC
  misc_feature (1)..(311): Homolog of NCBI NO: 1771345 NR Description: 1-aminocyclopropane-1-carboxylate oxidase [Musa
  misc_feature (1)..(306): Homolog of NCBI NO: 38043946 NR Description: 1-aminocyclopropane-1-carboxylate oxidase [Musa
  misc_feature (1)..(306): Homolog of NCBI NO: 12862572 NR Description: 1-aminocyclopropane-1-carboxylate oxidase
  misc_feature (1)..(306): Homolog of NCBI NO: 2769652 NR Description: ACC oxidase [Musa acuminata]
  misc_feature (1)..(306): Homolog of NCBI NO: 1326182 NR Description: 1-aminocyclopropane-1-carboxylate oxidase
  misc_feature (1)..(314): Homolog of NCBI NO: 7433198 NR Description: probable 1-aminocyclopropane-1-carboxylate
MEKLETGERGAAMEVIRDACENWGFFELLNHGISHELMDEVERVSKANYTACREGQFKEFAARTLEAGEKGADVKDVDWESTFFVRHLPASNLADLPDLDHHYRQLIKEFASEIEKLAEKVLDLLCENLGLEQGYLKRAFAGSRGPTFGTKVSSYPPCPRPDLVDGLRAHTDAGGVILLFQDDQVSGLQLLKDGAWVEVPPMRHAIVVNIGDQLEVITNGRYKSVMHRVLTRADGNRMSIASFYNPGADAVIFPAPALVAAAGATEKNEGEEGGAVYPKFVFEDYMNLYVRHKFEAKEPRFKAMKADAAPIAIA

SEQ ID NO: 62398 - protein, 302 aa, Triticum aestivum
  peptide (1)..(302): Ceres Seq. ID no. 14313462
  misc_feature (134)..(234): Pfam Name: 2OG-Fe(II) oxygenase superfamily Pfam Description: 2OG-Fe(II) oxygenase superfamily
  misc_feature (1)..(301): Homolog of NCBI NO: 642062 NR Description: 1-aminocyclopropane-1-carboxylate oxidase
  misc_feature (1)..(302): Homolog of NCBI NO: 30840954 NR Description: 1-aminocyclopropane-1-carboxylate oxidase 2
  misc_feature (1)..(294): Homolog of NCBI NO: 1813891 NR Description: 1-aminocyclopropane-1-carboxylate oxidase [Betula
  misc_feature (1)..(299): Homolog of NCBI NO: 584711 NR Description: 1-aminocyclopropane-1-carboxylate oxidase 3 (ACC
  misc_feature (1)..(299): Homolog of NCBI NO: 1771345 NR Description: 1-aminocyclopropane-1-carboxylate oxidase [Musa
  misc_feature (1)..(294): Homolog of NCBI NO: 38043946 NR Description: 1-aminocyclopropane-1-carboxylate oxidase [Musa
  misc_feature (1)..(294): Homolog of NCBI NO: 12862572 NR Description: 1-aminocyclopropane-1-carboxylate oxidase
  misc_feature (1)..(294): Homolog of NCBI NO: 2769652 NR Description: ACC oxidase [Musa acuminata]
  misc_feature (1)..(294): Homolog of NCBI NO: 1326182 NR Description: 1-aminocyclopropane-1-carboxylate oxidase
  misc_feature (1)..(302): Homolog of NCBI NO: 7433198 NR Description: probable 1-aminocyclopropane-1-carboxylate
MEVIRDACENWGFFELLNHGISHELMDEVERVSKANYTACREGQFKEFAARTLEAGEKGADVKDVDWESTFFVRHLPASNLADLPDLDHHYRQLIKEFASEIEKLAEKVLDLLCENLGLEQGYLKRAFAGSRGPTFGTKVSSYPPCPRPDLVDGLRAHTDAGGVILLFQDDQVSGLQLLKDGAWVEVPPMRHAIVVNIGDQLEVITNGRYKSVMHRVLTRADGNRMSIASFYNPGADAVIFPAPALVAAAGATEKNEGEEGGAVYPKFVFEDYMNLYVRHKFEAKEPRFKAMKADAAPIAIA

SEQ ID NO: 62399 - DNA, 887 bp, Triticum aestivum
  misc_feature (1)..(887): Ceres Seq. ID no. 12615117
aaaccatttgtcgtgagaccatctctcaccataggtcaactgctttggaaaggcggaagtggaagctagggtttaagaaggtccaggacgaagtggatcacggcgatggcgtcggcgaaaatcctagcgcgggctggctcctccttcctcggccgcctcctcgcctccccgcctccgtctcttctgcggaccggacctcctcttccgtcgctgctccataggatccagccgcacgtcccgccgccgccggcgtcggtggacgcacacgacgcggaggtggtcgcgagactaacttcgctccccggggagatctccttcccctgcggcctcccctctctccggttcctcattgacgatggaattgatcctgttgctaatgaaccccttgagttacttcccaaaaggacttaccaacccagcaccatcaagcggaaacgaacccatggatttcgtgcacgtaaatcaaccacgggtgggcgtaaggtgattgctcggagaattgctaaaggaaggcacaaaatttcatggtaatgaaaacccatggcaccgatgggagtttcacctcagctttgaatgatgctaatgtgaacatctaggagcttacaatagatgtattctccttccgaggcggggttagagcaaagccaagagacacctgcctgaatttcttcaccaaacaaaacgtttgttccactgaataaacatgacaaggagatggttatcgatgattttactgctatttgagatatgtacttgtatgctagttcgactgcattatgcatttgcttgtgttgtcaaactgtcagagtagcatccttggggtcatttccgtccatcaaactatgatgttcgcgttttcccccctttaagaaaaaagttttgcgtgc

SEQ ID NO: 62400 - protein, 141 aa, Triticum aestivum
  peptide (1)..(141): Ceres Seq. ID no. 12615118
  misc_feature (98)..(140): Pfam Name: Ribosomal protein L34 Pfam Description: Ribosomal protein L34
  misc_feature (99)..(140): Homolog of NCBI NO: 15603027 NR Description: RpL34 [Pasteurella multocida]
  misc_feature (97)..(140): Homolog of NCBI NO: 15640039 NR Description: ribosomal protein L34 [Vibrio cholerae]
  misc_feature (99)..(140): Homolog of NCBI NO: 17988621 NR Description: LSU ribosomal protein L34P [Brucella melitensis]
  misc_feature (99)..(140): Homolog of NCBI NO: 39933711 NR Description: possible ribosomal protein L34 [Rhodopseudomonas
  misc_feature (99)..(140): Homolog of NCBI NO: 39938733 NR Description: ribosomal protein L34 [Onion yellows phytoplasma]
  misc_feature (99)..(140): Homolog of NCBI NO: 24212875 NR Description: ribosomal protein L34
  misc_feature (99)..(140): Homolog of NCBI NO: 15839371 NR Description: 50S ribosomal protein L34 [Xylella fastidiosa
  misc_feature (97)..(140): Homolog of NCBI NO: 24371607 NR Description: ribosomal protein L34 [Shewanella oneidensis
  misc_feature (3)..(140): Homolog of NCBI NO: 29824329 NR Description: unknown protein [Arabidopsis thaliana]
  misc_feature (1)..(140): Homolog of NCBI NO: 20521263 NR Description: B1129G05.2 [Oryza sativa (japonica
MASAKILARAGSSFLGRLLASPPPSLLRTGPPLPSLLHRIQPHVPPPPASVDAHDAEVVARLTSLPGEISFPCGLPSLRFLIDDGIDPVANEPLELLPKRTYQPSTIKRKRTHGFRARKSTTGGRKVIARRIAKGRHKISW

SEQ ID NO: 62401 - protein, 72 aa, Triticum aestivum
  peptide (1)..(72): Ceres Seq. ID no. 12615119
TICRETISHHRSTALERRKWKLGFKKVQDEVDHGDGVGENPSAGWLLLPRPPPRLPASVSSADRTSSSVAAP

SEQ ID NO: 62402 - DNA, 1815 bp, Triticum aestivum
  misc_feature (1)..(1815): Ceres Seq. ID no. 13598401
accaagcaaagcatccaaccatcagatatgcatatgaccagacctgaccaattgtgcgagatgtttctttgttcagataactataacaggaatggttctacctctagggccatacgaaaacccctctaaactggatatcacatccagccaaccactacaacagagctccaattaaacacccacgggctgtgcacacacagacgtcgcatatcagaatttcaaccacttcttctccttctccttcctggcgaccgcgttggtggccgaggcgtgcgtcgcctcggcgtcggcgagcgccttccgcgtctgctccagcttcctcgacgccgcatcatgcaccgccttgtccttgcggttgcgctgcaccatctcctccagccgcccgacctggctccgcagctccttcacctcgtcgtcgtacgcgagcagagaccttctgttgtcttctttcttgggatgcccattggcctgacccgatggcgactctttcctggccttggcggccgaggagccttctgacgtgtcctggctcaccagctggctgttcatgaagctaaagacggacctctccgcctcctcggccttggcggccctggtcagctccgcaaacttccggtcgcgcttcctttgcccgccccggctgcgcttcttgtctttctcacggtgtatgcttcggccgtcctcgcctgtggttgcagcgaccgcgtggtcgagtgattgcttggccggtagtaccttgactgggattggatcgagcatgccttggccggacacgcctagccccatgccctcccggtaacccatttttgccatcattttggaggcgacgcccctggtgtgctgttcccattttgcaaagatcacggtctcagactgaacaccagttaaatttgtggtttccaaacggccaagaccctgatggatggattcatcctcttgatcgccatcttcacttaactcagattcatcctcacttgagcctctttcatcatcttccccgctcacatcagcatattctgggatagaaagggaatcacccggaagcgttgcagtgctcccatcatcttgaaagaccacctgaccacgcttcaactcatcatcccacgactcaagttcagctctcctccaaaggccagaatggtgcccagaagctgccagtatgctggatcctgccaaggactgtcgccatgcagttggagtgaaccgtttcaaggatgaagtaggaatcacaacaccatgggacaagcggcagttattagcaaaccgacaccgttgctgcagaaagaacttgcacatcgacattttttctgatgtgggtgtcagaaatgagacccgtgcattgcctgaaccttcaagtcccagaatgcatccattataccaacgcccatcattgtgcctgaatctacactttgatccgactgaaaattcctgtggctccaatggttgtggctcaacatcatgtggatctaatggctcaatagcagcttcagttgatagcgatgctgactcctgatttggaaagatctcatcgatttgcttcactagcctagaacgcttcaaatgcagaagcccttcctctgcatccttaatcgcagacagaagttccccgtgcacctcgaggaggtccgcgttggaggcgtcggcggcgagggcctcgtcgacggcggcgagggaggaccgctgctcctccaggtgctgttccagctgcagctcgatctccgccgcctcgtcctcctccccctcgcccgccatggctcaccggtccaggcagcggtcggtcgggagaagagagaagggccgacgatttcgatgggt

SEQ ID NO: 62403 - protein, 117 aa, Triticum aestivum
  peptide (1)..(117): Ceres Seq. ID no. 13598402
  misc_feature (86)..(117): Homolog of NCBI NO: 13592175 NR Description: ppg3 [Leishmania major]
MLDPAKDCRHAVGVNRFKDEVGITTPWDKRQLLANRHRCCRKNLHIDIFSDVGVRNETRALPEPSSPRMHPLYQRPSLCLNLHFDPTENSCGSNGCGSTSCGSNGSIAASVDSDADS

SEQ ID NO: 62404 - protein, 85 aa, Triticum aestivum
  peptide (1)..(85): Ceres Seq. ID no. 13598403
MQKPFLCILNRRQKFPVHLEEVRVGGVGGEGLVDGGEGGPLLLQVLFQLQLDLRRLVLLPLARHGSPVQAAVGREKREGPTISMG

SEQ ID NO: 62405 - protein, 83 aa, Triticum aestivum
  peptide (1)..(83): Ceres Seq. ID no. 13598404
  misc_feature (1)..(83): Homolog of NCBI NO: 13592175 NR Description: ppg3 [Leishmania major]
MKLKTDLSASSALAALVSSANFRSRFLCPPRLRFLSFSRCMLRPSSPVVAATAWSSDCLAGSTLTGIGSSMPWPDTPSPMPSR

SEQ ID NO: 62406 - DNA, 1237 bp, Triticum aestivum
  misc_feature (1)..(1237): Ceres Seq. ID no. 13596918
agacggctcggcgattggcctcacggcgagctatctaggtcacgaggaatccactcccgactgccgttaggctggccggctggcttgttgccgcggacagccttggcgaatcacggtcctgataggcgcccctcctcccggcgatggggggtcgcaatcggcgatggccgacgaagcgccaccacgacgcctcttcgaaccctcgccccccgcctccgtattccggatacagtcacgtggataatcaatgccaagtcccattatgggaaagggaattttgcagtcttgttggtggcatttcgtggcagaggttctgcgagaacaagcactttgcctatatgtacaaggagatagagcagtgggatgactcgggagcttttgagaatttccagaacgcaaaatcaaggttctggtctcattaccatggccaaccttctgatataccttaccccaaccctgatctgtacattgatgaggtcgaccatcgttgcgaggtcgaccccgagttggtagctgacctggacaaggtgcgggtaccctttgaggcggacaacgagcccgccgtagctgccaataacaggtgtgcccagaaccagtcagggaactgggacatctatctagaaaagccgacccctgaggtgaacaagtgggaggcggacaactcggcatccaacgcaggttggggagcgagtcaggagcctctgagcagctggaacaaaatcagcaccggctggggcgaggccctggcggagcccggttggggcagctcaggcaacaaccattgcccagggaataactggagcagctcccatggagtatccagcaacaataacacatactaccaggatccaggcggcgcatatggcaggaaaaggaacagtggaggcgggtactcccagcagaggaacagcaagcagaggaaccaggctgagagccaccaccagaggggcagatggcaggatcacagggacagggggaggcatggcgagcggttcctgtttgacaataggccaaatgggcagcgagcagagcgcggcttctgagttggtggcggtgagtgtgcgagaaaccgtggaaaggttttggttgtatgataaatgatgcgcattttctagtgtcttttgtgcggagctgcagcttgtaatggttggatgttgcaacaacgctttacctgtaaggagatgtgtcaggttttgttgctgctctttgtgatatgttctgttttctctcttcctgt

SEQ ID NO: 62407 - protein, 299 aa, Triticum aestivum
  peptide (1)..(299): Ceres Seq. ID no. 13596919
  misc_feature (38)..(272): Homolog of NCBI NO: 11357778 NR Description: hypothetical protein F4F15.50 - Arabidopsis
  misc_feature (1)..(272): Homolog of NCBI NO: 30693555 NR Description: expressed protein [Arabidopsis thaliana]
  misc_feature (1)..(272): Homolog of NCBI NO: 30725308 NR Description: At3g51940 [Arabidopsis thaliana]
  misc_feature (24)..(191): Homolog of NCBI NO: 34908952 NR Description: P0691E06.28 [Oryza sativa (japonica
  misc_feature (38)..(298): Homolog of NCBI NO: 18414420 NR Description: expressed protein [Arabidopsis thaliana]
  misc_feature (38)..(298): Homolog of NCBI NO: 11357869 NR Description: hypothetical protein F8F6.200 - Arabidopsis
MGGRNRRWPTKRHHDASSNPRPPPPYSGYSHVDNQCQVPLWEREFCSLVGGISWQRFCENKHFAYMYKEIEQWDDSGAFENFQNAKSRFWSHYHGQPSDIPYPNPDLYIDEVDHRCEVDPELVADLDKVRVPFEADNEPAVAANNRCAQNQSGNWDIYLEKPTPEVNKWEADNSASNAGWGASQEPLSSWNKISTGWGEALAEPGWGSSGNNHCPGNNWSSSHGVSSNNNTYYQDPGGAYGRKRNSGGGYSQQRNSKQRNQAESHHQRGRWQDHRDRGRHGERFLFDNRPNGQRAERGF

SEQ ID NO: 62408 - protein, 234 aa, Triticum aestivum
  peptide (1)..(234): Ceres Seq. ID no. 13596920
  misc_feature (1)..(207): Homolog of NCBI NO: 11357778 NR Description: hypothetical protein F4F15.50 - Arabidopsis
  misc_feature (1)..(207): Homolog of NCBI NO: 30693555 NR Description: expressed protein [Arabidopsis thaliana]
  misc_feature (1)..(207): Homolog of NCBI NO: 30725308 NR Description: At3g51940 [Arabidopsis thaliana]
  misc_feature (1)..(126): Homolog of NCBI NO: 34908952 NR Description: P0691E06.28 [Oryza sativa (japonica
  misc_feature (1)..(233): Homolog of NCBI NO: 18414420 NR Description: expressed protein [Arabidopsis thaliana]
  misc_feature (1)..(233): Homolog of NCBI NO: 11357869 NR Description: hypothetical protein F8F6.200 - Arabidopsis
MYKEIEQWDDSGAFENFQNAKSRFWSHYHGQPSDIPYPNPDLYIDEVDHRCEVDPELVADLDKVRVPFEADNEPAVAANNRCAQNQSGNWDIYLEKPTPEVNKWEADNSASNAGWGASQEPLSSWNKISTGWGEALAEPGWGSSGNNHCPGNNWSSSHGVSSNNNTYYQDPGGAYGRKRNSGGGYSQQRNSKQRNQAESHHQRGRWQDHRDRGRHGERFLFDNRPNGQRAERGF

SEQ ID NO: 62409 - DNA, 837 bp, Triticum aestivum
  misc_feature (1)..(837): Ceres Seq. ID no. 13654825
ccttcttctctcccgctgaaacctttcttcacaaaatggcctcaactacactaacaaccctctccctccgcaacctctcttatcctanaccctcctcctcttcttaccctacgcacctctccgccaacccctcctccctccaattccccaacttctcccaccgcgccaccaccacgcgccgcgcccgcgtcgtcgtcgtctccgccgtcgaggcaccggagaaaatcaccaagctcggcgacgaaatcgcgggactcacgctcgaggaagccaagaacctcgtcgacttcctccaggacaagctcggcgtctccgcggcagcattcgcccccgtagccgtcgccgcgggtgccgtcggcgccgtggcggacgctccggcggcggtggaggagaagatggagttcgacgtgttgatcgaggaggtgccgagcaacgcgagaatcgcggtgattaaggcggtgagggcgctgactaacctggcgctgaaagaggcgaaggagttgatagaagggttgccgaagaagttcaaggaagggatttcgaaggacgaagctgaagatgcgaagaagcaacttgaagaagccggtgccaaggttaccattgcttagtactgtttagcagcagcatttgttttgcttcttcttttgttgtagctgagttcactagtacactgtaatctcctttccattttgtctggagttcaatcttatttgtaatgaggaaaaaatgagttcttattttttttttaatgcctctgaggtgtttgttgaaatggaggtgaagggttttaaattgctgaattggaaattggaaacacggtacttaactacttgctgg

SEQ ID NO: 62410 - protein, 201 aa, Triticum aestivum
  peptide (1)..(201): Ceres Seq. ID no. 13654826
  misc_feature (133)..(201): Pfam Name: Ribosomal protein L7/L12 C-terminal domain Pfam Description: Ribosomal protein L7/L12 C-terminal domain
  misc_feature (68)..(198): Homolog of NCBI NO: 223560 NR Description: protein,chloroplast ribosomal
  misc_feature (12)..(201): Homolog of NCBI NO: 15232274 NR Description: 50S ribosomal protein L12-1, chloroplast
  misc_feature (12)..(201): Homolog of NCBI NO: 34912074 NR Description: putative ribosomal protein L12
  misc_feature (12)..(201): Homolog of NCBI NO: 541897 NR Description: ribosomal protein L12.C precursor, chloroplast -
  misc_feature (12)..(201): Homolog of NCBI NO: 21592776 NR Description: 50S ribosomal protein L12-C [Arabidopsis thaliana]
  misc_feature (12)..(201): Homolog of NCBI NO: 15232276 NR Description: 50S ribosomal protein L12-3, chloroplast
  misc_feature (13)..(200): Homolog of NCBI NO: 133085 NR Description: 50S RIBOSOMAL PROTEIN L12, CHLOROPLAST PRECURSOR
  misc_feature (12)..(201): Homolog of NCBI NO: 548746 NR Description: 50S RIBOSOMAL PROTEIN L12, CHLOROPLAST PRECURSOR
  misc_feature (12)..(201): Homolog of NCBI NO: 133088 NR Description: 50S RIBOSOMAL PROTEIN L12, CHLOROPLAST PRECURSOR
  misc_feature (12)..(201): Homolog of NCBI NO: 20020 NR Description: ribosomal protein L12-1a [Nicotiana tabacum]
  misc_feature (29)..(29): Xaa is any aa, unknown or other
FFSPAETFLHKMASTTLTTLSLRNLSYPXPSSSSYPTHLSANPSSLQFPNFSHRATTTRRARVVVVSAVEAPEKITKLGDEIAGLTLEEAKNLVDFLQDKLGVSAAAFAPVAVAAGAVGAVADAPAAVEEKMEFDVLIEEVPSNARIAVIKAVRALTNLALKEAKELIEGLPKKFKEGISKDEAEDAKKQLEEAGAKVTIA

SEQ ID NO: 62411 - protein, 190 aa, Triticum aestivum
  peptide (1)..(190): Ceres Seq. ID no. 13654827
  misc_feature (122)..(190): Pfam Name: Ribosomal protein L7/L12 C-terminal domain Pfam Description: Ribosomal protein L7/L12 C-terminal domain
  misc_feature (57)..(187): Homolog of NCBI NO: 223560 NR Description: protein,chloroplast ribosomal
  misc_feature (1)..(190): Homolog of NCBI NO: 15232274 NR Description: 50S ribosomal protein L12-1, chloroplast
  misc_feature (1)..(190): Homolog of NCBI NO: 34912074 NR Description: putative ribosomal protein L12
  misc_feature (1)..(190): Homolog of NCBI NO: 541897 NR Description: ribosomal protein L12.C precursor, chloroplast -
  misc_feature (1)..(190): Homolog of NCBI NO: 21592776 NR Description: 50S ribosomal protein L12-C [Arabidopsis thaliana]
  misc_feature (1)..(190): Homolog of NCBI NO: 15232276 NR Description: 50S ribosomal protein L12-3, chloroplast
  misc_feature (2)..(189): Homolog of NCBI NO: 133085 NR Description: 50S RIBOSOMAL PROTEIN L12, CHLOROPLAST PRECURSOR
  misc_feature (1)..(190): Homolog of NCBI NO: 548746 NR Description: 50S RIBOSOMAL PROTEIN L12, CHLOROPLAST PRECURSOR
  misc_feature (1)..(190): Homolog of NCBI NO: 133088 NR Description: 50S RIBOSOMAL PROTEIN L12, CHLOROPLAST PRECURSOR
  misc_feature (1)..(190): Homolog of NCBI NO: 20020 NR Description: ribosomal protein L12-1a [Nicotiana tabacum]
  misc_feature (18)..(18): Xaa is any aa, unknown or other
MASTTLTTLSLRNLSYPXPSSSSYPTHLSANPSSLQFPNFSHRATTTRRARVVVVSAVEAPEKITKLGDEIAGLTLEEAKNLVDFLQDKLGVSAAAFAPVAVAAGAVGAVADAPAAVEEKMEFDVLIEEVPSNARIAVIKAVRALTNLALKEAKELIEGLPKKFKEGISKDEAEDAKKQLEEAGAKVTIA

SEQ ID NO: 62412 - DNA, 1234 bp, Triticum aestivum
  misc_feature (1)..(1234): Ceres Seq. ID no. 13598253
gattccccgtcccctttcttcattccctcttccgttgccggtgcgtccgcgtcctgtctctcccggccagcgatcgggaggggcgagggatggcctcccgtccccccaactccgccgacggcgagggccccgcagggaataacgtggaattgccatccctgccctttcatgttgttactaaacctagtcaactcccagttgagtttcttgagccctctgctgccaagaaattggtgattggatttgactgtgaaggtgttgacctttgccgccatggtgctctctgtatcatgcagattgcatttcctgacgctgtttacttggtcgatgctattgagggtggaaaagaactagttgaagcttgcaaaccagcacttgagtccaatcatatcaccaaagttattcatgactgtaaaagggacagtgaggcattgtatttccagtttggcattaaattacataatgtgatggatacacagatagcctattccctgattgaagagcaggaaggtaaaaagagagcatatgatgtttacatatccttcgtgagccttcttgccgatcctcgttattgtggaatgccatatcctgaaaaggaagaagtccgtacccttctaaggcaggacccaaatttctggaaaaataggcccttgtctgaaatgatgattcgagcagcgacagatgatgtgcgcttccttctcaatatacatgagaaaatgatggagaagttaagcaaagtatcttcatggcgtctggcagtacgaagtgagctatactgtaggtgcttttgcataaatgacaaccagcaggcagattggccgcctcttccaactgtccctgatgacattgaagctgaagctcgtgttcctgaagtggatatcctttcgctcttagatgtgcctcctggaaaaatgggtcgtgttattggcagaaaaggatcatcaataatggctgtgaaagaatcttgcaatgttgaaatccatatcggtggtgcaaagggacctccagatagggtgttcatcattggaccagtgaaggaagtcagaaaggcggaggccatcctgaggggccgaatgctgtaattctagagaaacgacttcttgatatagacttgaactgccatatcttttgaacacaagggatacagaaatgcatgtggatcgctgatccgtgacaacaataaaaataagagttggattaaaaaaaaaaaaaaaaaagcttatcgataccgtcg

SEQ ID NO: 62413 - protein, 359 aa, Triticum aestivum
  peptide (1)..(359): Ceres Seq. ID no. 15222279
  misc_feature (78)..(244): Pfam Name: 3'-5' exonuclease Pfam Description: 3'-5' exonuclease
  misc_feature (78)..(248): Homolog of NCBI NO: 23483550 NR Description: 3'-5' exonuclease, putative [Plasmodium yoelii
  misc_feature (78)..(243): Homolog of NCBI NO: 23612774 NR Description: exonuclease, putative [Plasmodium falciparum 3D7]
  misc_feature (106)..(262): Homolog of NCBI NO: 23489160 NR Description: 3'-5' exonuclease, putative [Plasmodium yoelii
  misc_feature (60)..(257): Homolog of NCBI NO: 38681451 NR Description: egalitarian [Drosophila melanogaster]
  misc_feature (60)..(257): Homolog of NCBI NO: 33589402 NR Description: RE33408p [Drosophila melanogaster]
  misc_feature (60)..(257): Homolog of NCBI NO: 24762379 NR Description: egalitarian CG4051-PA [Drosophila melanogaster]
  misc_feature (275)..(341): Homolog of NCBI NO: 25407824 NR Description: hypothetical protein At2g25910 [imported] -
  misc_feature (97)..(279): Homolog of NCBI NO: 25407824 NR Description: hypothetical protein At2g25910 [imported] -
  misc_feature (34)..(359): Homolog of NCBI NO: 18400976 NR Description: expressed protein [Arabidopsis thaliana]
  misc_feature (76)..(359): Homolog of NCBI NO: 34914238 NR Description: P0002B05.11 [Oryza sativa (japonica
FPVPFLHSLFRCRCVRVLSLPASDREGRGMASRPPNSADGEGPAGNNVELPSLPFHVVTKPSQLPVEFLEPSAAKKLVIGFDCEGVDLCRHGALCIMQIAFPDAVYLVDAIEGGKELVEACKPALESNHITKVIHDCKRDSEALYFQFGIKLHNVMDTQIAYSLIEEQEGKKRAYDVYISFVSLLADPRYCGMPYPEKEEVRTLLRQDPNFWKNRPLSEMMIRAATDDVRFLLNIHEKMMEKLSKVSSWRLAVRSELYCRCFCINDNQQADWPPLPTVPDDIEAEARVPEVDILSLLDVPPGKMGRVIGRKGSSIMAVKESCNVEIHIGGAKGPPDRVFIIGPVKEVRKAEAILRGRML

SEQ ID NO: 62414 - protein, 330 aa, Triticum aestivum
  peptide (1)..(330): Ceres Seq. ID no. 15222280
  misc_feature (49)..(215): Pfam Name: 3'-5' exonuclease Pfam Description: 3'-5' exonuclease
  misc_feature (49)..(219): Homolog of NCBI NO: 23483550 NR Description: 3'-5' exonuclease, putative [Plasmodium yoelii
  misc_feature (49)..(214): Homolog of NCBI NO: 23612774 NR Description: exonuclease, putative [Plasmodium falciparum 3D7]
  misc_feature (77)..(233): Homolog of NCBI NO: 23489160 NR Description: 3'-5' exonuclease, putative [Plasmodium yoelii
  misc_feature (31)..(228): Homolog of NCBI NO: 38681451 NR Description: egalitarian [Drosophila melanogaster]
  misc_feature (31)..(228): Homolog of NCBI NO: 33589402 NR Description: RE33408p [Drosophila melanogaster]
  misc_feature (31)..(228): Homolog of NCBI NO: 24762379 NR Description: egalitarian CG4051-PA [Drosophila melanogaster]
  misc_feature (246)..(312): Homolog of NCBI NO: 25407824 NR Description: hypothetical protein At2g25910 [imported] -
  misc_feature (68)..(250): Homolog of NCBI NO: 25407824 NR Description: hypothetical protein At2g25910 [imported] -
  misc_feature (5)..(330): Homolog of NCBI NO: 18400976 NR Description: expressed protein [Arabidopsis thaliana]
  misc_feature (47)..(330): Homolog of NCBI NO: 34914238 NR Description: P0002B05.11 [Oryza sativa (japonica
MASRPPNSADGEGPAGNNVELPSLPFHVVTKPSQLPVEFLEPSAAKKLVIGFDCEGVDLCRHGALCIMQIAFPDAVYLVDAIEGGKELVEACKPALESNHITKVIHDCKRDSEALYFQFGIKLHNVMDTQIAYSLIEEQEGKKRAYDVYISFVSLLADPRYCGMPYPEKEEVRTLLRQDPNFWKNRPLSEMMIRAATDDVRFLLNIHEKMMEKLSKVSSWRLAVRSELYCRCFCINDNQQADWPPLPTVPDDIEAEARVPEVDILSLLDVPPGKMGRVIGRKGSSIMAVKESCNVEIHIGGAKGPPDRVFIIGPVKEVRKAEAILRGRML

SEQ ID NO: 62415 - protein, 263 aa, Triticum aestivum
  peptide (1)..(263): Ceres Seq. ID no. 15222281
  misc_feature (1)..(148): Pfam Name: 3'-5' exonuclease Pfam Description: 3'-5' exonuclease
  misc_feature (1)..(152): Homolog of NCBI NO: 23483550 NR Description: 3'-5' exonuclease, putative [Plasmodium yoelii
  misc_feature (1)..(147): Homolog of NCBI NO: 23612774 NR Description: exonuclease, putative [Plasmodium falciparum 3D7]
  misc_feature (10)..(166): Homolog of NCBI NO: 23489160 NR Description: 3'-5' exonuclease, putative [Plasmodium yoelii
  misc_feature (1)..(161): Homolog of NCBI NO: 38681451 NR Description: egalitarian [Drosophila melanogaster]
  misc_feature (1)..(161): Homolog of NCBI NO: 33589402 NR Description: RE33408p [Drosophila melanogaster]
  misc_feature (1)..(161): Homolog of NCBI NO: 24762379 NR Description: egalitarian CG4051-PA [Drosophila melanogaster]
  misc_feature (179)..(245): Homolog of NCBI NO: 25407824 NR Description: hypothetical protein At2g25910 [imported] -
  misc_feature (1)..(183): Homolog of NCBI NO: 25407824 NR Description: hypothetical protein At2g25910 [imported] -
  misc_feature (1)..(263): Homolog of NCBI NO: 18400976 NR Description: expressed protein [Arabidopsis thaliana]
  misc_feature (1)..(263): Homolog of NCBI NO: 34914238 NR Description: P0002B05.11 [Oryza sativa (japonica
MQIAFPDAVYLVDAIEGGKELVEACKPALESNHITKVIHDCKRDSEALYFQFGIKLHNVMDTQIAYSLIEEQEGKKRAYDVYISFVSLLADPRYCGMPYPEKEEVRTLLRQDPNFWKNRPLSEMMIRAATDDVRFLLNIHEKMMEKLSKVSSWRLAVRSELYCRCFCINDNQQADWPPLPTVPDDIEAEARVPEVDILSLLDVPPGKMGRVIGRKGSSIMAVKESCNVEIHIGGAKGPPDRVFIIGPVKEVRKAEAILRGRML

SEQ ID NO: 62416 - DNA, 996 bp, Triticum aestivum
  misc_feature (1)..(996): Ceres Seq. ID no. 13503610
gcactccattcacggttcgccaaggtcaacaagagtagtgatagatagaagaggccaccatcaccatggatcggcagctgctgaggacggtgaagcaggcgaccaagaaccacgccggcctcatgtaccaccgtctcgtgggccacatcccccacctcctcgtggtcacgctgctcgtcgtcgtggcgccgcagctctcgacgctgacgccggagaaggtgcgcgccctttggaacacagcagtgaacgcgccggcgctggccatggcgtgctgggcggcggcgctggcggcgtacacgtacgcgtcgtcccgccctcagccagtgtatctagtggacctcgccgggtacaagccgccggtggagctggaggcgtcgcgcgccaagaccatcgtgcacttctcgcggtgcgggcggttcagcgagcagagcatggcgttccagaagcggatgctggagcggtcggggctgggcgaggcgacgcacttccccatgtcgctgatccgcctccccgtggacatgtgcgaccggacggccatggaggagtcccacgccgtgatcttcggcgtcgtcgacgaggtcctccgcaagaccggcgtggacgccggcgacgtgggcgtgctcatcttcaactccagcctgctcagcccgacgccgtccttcacgtcgctcatcgtgaaccgctacaagttccgcgacgacatcgtcacgcacaacctcagcggcatggggtgcagcgccggcatcatcgccatcgacctcgccaagcgcctgctccaggtacaccggaacacgtacgcgctggtggtgagcacggagaacatcaccctcaacgcctacatgggcaacannccgtccgatgctggtgaccaacacgctcttccgtgtcggcggcgcggcgatcctcctcaccaaccgggccggcgaccgggcgcggtccaagtaccagctgatccacaccgtgcgcacccaccgcggggcgcacgaccagagctac

SEQ ID NO: 62417 - protein, 310 aa, Triticum aestivum
  peptide (1)..(310): Ceres Seq. ID no. 13503611
  misc_feature (85)..(255): Pfam Name: Chalcone and stilbene synthases, N-terminal domain Pfam Description: Chalcone and stilbene synthases, N-terminal
  misc_feature (1)..(264): Homolog of NCBI NO: 15223556 NR Description: very-long-chain fatty acid condensing enzyme
  misc_feature (3)..(261): Homolog of NCBI NO: 15226724 NR Description: very-long-chain fatty acid condensing enzyme
  misc_feature (1)..(264): Homolog of NCBI NO: 1045614 NR Description: beta-ketoacyl-CoA synthase
  misc_feature (19)..(264): Homolog of NCBI NO: 18377979 NR Description: putative beta-ketoacyl-CoA synthase [Arabidopsis
  misc_feature (19)..(264): Homolog of NCBI NO: 15219676 NR Description: beta-ketoacyl-CoA synthase, putative [Arabidopsis
  misc_feature (19)..(264): Homolog of NCBI NO: 15239981 NR Description: beta-ketoacyl-CoA synthase, putative [Arabidopsis
  misc_feature (19)..(264): Homolog of NCBI NO: 14334714 NR Description: putative beta-ketoacyl-CoA synthase [Arabidopsis
  misc_feature (7)..(264): Homolog of NCBI NO: 9714501 NR Description: putative fatty acid elongase [Zea mays]
  misc_feature (1)..(261): Homolog of NCBI NO: 34902606 NR Description: Putative fatty acid elongase
  misc_feature (1)..(261): Homolog of NCBI NO: 37534350 NR Description: putative beta-ketoacyl-CoA synthase
  misc_feature (262)..(262): Xaa is any aa, unknown or other
MDRQLLRTVKQATKNHAGLMYHRLVGHIPHLLVVTLLVVVAPQLSTLTPEKVRALWNTAVNAPALAMACWAAALAAYTYASSRPQPVYLVDLAGYKPPVELEASRAKTIVHFSRCGRFSEQSMAFQKRMLERSGLGEATHFPMSLIRLPVDMCDRTAMEESHAVIFGVVDEVLRKTGVDAGDVGVLIFNSSLLSPTPSFTSLIVNRYKFRDDIVTHNLSGMGCSAGIIAIDLAKRLLQVHRNTYALVVSTENITLNAYMGNXPSDAGDQHALPCRRRGDPPHQPGRRPGAVQVPADPHRAHPPRGARPEL

SEQ ID NO: 62418 - protein, 291 aa, Triticum aestivum
  peptide (1)..(291): Ceres Seq. ID no. 13503612
  misc_feature (66)..(236): Pfam Name: Chalcone and stilbene synthases, N-terminal domain Pfam Description: Chalcone and stilbene synthases, N-terminal
  misc_feature (1)..(245): Homolog of NCBI NO: 15223556 NR Description: very-long-chain fatty acid condensing enzyme
  misc_feature (1)..(242): Homolog of NCBI NO: 15226724 NR Description: very-long-chain fatty acid condensing enzyme
  misc_feature (1)..(245): Homolog of NCBI NO: 1045614 NR Description: beta-ketoacyl-CoA synthase
  misc_feature (1)..(245): Homolog of NCBI NO: 18377979 NR Description: putative beta-ketoacyl-CoA synthase [Arabidopsis
  misc_feature (1)..(245): Homolog of NCBI NO: 15219676 NR Description: beta-ketoacyl-CoA synthase, putative [Arabidopsis
  misc_feature (1)..(245): Homolog of NCBI NO: 15239981 NR Description: beta-ketoacyl-CoA synthase, putative [Arabidopsis
  misc_feature (1)..(245): Homolog of NCBI NO: 14334714 NR Description: putative beta-ketoacyl-CoA synthase [Arabidopsis
  misc_feature (1)..(245): Homolog of NCBI NO: 9714501 NR Description: putative fatty acid elongase [Zea mays]
  misc_feature (1)..(242): Homolog of NCBI NO: 34902606 NR Description: Putative fatty acid elongase
  misc_feature (1)..(242): Homolog of NCBI NO: 37534350 NR Description: putative beta-ketoacyl-CoA synthase
  misc_feature (243)..(243): Xaa is any aa, unknown or other
MYHRLVGHIPHLLVVTLLVVVAPQLSTLTPEKVRALWNTAVNAPALAMACWAAALAAYTYASSRPQPVYLVDLAGYKPPVELEASRAKTIVHFSRCGRFSEQSMAFQKRMLERSGLGEATHFPMSLIRLPVDMCDRTAMEESHAVIFGVVDEVLRKTGVDAGDVGVLIFNSSLLSPTPSFTSLIVNRYKFRDDIVTHNLSGMGCSAGIIAIDLAKRLLQVHRNTYALVVSTENITLNAYMGNXPSDAGDQHALPCRRRGDPPHQPGRRPGAVQVPADPHRAHPPRGARPEL

SEQ ID NO: 62419 - protein, 288 aa, Triticum aestivum
  peptide (1)..(288): Ceres Seq. ID no. 13503613
  misc_feature (283)..(283): Xaa is any aa, unknown or other
  misc_feature (284)..(284): Xaa is any aa, unknown or other
HSIHGSPRSTRVVIDRRGHHHHGSAAAEDGEAGDQEPRRPHVPPSRGPHPPPPRGHAARRRGAAALDADAGEGARPLEHSSERAGAGHGVLGGGAGGVHVRVVPPSASVSSGPRRVQAAGGAGGVARQDHRALLAVRAVQRAEHGVPEADAGAVGAGRGDALPHVADPPPRGHVRPDGHGGVPRRDLRRRRRGPPQDRRGRRRRGRAHLQLQPAQPDAVLHVAHREPLQVPRRHRHAQPQRHGVQRRHHRHRPRQAPAPGTPEHVRAGGEHGEHHPQRLHGQXXVRCW

SEQ ID NO: 62420 - DNA, 1401 bp, Triticum aestivum
  misc_feature (1)..(1401): Ceres Seq. ID no. 13596581
gctcttctccagtccgcctccctatccccacctcctccacaacccccaccccaccccacccctcctccgctgcccatcccagcacagcggaagcgatcggcaatggcgtcctccacccagggccaggtcatcacctgcaaagcggcggtggcgtacgaggcgaacaagccgctggtggtcgaggacgtgcaggtggcgccgccgcaggccggcgaggtccgcatcaagatcctctccaccgcgctctgccacaccgactactacacctggagcggcaaggatcctgagggtctctttccttgcattctcggtcacgaggctgctggaattgttgagagtgtcggcgaaggggtgaccgacgtgcagcctggggaccatgtcatcccttgctaccaagcggaatgcagggactgcaagatgtgcaacagcgggaagaccaacctctgcggcaaagttcgcggcgccactggggttggggtcatgatgagcgaccgcaagagccgcttctcggttaatgggaagcccatctaccatttcatggggacgtccacgttcagtcagtacactgttgtgcatgacgtcagtgttgccaagatcaacccacaggcgcccctggataaggtctgcctgctcggctgtggtgtttctactggccttggagcagtatggaatactgcaaaggttgaagcaggttccattgttgctgtttttgggcttggcacagtcggacttgcagttgctgagggggcaaaatcagctggtgcttctcggattattggcattgacattgataccaagaagtttgatgttgctaagaactttggagtcacagagtttgtgaacccaaaagaccatgacaaaccaatccagcaggtccttgttgaccttacagatggtggtgtggattacagttttgagtgcatcggaaatgtttctatcatgagggctgcactcgaatgctgccacaagggctggggtacctctgttgtcgttggcgtagctgcgtctggccaggagattgccacacggccattccagctagtcactggccgtgtctggaagggaacagctttcggcggcttcaagagccgaagccaggtcccgtggctcgtcgagaagtacatgaacaaggaaatcaaggtggacgagtacatcacccacaacatgaaccttaccgacatcaacaaggcgttcgacctgctgcacgaaggcggctgcctgcggtgcgtgctggccatggagcactgaggatcctgctatgtgaagccgagcagtttgcgtcgtgtgaaattgtaatgcagatctatcctccgccctgggactatagaactcgtttggccccgtttggcctagaaactcttgaacacgaaccgctgctataataatatgttgtgttggatg

SEQ ID NO: 62421 - protein, 415 aa, Triticum aestivum
  peptide (1)..(415): Ceres Seq. ID no. 13596582
  misc_feature (37)..(411): Homolog of NCBI NO: 13448051 NR Description: alcohol dehydrogenase class 3 [Branchiostoma
  misc_feature (39)..(411): Homolog of NCBI NO: 5902742 NR Description: ALCOHOL DEHYDROGENASE CLASS III
  misc_feature (39)..(411): Homolog of NCBI NO: 25283011 NR Description: alcohol dehydrogenase (EC 1.1.1.1) 3 - zebra fish
  misc_feature (39)..(411): Homolog of NCBI NO: 18858257 NR Description: alcohol dehydrogenase 5 [Danio rerio]
  misc_feature (38)..(413): Homolog of NCBI NO: 3121727 NR Description: ALCOHOL DEHYDROGENASE CLASS III
  misc_feature (38)..(411): Homolog of NCBI NO: 1498024 NR Description: glutathione-dependent formaldehyde dehydrogenase
  misc_feature (38)..(411): Homolog of NCBI NO: 15240054 NR Description: alcohol dehydrogenase class III
  misc_feature (38)..(411): Homolog of NCBI NO: 2129562 NR Description: alcohol dehydrogenase (EC 1.1.1.1) class III -
  misc_feature (35)..(414): Homolog of NCBI NO: 6225010 NR Description: ALCOHOL DEHYDROGENASE CLASS III
  misc_feature (35)..(414): Homolog of NCBI NO: 3023271 NR Description: ALCOHOL DEHYDROGENASE CLASS III
ALLQSASLSPPPPQPPPHPTPPPLPIPAQRKRSAMASSTQGQVITCKAAVAYEANKPLVVEDVQVAPPQAGEVRIKILSTALCHTDYYTWSGKDPEGLFPCILGHEAAGIVESVGEGVTDVQPGDHVIPCYQAECRDCKMCNSGKTNLCGKVRGATGVGVMMSDRKSRFSVNGKPIYHFMGTSTFSQYTVVHDVSVAKINPQAPLDKVCLLGCGVSTGLGAVWNTAKVEAGSIVAVFGLGTVGLAVAEGAKSAGASRIIGIDIDTKKFDVAKNFGVTEFVNPKDHDKPIQQVLVDLTDGGVDYSFECIGNVSIMRAALECCHKGWGTSVVVGVAASGQEIATRPFQLVTGRVWKGTAFGGFKSRSQVPWLVEKYMNKEIKVDEYITHNMNLTDINKAFDLLHEGGCLRCVLAMEH

SEQ ID NO: 62422 - protein, 381 aa, Triticum aestivum
  peptide (1)..(381): Ceres Seq. ID no. 13596583
  misc_feature (3)..(377): Homolog of NCBI NO: 13448051 NR Description: alcohol dehydrogenase class 3 [Branchiostoma
  misc_feature (5)..(377): Homolog of NCBI NO: 5902742 NR Description: ALCOHOL DEHYDROGENASE CLASS III
  misc_feature (5)..(377): Homolog of NCBI NO: 25283011 NR Description: alcohol dehydrogenase (EC 1.1.1.1) 3 - zebra fish
  misc_feature (5)..(377): Homolog of NCBI NO: 18858257 NR Description: alcohol dehydrogenase 5 [Danio rerio]
  misc_feature (4)..(379): Homolog of NCBI NO: 3121727 NR Description: ALCOHOL DEHYDROGENASE CLASS III
  misc_feature (4)..(377): Homolog of NCBI NO: 1498024 NR Description: glutathione-dependent formaldehyde dehydrogenase
  misc_feature (4)..(377): Homolog of NCBI NO: 15240054 NR Description: alcohol dehydrogenase class III
  misc_feature (4)..(377): Homolog of NCBI NO: 2129562 NR Description: alcohol dehydrogenase (EC 1.1.1.1) class III -
  misc_feature (1)..(380): Homolog of NCBI NO: 6225010 NR Description: ALCOHOL DEHYDROGENASE CLASS III
  misc_feature (1)..(380): Homolog of NCBI NO: 3023271 NR Description: ALCOHOL DEHYDROGENASE CLASS III
MASSTQGQVITCKAAVAYEANKPLVVEDVQVAPPQAGEVRIKILSTALCHTDYYTWSGKDPEGLFPCILGHEAAGIVESVGEGVTDVQPGDHVIPCYQAECRDCKMCNSGKTNLCGKVRGATGVGVMMSDRKSRFSVNGKPIYHFMGTSTFSQYTVVHDVSVAKINPQAPLDKVCLLGCGVSTGLGAVWNTAKVEAGSIVAVFGLGTVGLAVAEGAKSAGASRIIGIDIDTKKFDVAKNFGVTEFVNPKDHDKPIQQVLVDLTDGGVDYSFECIGNVSIMRAALECCHKGWGTSVVVGVAASGQEIATRPFQLVTGRVWKGTAFGGFKSRSQVPWLVEKYMNKEIKVDEYITHNMNLTDINKAFDLLHEGGCLRCVLAMEH

SEQ ID NO: 62423 - protein, 276 aa, Triticum aestivum
  peptide (1)..(276): Ceres Seq. ID no. 13596584
  misc_feature (1)..(272): Homolog of NCBI NO: 13448051 NR Description: alcohol dehydrogenase class 3 [Branchiostoma
  misc_feature (1)..(272): Homolog of NCBI NO: 5902742 NR Description: ALCOHOL DEHYDROGENASE CLASS III
  misc_feature (1)..(272): Homolog of NCBI NO: 25283011 NR Description: alcohol dehydrogenase (EC 1.1.1.1) 3 - zebra fish
  misc_feature (1)..(272): Homolog of NCBI NO: 18858257 NR Description: alcohol dehydrogenase 5 [Danio rerio]
  misc_feature (1)..(274): Homolog of NCBI NO: 3121727 NR Description: ALCOHOL DEHYDROGENASE CLASS III
  misc_feature (1)..(272): Homolog of NCBI NO: 1498024 NR Description: glutathione-dependent formaldehyde dehydrogenase
  misc_feature (1)..(272): Homolog of NCBI NO: 15240054 NR Description: alcohol dehydrogenase class III
  misc_feature (1)..(272): Homolog of NCBI NO: 2129562 NR Description: alcohol dehydrogenase (EC 1.1.1.1) class III -
  misc_feature (1)..(275): Homolog of NCBI NO: 6225010 NR Description: ALCOHOL DEHYDROGENASE CLASS III
  misc_feature (1)..(275): Homolog of NCBI NO: 3023271 NR Description: ALCOHOL DEHYDROGENASE CLASS III
MCNSGKTNLCGKVRGATGVGVMMSDRKSRFSVNGKPIYHFMGTSTFSQYTVVHDVSVAKINPQAPLDKVCLLGCGVSTGLGAVWNTAKVEAGSIVAVFGLGTVGLAVAEGAKSAGASRIIGIDIDTKKFDVAKNFGVTEFVNPKDHDKPIQQVLVDLTDGGVDYSFECIGNVSIMRAALECCHKGWGTSVVVGVAASGQEIATRPFQLVTGRVWKGTAFGGFKSRSQVPWLVEKYMNKEIKVDEYITHNMNLTDINKAFDLLHEGGCLRCVLAMEH

SEQ ID NO: 62424 - DNA, 1387 bp, Triticum aestivum
  misc_feature (1)..(1387): Ceres Seq. ID no. 13596585
cgaaaagcgcccagcaagcttgtatattcgctcagcctctctctctcttctccttacccagccgcctcgtgcccttgtcctctcccgtctccgaccgcgccgccgccactaggccacgaccgccgccccctcccccagcctcgcttcgctccggcggggatggaaaaccgcgatggttcctcattgccagactttcttgagctccagcgcacccgtgttctctgcaaggccgatgcccccactcatacagaggggtttcaatactcgggggcttttgctgctatgggagttgatactagtgtctcagttgagaagttctgcaagaactttaaaatcgagataaatcgacttacagatgaggatatggagtttgatatgattggcgttgatgcatcgatagctaatgctttccggagaatcctcattgcagaggttcctacaatggccattgagaaagtcttcatggttgacaatacatcagttatagcagatgaggtcctttcacaccgactaggccttattccacttgatgctgatccaaggctttttgattatatctctgatgatgtcccaaatgaaaggaatactattgtgtacaaactgcatgtttcatgtgaaaagggttcccaaagacttacagttaagtctggtcaattggagtggttgccagaaggcagtcaattaactatggcatctcctgcgcaatctggggacaatcagaggacctacacatcctttggtcaaagccaacagaatacctctgaaaggcctctcggtgtgaagtataatgacataacaattgccaggcttgggccaggacaggctattgagcttgaggcacatgctgttaagggagtggggaaagttcatgcgaagtggtctccagttgctacagcctggtacaggatgctccccgaggttgttcttctcaaagaaattaaaaatggtgatgcagaggagctagtgaaaagatgcccagttaatgtttttgacattgaagacctgggaaagggggagaagagagcagttgttgcaaagccaagagcatgcaccctttgtagggaatgtgtcagactggctgatgatcaagtagagctacggcgtgttagagaccacttcatttttacaatcgagtccaccggagctctaccgccggaggtgctcttcacagaggccgtgaagatccttgaggagaagtgcgagcgagtgatatccgaactttcctgagcccgacataaagttttcagtactgttctgatgcagtttttctattgctatgttgtgctgaggacgaaatcttagtgtactagtataggttactgtaaaacttctgcatccaatactctggagtcacattcagctaatttattaccgagccggtatatgc

SEQ ID NO: 62425 - protein, 408 aa, Triticum aestivum
  peptide (1)..(408): Ceres Seq. ID no. 13596586
  misc_feature (153)..(294): Pfam Name: RNA polymerase Rpb3/RpoA insert domain Pfam Description: RNA polymerase Rpb3/RpoA insert domain
  misc_feature (66)..(407): Homolog of NCBI NO: 6677787 NR Description: RNA polymerase 1-1; RNA polymerase 1-1 (40 kDa
  misc_feature (70)..(407): Homolog of NCBI NO: 1914859 NR Description: homologous to 40kD subunit of RNA-polymerase I
  misc_feature (66)..(407): Homolog of NCBI NO: 19113623 NR Description: dna-directed rna polymerases i and iii
  misc_feature (82)..(407): Homolog of NCBI NO: 14198113 NR Description: Unknown (protein for IMAGE:3448039) [Homo sapiens]
  misc_feature (66)..(407): Homolog of NCBI NO: 3914807 NR Description: DNA-directed RNA polymerase I 40 kDa polypeptide
  misc_feature (70)..(407): Homolog of NCBI NO: 34193909 NR Description: RNA polymerase 1-1 [Danio rerio]
  misc_feature (60)..(403): Homolog of NCBI NO: 514322 NR Description: RNA polymerase subunit
  misc_feature (60)..(403): Homolog of NCBI NO: 15219820 NR Description: RNA polymerase subunit [Arabidopsis thaliana]
  misc_feature (60)..(403): Homolog of NCBI NO: 21592304 NR Description: RNA polymerase subunit [Arabidopsis thaliana]
  misc_feature (60)..(408): Homolog of NCBI NO: 15219773 NR Description: RNA polymerase subunit [Arabidopsis thaliana]
RKAPSKLVYSLSLSLSSPYPAASCPCPLPSPTAPPPLGHDRRPLPQPRFAPAGMENRDGSSLPDFLELQRTRVLCKADAPTHTEGFQYSGAFAAMGVDTSVSVEKFCKNFKIEINRLTDEDMEFDMIGVDASIANAFRRILIAEVPTMAIEKVFMVDNTSVIADEVLSHRLGLIPLDADPRLFDYISDDVPNERNTIVYKLHVSCEKGSQRLTVKSGQLEWLPEGSQLTMASPAQSGDNQRTYTSFGQSQQNTSERPLGVKYNDITIARLGPGQAIELEAHAVKGVGKVHAKWSPVATAWYRMLPEVVLLKEIKNGDAEELVKRCPVNVFDIEDLGKGEKRAVVAKPRACTLCRECVRLADDQVELRRVRDHFIFTIESTGALPPEVLFTEAVKILEEKCERVISELS

SEQ ID NO: 62426 - protein, 355 aa, Triticum aestivum
  peptide (1)..(355): Ceres Seq. ID no. 13596587
  misc_feature (100)..(241): Pfam Name: RNA polymerase Rpb3/RpoA insert domain Pfam Description: RNA polymerase Rpb3/RpoA insert domain
  misc_feature (13)..(354): Homolog of NCBI NO: 6677787 NR Description: RNA polymerase 1-1; RNA polymerase 1-1 (40 kDa
  misc_feature (17)..(354): Homolog of NCBI NO: 1914859 NR Description: homologous to 40kD subunit of RNA-polymerase I
  misc_feature (13)..(354): Homolog of NCBI NO: 19113623 NR Description: dna-directed rna polymerases i and iii
  misc_feature (29)..(354): Homolog of NCBI NO: 14198113 NR Description: Unknown (protein for IMAGE:3448039) [Homo sapiens]
  misc_feature (13)..(354): Homolog of NCBI NO: 3914807 NR Description: DNA-directed RNA polymerase I 40 kDa polypeptide
  misc_feature (17)..(354): Homolog of NCBI NO: 34193909 NR Description: RNA polymerase 1-1 [Danio rerio]
  misc_feature (7)..(350): Homolog of NCBI NO: 514322 NR Description: RNA polymerase subunit
  misc_feature (7)..(350): Homolog of NCBI NO: 15219820 NR Description: RNA polymerase subunit [Arabidopsis thaliana]
  misc_feature (7)..(350): Homolog of NCBI NO: 21592304 NR Description: RNA polymerase subunit [Arabidopsis thaliana]
  misc_feature (7)..(355): Homolog of NCBI NO: 15219773 NR Description: RNA polymerase subunit [Arabidopsis thaliana]
MENRDGSSLPDFLELQRTRVLCKADAPTHTEGFQYSGAFAAMGVDTSVSVEKFCKNFKIEINRLTDEDMEFDMIGVDASIANAFRRILIAEVPTMAIEKVFMVDNTSVIADEVLSHRLGLIPLDADPRLFDYISDDVPNERNTIVYKLHVSCEKGSQRLTVKSGQLEWLPEGSQLTMASPAQSGDNQRTYTSFGQSQQNTSERPLGVKYNDITIARLGPGQAIELEAHAVKGVGKVHAKWSPVATAWYRMLPEVVLLKEIKNGDAEELVKRCPVNVFDIEDLGKGEKRAVVAKPRACTLCRECVRLADDQVELRRVRDHFIFTIESTGALPPEVLFTEAVKILEEKCERVISELS

SEQ ID NO: 62427 - protein, 314 aa, Triticum aestivum
  peptide (1)..(314): Ceres Seq. ID no. 13596588
  misc_feature (59)..(200): Pfam Name: RNA polymerase Rpb3/RpoA insert domain Pfam Description: RNA polymerase Rpb3/RpoA insert domain
  misc_feature (1)..(313): Homolog of NCBI NO: 6677787 NR Description: RNA polymerase 1-1; RNA polymerase 1-1 (40 kDa
  misc_feature (1)..(313): Homolog of NCBI NO: 1914859 NR Description: homologous to 40kD subunit of RNA-polymerase I
  misc_feature (1)..(313): Homolog of NCBI NO: 19113623 NR Description: dna-directed rna polymerases i and iii
  misc_feature (1)..(313): Homolog of NCBI NO: 14198113 NR Description: Unknown (protein for IMAGE:3448039) [Homo sapiens]
  misc_feature (1)..(313): Homolog of NCBI NO: 3914807 NR Description: DNA-directed RNA polymerase I 40 kDa polypeptide
  misc_feature (1)..(313): Homolog of NCBI NO: 34193909 NR Description: RNA polymerase 1-1 [Danio rerio]
  misc_feature (1)..(309): Homolog of NCBI NO: 514322 NR Description: RNA polymerase subunit
  misc_feature (1)..(309): Homolog of NCBI NO: 15219820 NR Description: RNA polymerase subunit [Arabidopsis thaliana]
  misc_feature (1)..(309): Homolog of NCBI NO: 21592304 NR Description: RNA polymerase subunit [Arabidopsis thaliana]
  misc_feature (1)..(314): Homolog of NCBI NO: 15219773 NR Description: RNA polymerase subunit [Arabidopsis thaliana]
MGVDTSVSVEKFCKNFKIEINRLTDEDMEFDMIGVDASIANAFRRILIAEVPTMAIEKVFMVDNTSVIADEVLSHRLGLIPLDADPRLFDYISDDVPNERNTIVYKLHVSCEKGSQRLTVKSGQLEWLPEGSQLTMASPAQSGDNQRTYTSFGQSQQNTSERPLGVKYNDITIARLGPGQAIELEAHAVKGVGKVHAKWSPVATAWYRMLPEVVLLKEIKNGDAEELVKRCPVNVFDIEDLGKGEKRAVVAKPRACTLCRECVRLADDQVELRRVRDHFIFTIESTGALPPEVLFTEAVKILEEKCERVISELS

SEQ ID NO: 62428 - DNA, 686 bp, Triticum aestivum
  misc_feature (1)..(686): Ceres Seq. ID no. 15175026
atcgatccgtggcatggctcgccgactctgccgtctccccgccctaaaccctagccccgccgctctcctccgtccctcatcctccccgacgccgacgccctccttccccgccttcccccgcctcttctcctcctcatccgcaggcgattccagcatggtggtcgtcggctcggcggactccttcgaggacatccacgccaaggtgcaagtggagaagctccccgccgtcttctactacacggcggtctggtgcgggccgtgtcgggcgatggcacctgtgatcgagaagatgagcaggcagtaccccaagataccagtctacaaggtcgacatcgacatggagggacttgggaccagacttagtaacctgaaaatattctctgtcccaactttccacttctatcacaaaggcgagaagagcagcgaagtggttggtgctgacgtgaagaagcttgaagctgccatggaaagtcttcacaagcaacagtgaagttgacttggagtgggggacagttcttttgcatgaagagttggagaggctgtaatgcttgtgatttgcgtgtttgacatggaaacttccgccttacgatcttgtttcgatatctggatacacactggccgcaaaacatcgatatctggatttatgccacgcttgagcacagcttttgtgcaatttctgcacgtct

SEQ ID NO: 62429 - protein, 162 aa, Triticum aestivum
  peptide (1)..(162): Ceres Seq. ID no. 15175027
  misc_feature (52)..(160): Pfam Name: Thioredoxin Pfam Description: Thioredoxin
  misc_feature (51)..(153): Homolog of NCBI NO: 1942873 NR Description: Thioredoxin H (Oxidized Form), Nmr, 23 Structures
  misc_feature (51)..(153): Homolog of NCBI NO: 1729934 NR Description: Thioredoxin H-type (TRX-H) (Thioredoxin CH1)
  misc_feature (51)..(153): Homolog of NCBI NO: 17943429 NR Description: Chain A, Crystal Structure Of A Mutated
  misc_feature (43)..(152): Homolog of NCBI NO: 14581677 NR Description: Hsp70 interacting protein/thioredoxin chimera
  misc_feature (60)..(157): Homolog of NCBI NO: 267114 NR Description: Thioredoxin 1
  misc_feature (74)..(158): Homolog of NCBI NO: 464883 NR Description: Thioredoxin
  misc_feature (54)..(160): Homolog of NCBI NO: 9755396 NR Description: F17F8.6 [Arabidopsis thaliana]
  misc_feature (40)..(160): Homolog of NCBI NO: 18397764 NR Description: thioredoxin family [Arabidopsis thaliana]
  misc_feature (66)..(160): Homolog of NCBI NO: 26453152 NR Description: putative thioredoxin [Arabidopsis thaliana]
  misc_feature (40)..(160): Homolog of NCBI NO: 15226875 NR Description: thioredoxin family [Arabidopsis thaliana]
SIRGMARRLCRLPALNPSPAALLRPSSSPTPTPSFPAFPRLFSSSSAGDSSMVVVGSADSFEDIHAKVQVEKLPAVFYYTAVWCGPCRAMAPVIEKMSRQYPKIPVYKVDIDMEGLGTRLSNLKIFSVPTFHFYHKGEKSSEVVGADVKKLEAAMESLHKQQ

SEQ ID NO: 62430 - protein, 158 aa, Triticum aestivum
  peptide (1)..(158): Ceres Seq. ID no. 15175028
  misc_feature (48)..(156): Pfam Name: Thioredoxin Pfam Description: Thioredoxin
  misc_feature (47)..(149): Homolog of NCBI NO: 1942873 NR Description: Thioredoxin H (Oxidized Form), Nmr, 23 Structures
  misc_feature (47)..(149): Homolog of NCBI NO: 1729934 NR Description: Thioredoxin H-type (TRX-H) (Thioredoxin CH1)
  misc_feature (47)..(149): Homolog of NCBI NO: 17943429 NR Description: Chain A, Crystal Structure Of A Mutated
  misc_feature (39)..(148): Homolog of NCBI NO: 14581677 NR Description: Hsp70 interacting protein/thioredoxin chimera
  misc_feature (56)..(153): Homolog of NCBI NO: 267114 NR Description: Thioredoxin 1
  misc_feature (70)..(154): Homolog of NCBI NO: 464883 NR Description: Thioredoxin
  misc_feature (50)..(156): Homolog of NCBI NO: 9755396 NR Description: F17F8.6 [Arabidopsis thaliana]
  misc_feature (36)..(156): Homolog of NCBI NO: 18397764 NR Description: thioredoxin family [Arabidopsis thaliana]
  misc_feature (62)..(156): Homolog of NCBI NO: 26453152 NR Description: putative thioredoxin [Arabidopsis thaliana]
  misc_feature (36)..(156): Homolog of NCBI NO: 15226875 NR Description: thioredoxin family [Arabidopsis thaliana]
MARRLCRLPALNPSPAALLRPSSSPTPTPSFPAFPRLFSSSSAGDSSMVVVGSADSFEDIHAKVQVEKLPAVFYYTAVWCGPCRAMAPVIEKMSRQYPKIPVYKVDIDMEGLGTRLSNLKIFSVPTFHFYHKGEKSSEVVGADVKKLEAAMESLHKQQ

SEQ ID NO: 62431 - protein, 111 aa, Triticum aestivum
  peptide (1)..(111): Ceres Seq. ID no. 15175029
  misc_feature (1)..(109): Pfam Name: Thioredoxin Pfam Description: Thioredoxin
  misc_feature (1)..(102): Homolog of NCBI NO: 1942873 NR Description: Thioredoxin H (Oxidized Form), Nmr, 23 Structures
  misc_feature (1)..(102): Homolog of NCBI NO: 1729934 NR Description: Thioredoxin H-type (TRX-H) (Thioredoxin CH1)
  misc_feature (1)..(102): Homolog of NCBI NO: 17943429 NR Description: Chain A, Crystal Structure Of A Mutated
  misc_feature (1)..(101): Homolog of NCBI NO: 14581677 NR Description: Hsp70 interacting protein/thioredoxin chimera
  misc_feature (9)..(106): Homolog of NCBI NO: 267114 NR Description: Thioredoxin 1
  misc_feature (23)..(107): Homolog of NCBI NO: 464883 NR Description: Thioredoxin
  misc_feature (3)..(109): Homolog of NCBI NO: 9755396 NR Description: F17F8.6 [Arabidopsis thaliana]
  misc_feature (1)..(109): Homolog of NCBI NO: 18397764 NR Description: thioredoxin family [Arabidopsis thaliana]
  misc_feature (15)..(109): Homolog of NCBI NO: 26453152 NR Description: putative thioredoxin [Arabidopsis thaliana]
  misc_feature (1)..(109): Homolog of NCBI NO: 15226875 NR Description: thioredoxin family [Arabidopsis thaliana]
MVVVGSADSFEDIHAKVQVEKLPAVFYYTAVWCGPCRAMAPVIEKMSRQYPKIPVYKVDIDMEGLGTRLSNLKIFSVPTFHFYHKGEKSSEVVGADVKKLEAAMESLHKQQ

SEQ ID NO: 62432 - DNA, 1029 bp, Triticum aestivum
  misc_feature (1)..(1029): Ceres Seq. ID no. 15175034
gaaaccaacaccatccgcggcgaccccttcttcccttccctgagacacttctccccaaagcgaacccagctgaaaagaagcgagacgcgccgcgccgcaccgcgttgcctttgtatatcgtggctctatttagctcaagaggagaggagaggagaggcgcgcggggaggggaaggagatcaaatcagatcaaaccgtaggaaaccatcgattgatcgagcagcggcggcgacgcggaagcaggaggggaggggggatggcggtggcgtatcgcgcggaggaggagtacgactacctgttcaaggtagtgctgatcggggacagcggcgtgggcaagtccaacctgctgtcgcgcttcgccagggacgagttcagcctcgacaccaggtccaccatcggcgtcgagttcgccaccaagaccgtccgcgtcgacggcaagctcgtcaaggcgcagatctgggacaccgccggccaagaaaggtaccgggccatcaccagcgcgtactaccggggcgccgtgggcgcgctcgtggtgtacgacgtgacgcgccacatcacgttcgagaacgcggagcggtggctgacggagctccgcgaccacacggacgccaacatcgtggtgatgctggtcgggaacaaggcggacctgcgccacctgagggccgtctcgcccgaggaggccagggccttcgcggagcgccaccgcaccttctccatggagacctccgcgctggaggccaccaacgtggaggacgccttcaccgaggtgctcggcgagatctaccgcgtcgtcagcaagaaggccctcgacatcggcgacgaccccgccgcgccgcctaggggcaagaccatcgacgttggcggcaaggacgacgtcaccccggtgaacacgggcggctgctgctcggcctagtcaaactctctccctctctatctctctctgccggagacggtggtaggtgatgccgtgtgtgtgcgtgctagggtgtaacaggcatgttgcgaccgtgatgattattggttattggtc

SEQ ID NO: 62433 - protein, 303 aa, Triticum aestivum
  peptide (1)..(303): Ceres Seq. ID no. 15175035
  misc_feature (101)..(262): Pfam Name: Ras family Pfam Description: Ras family
  misc_feature (82)..(301): Homolog of NCBI NO: 132521 NR Description: RAS-RELATED PROTEIN RGP1 (GTP-BINDING REGULATORY
  misc_feature (89)..(302): Homolog of NCBI NO: 15233873 NR Description: GTP-binding protein, putative [Arabidopsis
  misc_feature (89)..(303): Homolog of NCBI NO: 1370156 NR Description: RAB11H [Lotus corniculatus var. japonicus]
  misc_feature (97)..(303): Homolog of NCBI NO: 7438389 NR Description: GTP-binding protein, ras-like (clone vfa-ypt3a) -
  misc_feature (89)..(303): Homolog of NCBI NO: 15232477 NR Description: Ras family GTP-binding protein, putative
  misc_feature (89)..(303): Homolog of NCBI NO: 15218719 NR Description: GTP-binding protein, putative [Arabidopsis
  misc_feature (86)..(303): Homolog of NCBI NO: 3024504 NR Description: RAS-RELATED PROTEIN RAB11B
  misc_feature (89)..(302): Homolog of NCBI NO: 15239462 NR Description: GTP-binding protein, putative [Arabidopsis
  misc_feature (89)..(303): Homolog of NCBI NO: 7438432 NR Description: GTP-binding protein - garden pea
  misc_feature (87)..(303): Homolog of NCBI NO: 34910940 NR Description: putative GTP-binding protein
ETNTIRGDPFFPSLRHFSPKRTQLKRSETRRAAPRCLCISWLYLAQEERRGEARGEGKEIKSDQTVGNHRLIEQRRRRGSRRGGGMAVAYRAEEEYDYLFKVVLIGDSGVGKSNLLSRFARDEFSLDTRSTIGVEFATKTVRVDGKLVKAQIWDTAGQERYRAITSAYYRGAVGALVVYDVTRHITFENAERWLTELRDHTDANIVVMLVGNKADLRHLRAVSPEEARAFAERHRTFSMETSALEATNVEDAFTEVLGEIYRVVSKKALDIGDDPAAPPRGKTIDVGGKDDVTPVNTGGCCSA

SEQ ID NO: 62434 - protein, 278 aa, Triticum aestivum
  peptide (1)..(278): Ceres Seq. ID no. 15175036
NQHHPRRPLLPFPETLLPKANPAEKKRDAPRRTALPLYIVALFSSRGEERRGARGGEGDQIRSNRRKPSIDRAAAATRKQEGRGDGGGVSRGGGVRLPVQGSADRGQRRGQVQPAVALRQGRVQPRHQVHHRRRVRHQDRPRRRQARQGADLGHRRPRKVPGHHQRVLPGRRGRARGVRRDAPHHVRERGAVADGAPRPHGRQHRGDAGREQGGPAPPEGRLARGGQGLRGAPPHLLHGDLRAGGHQRGGRLHRGARRDLPRRQQEGPRHRRRPRRAA

SEQ ID NO: 62435 - protein, 218 aa, Triticum aestivum
  peptide (1)..(218): Ceres Seq. ID no. 15175037
  misc_feature (16)..(177): Pfam Name: Ras family Pfam Description: Ras family
  misc_feature (1)..(216): Homolog of NCBI NO: 132521 NR Description: RAS-RELATED PROTEIN RGP1 (GTP-BINDING REGULATORY
  misc_feature (4)..(217): Homolog of NCBI NO: 15233873 NR Description: GTP-binding protein, putative [Arabidopsis
  misc_feature (4)..(218): Homolog of NCBI NO: 1370156 NR Description: RAB11H [Lotus corniculatus var. japonicus]
  misc_feature (12)..(218): Homolog of NCBI NO: 7438389 NR Description: GTP-binding protein, ras-like (clone vfa-ypt3a) -
  misc_feature (4)..(218): Homolog of NCBI NO: 15232477 NR Description: Ras family GTP-binding protein, putative
  misc_feature (4)..(218): Homolog of NCBI NO: 15218719 NR Description: GTP-binding protein, putative [Arabidopsis
  misc_feature (1)..(218): Homolog of NCBI NO: 3024504 NR Description: RAS-RELATED PROTEIN RAB11B
  misc_feature (4)..(217): Homolog of NCBI NO: 15239462 NR Description: GTP-binding protein, putative [Arabidopsis
  misc_feature (4)..(218): Homolog of NCBI NO: 7438432 NR Description: GTP-binding protein - garden pea
  misc_feature (2)..(218): Homolog of NCBI NO: 34910940 NR Description: putative GTP-binding protein
MAVAYRAEEEYDYLFKVVLIGDSGVGKSNLLSRFARDEFSLDTRSTIGVEFATKTVRVDGKLVKAQIWDTAGQERYRAITSAYYRGAVGALVVYDVTRHITFENAERWLTELRDHTDANIVVMLVGNKADLRHLRAVSPEEARAFAERHRTFSMETSALEATNVEDAFTEVLGEIYRVVSKKALDIGDDPAAPPRGKTIDVGGKDDVTPVNTGGCCSA

SEQ ID NO: 62436 - DNA, 887 bp, Triticum aestivum
  misc_feature (1)..(887): Ceres Seq. ID no. 15175022
agagtccttcccgagcgcggacagcgggctcctaccagcagcgtctccctccgacctccctggagcagccgctcacgcccagcaacgtcgccgcccggatctacgccgtcgaccattccataggcagggcatcaacactgtcaattgcagaggcttggacctgcttcggcatccagtagagcaaacaagaaggtcaagccggaaacaaatatttcatcctcgttcggacttctcatctcgcaatggaagccaagttctttcggttcctgaagcttgttggagttggcttcaaagccaggacagagcgcgaaggccgcgagttgtttctgaaactgggctacagccatgaggtgcagttcaccgctccacctgccgtccgcgtcttctgcttcaagcccaacataatatgctgtactggcattgacaagcatagagtgcaccatttcgctggagctgtccgatgcagtaaacctccagaagtgtacaaggggaagggcatactgtacatcgacgaggtcataaagctgaagccggggaagaaacagcagaagaagtaacacatgggtaaacctccccatttgacttctagcttgtttagacgccccatcacatttgtggtgccgcggatttcatgtggtttttctcgtgccgggttttggctagccctagtaccatgctggacttcgtaataatactctgtatgctatgggaatcatctggtgagcatgtactgtatgacttgcataccgtgggggcggatcagcacatttgaacatttgtgtttttgttttgggctggctagatgcatgtaacagcccaatgtgtttgttgatgtcactactttcttcatattttctctacacaatattagctcgttgctttgttac

SEQ ID NO: 62437 - protein, 115 aa, Triticum aestivum
  peptide (1)..(115): Ceres Seq. ID no. 15175023
ESFPSADSGLLPAASPSDLPGAAAHAQQRRRPDLRRRPFHRQGINTVNCRGLDLLRHPVEQTRRSSRKQIFHPRSDFSSRNGSQVLSVPEACWSWLQSQDRARRPRVVSETGLQP

SEQ ID NO: 62438 - protein, 104 aa, Triticum aestivum
  peptide (1)..(104): Ceres Seq. ID no. 15175024
  misc_feature (12)..(88): Pfam Name: Ribosomal protein L6 Pfam Description: Ribosomal protein L6
  misc_feature (1)..(99): Homolog of NCBI NO: 23022259 NR Description: hypothetical protein [Clostridium thermocellum
  misc_feature (6)..(101): Homolog of NCBI NO: 6066163 NR Description: ribosomal protein L6 [Nephroselmis olivacea]
  misc_feature (1)..(100): Homolog of NCBI NO: 15644233 NR Description: ribosomal protein L6 [Thermotoga maritima]
  misc_feature (1)..(100): Homolog of NCBI NO: 3980237 NR Description: ribosomal protein L6 [Thermotoga maritima]
  misc_feature (1)..(101): Homolog of NCBI NO: 11466518 NR Description: ribosomal protein L6 [Reclinomonas americana]
  misc_feature (1)..(101): Homolog of NCBI NO: 22550351 NR Description: ribosomal protein L6 [Chaetosphaeridium globosum]
  misc_feature (1)..(101): Homolog of NCBI NO: 38638291 NR Description: ribosomal protein L6 [Chara vulgaris]
  misc_feature (1)..(101): Homolog of NCBI NO: 11467124 NR Description: rpl6 [Marchantia polymorpha]
  misc_feature (1)..(102): Homolog of NCBI NO: 25411865 NR Description: probable ribosomal protein L6 [imported] -
  misc_feature (1)..(102): Homolog of NCBI NO: 18398731 NR Description: ribosomal protein L6p family [Arabidopsis
MEAKFFRFLKLVGVGFKARTEREGRELFLKLGYSHEVQFTAPPAVRVFCFKPNIICCTGIDKHRVHHFAGAVRCSKPPEVYKGKGILYIDEVIKLKPGKKQQKK

SEQ ID NO: 62439 - protein, 58 aa, Triticum aestivum
  peptide (1)..(58): Ceres Seq. ID no. 15175025
  misc_feature (17)..(58): Homolog of NCBI NO: 34849407 NR Description: ribosomal protein L6 [Spiroplasma kunkelii]
  misc_feature (28)..(58): Homolog of NCBI NO: 22979003 NR Description: hypothetical protein [Ralstonia metallidurans]
SPSRARTAGSYQQRLPPTSLEQPLTPSNVAARIYAVDHSIGRASTLSIAEAWTCFGIQ

SEQ ID NO: 62440 - DNA, 1276 bp, Triticum aestivum
  misc_feature (1)..(1276): Ceres Seq. ID no. 12615976
agccagggcaaacagagaggacggacggaagaagtaagttccaggcagaggagacagagtgaccgacggagggaaggttccacctacccaccgagcgatcgaccgggcgggcggcgatccatggcggcgaacgggcatcagatccagccggcggaggaggcgatgaagctcatcatcgacaccgatcccggcatagacgacagcgtggcgatcatgatggcgttccaagcgccgggcgtggaggtcctagggctcaccaccatcttcggcaactgcaccaccgcatacgccacccgcaacgccttgatactgtgtgagaaggcaggccgccccgacgtgccggtggcggagggcagcgccgagcctctcaagggagggaagccgcaagttgccgactttgttcacggatccgatggcctcgggaacgtatcagttcctgaacctaccaccaagaaagcagagcaaaccgccgcagagtttctggtcgacaaggtgtcgcagttccccggggaggtctcggtgctcgccttgggccctctgaccaacctcgcattggccatcaagatggacccctcctttgtgagcaaggtgaagaagatagtggtgctgggtggagccttctttgcagcagggaatgccaccccttcagccgaggcaaacatccacagcgacccagaggcggcggacatggtgttcacgtcgggcgcggacatcgccgtggtcggcctcaacatcaccacccaggtgagcttcacggaggcggacctgtcggagctgaggaggtccgggggcaagcaggcgcagttcctctgcgacatctgcaagttctacagcgactggcacctccactcgtacggcgaccccgccgtgttcctgcacgacccggtgagcctcgcggcgctggtccggccggagctcttcacgttcaggaagggcgtggtgcgggtggagacccagggcatctgcagaggccacacctccatggacatggggctcaagaagttcaagtcggagaacgcgtggtcgggctacacgcccatctcggtggcgtggacggtggacaaggccaaggtggtcgccttcgtcaaggagctcctcaaaaattaatcaggagttcatgatctgtatatctggtcatcaaatgatttgaaaccgtagagatccgtcggtcgatcgacccgtaatttatgtgtaccccattctgacgcacttcatgcagacacattgtctcgtggaattattgaactgctcgtcgtgaattgtcatgatggaaccc

SEQ ID NO: 62441 - protein, 368 aa, Triticum aestivum
  peptide (1)..(368): Ceres Seq. ID no. 12615977
  misc_feature (56)..(366): Pfam Name: Inosine-uridine preferring nucleoside hydrolase Pfam Description: Inosine-uridine preferring nucleoside hydrolase
  misc_feature (56)..(363): Homolog of NCBI NO: 17935486 NR Description: inosine-uridine preferring nucleoside hydrolase
  misc_feature (44)..(363): Homolog of NCBI NO: 15888904 NR Description: AGR_C_2923p [Agrobacterium tumefaciens]
  misc_feature (56)..(366): Homolog of NCBI NO: 15966659 NR Description: PUTATIVE NUCLEOSIDE HYDROLASE PROTEIN
  misc_feature (255)..(366): Homolog of NCBI NO: 25321071 NR Description: hypothetical protein [imported] - Arabidopsis
  misc_feature (56)..(256): Homolog of NCBI NO: 25321071 NR Description: hypothetical protein [imported] - Arabidopsis
  misc_feature (56)..(366): Homolog of NCBI NO: 18390550 NR Description: expressed protein
  misc_feature (56)..(366): Homolog of NCBI NO: 30089728 NR Description: putative inosine-uridine preferring nucleoside
  misc_feature (290)..(335): Homolog of NCBI NO: 25321061 NR Description: hypothetical protein At2g36310 [imported] -
  misc_feature (69)..(313): Homolog of NCBI NO: 25321061 NR Description: hypothetical protein At2g36310 [imported] -
  misc_feature (56)..(367): Homolog of NCBI NO: 18404099 NR Description: expressed protein
SQGKQRGRTEEVSSRQRRQSDRRREGSTYPPSDRPGGRRSMAANGHQIQPAEEAMKLIIDTDPGIDDSVAIMMAFQAPGVEVLGLTTIFGNCTTAYATRNALILCEKAGRPDVPVAEGSAEPLKGGKPQVADFVHGSDGLGNVSVPEPTTKKAEQTAAEFLVDKVSQFPGEVSVLALGPLTNLALAIKMDPSFVSKVKKIVVLGGAFFAAGNATPSAEANIHSDPEAADMVFTSGADIAVVGLNITTQVSFTEADLSELRRSGGKQAQFLCDICKFYSDWHLHSYGDPAVFLHDPVSLAALVRPELFTFRKGVVRVETQGICRGHTSMDMGLKKFKSENAWSGYTPISVAWTVDKAKVVAFVKELLKN

SEQ ID NO: 62442 - protein, 328 aa, Triticum aestivum
  peptide (1)..(328): Ceres Seq. ID no. 12615978
  misc_feature (16)..(326): Pfam Name: Inosine-uridine preferring nucleoside hydrolase Pfam Description: Inosine-uridine preferring nucleoside hydrolase
  misc_feature (16)..(323): Homolog of NCBI NO: 17935486 NR Description: inosine-uridine preferring nucleoside hydrolase
  misc_feature (4)..(323): Homolog of NCBI NO: 15888904 NR Description: AGR_C_2923p [Agrobacterium tumefaciens]
  misc_feature (16)..(326): Homolog of NCBI NO: 15966659 NR Description: PUTATIVE NUCLEOSIDE HYDROLASE PROTEIN
  misc_feature (215)..(326): Homolog of NCBI NO: 25321071 NR Description: hypothetical protein [imported] - Arabidopsis
  misc_feature (16)..(216): Homolog of NCBI NO: 25321071 NR Description: hypothetical protein [imported] - Arabidopsis
  misc_feature (16)..(326): Homolog of NCBI NO: 18390550 NR Description: expressed protein
  misc_feature (16)..(326): Homolog of NCBI NO: 30089728 NR Description: putative inosine-uridine preferring nucleoside
  misc_feature (250)..(295): Homolog of NCBI NO: 25321061 NR Description: hypothetical protein At2g36310 [imported] -
  misc_feature (29)..(273): Homolog of NCBI NO: 25321061 NR Description: hypothetical protein At2g36310 [imported] -
  misc_feature (16)..(327): Homolog of NCBI NO: 18404099 NR Description: expressed protein
MAANGHQIQPAEEAMKLIIDTDPGIDDSVAIMMAFQAPGVEVLGLTTIFGNCTTAYATRNALILCEKAGRPDVPVAEGSAEPLKGGKPQVADFVHGSDGLGNVSVPEPTTKKAEQTAAEFLVDKVSQFPGEVSVLALGPLTNLALAIKMDPSFVSKVKKIVVLGGAFFAAGNATPSAEANIHSDPEAADMVFTSGADIAVVGLNITTQVSFTEADLSELRRSGGKQAQFLCDICKFYSDWHLHSYGDPAVFLHDPVSLAALVRPELFTFRKGVVRVETQGICRGHTSMDMGLKKFKSENAWSGYTPISVAWTVDKAKVVAFVKELLKN

SEQ ID NO: 62443 - protein, 314 aa, Triticum aestivum
  peptide (1)..(314): Ceres Seq. ID no. 12615979
  misc_feature (2)..(312): Pfam Name: Inosine-uridine preferring nucleoside hydrolase Pfam Description: Inosine-uridine preferring nucleoside hydrolase
  misc_feature (2)..(309): Homolog of NCBI NO: 17935486 NR Description: inosine-uridine preferring nucleoside hydrolase
  misc_feature (1)..(309): Homolog of NCBI NO: 15888904 NR Description: AGR_C_2923p [Agrobacterium tumefaciens]
  misc_feature (2)..(312): Homolog of NCBI NO: 15966659 NR Description: PUTATIVE NUCLEOSIDE HYDROLASE PROTEIN
  misc_feature (201)..(312): Homolog of NCBI NO: 25321071 NR Description: hypothetical protein [imported] - Arabidopsis
  misc_feature (2)..(202): Homolog of NCBI NO: 25321071 NR Description: hypothetical protein [imported] - Arabidopsis
  misc_feature (2)..(312): Homolog of NCBI NO: 18390550 NR Description: expressed protein
  misc_feature (2)..(312): Homolog of NCBI NO: 30089728 NR Description: putative inosine-uridine preferring nucleoside
  misc_feature (236)..(281): Homolog of NCBI NO: 25321061 NR Description: hypothetical protein At2g36310 [imported] -
  misc_feature (15)..(259): Homolog of NCBI NO: 25321061 NR Description: hypothetical protein At2g36310 [imported] -
  misc_feature (2)..(313): Homolog of NCBI NO: 18404099 NR Description: expressed protein
MKLIIDTDPGIDDSVAIMMAFQAPGVEVLGLTTIFGNCTTAYATRNALILCEKAGRPDVPVAEGSAEPLKGGKPQVADFVHGSDGLGNVSVPEPTTKKAEQTAAEFLVDKVSQFPGEVSVLALGPLTNLALAIKMDPSFVSKVKKIVVLGGAFFAAGNATPSAEANIHSDPEAADMVFTSGADIAVVGLNITTQVSFTEADLSELRRSGGKQAQFLCDICKFYSDWHLHSYGDPAVFLHDPVSLAALVRPELFTFRKGVVRVETQGICRGHTSMDMGLKKFKSENAWSGYTPISVAWTVDKAKVVAFVKELLKN

SEQ ID NO: 62444 - DNA, 1251 bp, Triticum aestivum
  misc_feature (1)..(1251): Ceres Seq. ID no. 12615291
cttttttttccagcacagctagcagccagcgagttctttgcccgtctataaatgagccaaaacccaagccaacccgaggcacaaagctctacaaccagaagccaaaaccgaaccgaggaagcagcagcagatcaaaccgcagacgaagacaccgtcgcaagagaacgagagaatggcggccatctcctccacctcctacttctcctcgcagccgcagctgccggcgtccggaggcggcagcaacggccggcagccgcggaggcgtcggatggggggcagctgcgtcatgctcgaggcggccgctgcctctggtagtggtggtggcggcgtggtggtggggaggacgaggagcctgacggaggaggacctggaggagctcaagggctgcctcgacctcggcttcggcttctcctaccaccagatcccgggcctctgcgggacgctccccggcctggagctctgctactccatgacgcggaggttcctcgacgagcagaggacggtggtcgggcagctggagcccgttgcggcggcggcgcccatcccggactggaagatctccggccctggtgatagtccagaggaagtgaaagctaggctcaagtattgggcccagacagtggcatgcacagtcaaactatgcagctgatggagattggtagtgtgctggttctctcttaacatatatgctactacaagctgaactggaggtggctgaagttgaagaacgatgcttatatggtattgggcttggtgggcaagtgcagaggaggtgcttctgcttcgtgttatcgaggcgacagaactgaccactgcttttgccaaacttcggaggggggagaggattgctgacaacatggaactgagaaatcgcgaggcggtccgcagtcgagcttttctgaaagcatcagaagcttgccgttcctcgtgaggtgacttgtctctacatggcgcagcggttgcaagtgcctgagacctctgcttgtttctgctcttccttgtagtgctcactaggtgctccggttgcaccgtgctgctccggcttgagctttgcaaatccttgggtggatttgttcaattataattttgttttattgctcctttcaccttagatttgctttggagcagtagaccttgtataggacttgcatgtacgtatctgttgattctgctgtactgcactcggagggtgcagaaacagtttctgaaataaatttctgcgtccagcctaacagcaaactgtggctgttg

SEQ ID NO: 62445 - protein, 158 aa, Triticum aestivum
  peptide (1)..(158): Ceres Seq. ID no. 12615292
  misc_feature (55)..(155): Homolog of NCBI NO: 21617998 NR Description: unknown [Arabidopsis thaliana]
  misc_feature (55)..(155): Homolog of NCBI NO: 18418346 NR Description: Expressed protein
  misc_feature (61)..(154): Homolog of NCBI NO: 15228829 NR Description: hypothetical protein; protein id: At3g22690.1
  misc_feature (20)..(134): Homolog of NCBI NO: 25408168 NR Description: hypothetical protein At2g31560 [imported] -
  misc_feature (1)..(151): Homolog of NCBI NO: 15221309 NR Description: unknown protein; protein id: At1g05870.1
  misc_feature (2)..(155): Homolog of NCBI NO: 25408860 NR Description: hypothetical protein At2g43340 [imported] -
  misc_feature (2)..(158): Homolog of NCBI NO: 30689349 NR Description: expressed protein [Arabidopsis thaliana]
  misc_feature (1)..(158): Homolog of NCBI NO: 25406874 NR Description: hypothetical protein [imported] - Arabidopsis
  misc_feature (20)..(158): Homolog of NCBI NO: 30684991 NR Description: expressed protein [Arabidopsis thaliana]
  misc_feature (1)..(143): Homolog of NCBI NO: 34907664 NR Description: P0506A10.18 [Oryza sativa (japonica
MAAISSTSYFSSQPQLPASGGGSNGRQPRRRRMGGSCVMLEAAAASGSGGGGVVVGRTRSLTEEDLEELKGCLDLGFGFSYHQIPGLCGTLPGLELCYSMTRRFLDEQRTVVGQLEPVAAAAPIPDWKISGPGDSPEEVKARLKYWAQTVACTVKLCS

SEQ ID NO: 62446 - protein, 126 aa, Triticum aestivum
  peptide (1)..(126): Ceres Seq. ID no. 12615293
  misc_feature (23)..(123): Homolog of NCBI NO: 21617998 NR Description: unknown [Arabidopsis thaliana]
  misc_feature (23)..(123): Homolog of NCBI NO: 18418346 NR Description: Expressed protein
  misc_feature (29)..(122): Homolog of NCBI NO: 15228829 NR Description: hypothetical protein; protein id: At3g22690.1
  misc_feature (1)..(102): Homolog of NCBI NO: 25408168 NR Description: hypothetical protein At2g31560 [imported] -
  misc_feature (1)..(119): Homolog of NCBI NO: 15221309 NR Description: unknown protein; protein id: At1g05870.1
  misc_feature (1)..(123): Homolog of NCBI NO: 25408860 NR Description: hypothetical protein At2g43340 [imported] -
  misc_feature (1)..(126): Homolog of NCBI NO: 30689349 NR Description: expressed protein [Arabidopsis thaliana]
  misc_feature (1)..(126): Homolog of NCBI NO: 25406874 NR Description: hypothetical protein [imported] - Arabidopsis
  misc_feature (1)..(126): Homolog of NCBI NO: 30684991 NR Description: expressed protein [Arabidopsis thaliana]
  misc_feature (1)..(111): Homolog of NCBI NO: 34907664 NR Description: P0506A10.18 [Oryza sativa (japonica
MGGSCVMLEAAAASGSGGGGVVVGRTRSLTEEDLEELKGCLDLGFGFSYHQIPGLCGTLPGLELCYSMTRRFLDEQRTVVGQLEPVAAAAPIPDWKISGPGDSPEEVKARLKYWAQTVACTVKLCS

SEQ ID NO: 62447 - protein, 120 aa, Triticum aestivum
  peptide (1)..(120): Ceres Seq. ID no. 12615294
  misc_feature (17)..(117): Homolog of NCBI NO: 21617998 NR Description: unknown [Arabidopsis thaliana]
  misc_feature (17)..(117): Homolog of NCBI NO: 18418346 NR Description: Expressed protein
  misc_feature (23)..(116): Homolog of NCBI NO: 15228829 NR Description: hypothetical protein; protein id: At3g22690.1
  misc_feature (1)..(96): Homolog of NCBI NO: 25408168 NR Description: hypothetical protein At2g31560 [imported] -
  misc_feature (1)..(113): Homolog of NCBI NO: 15221309 NR Description: unknown protein; protein id: At1g05870.1
  misc_feature (1)..(117): Homolog of NCBI NO: 25408860 NR Description: hypothetical protein At2g43340 [imported] -
  misc_feature (1)..(120): Homolog of NCBI NO: 30689349 NR Description: expressed protein [Arabidopsis thaliana]
  misc_feature (1)..(120): Homolog of NCBI NO: 25406874 NR Description: hypothetical protein [imported] - Arabidopsis
  misc_feature (1)..(120): Homolog of NCBI NO: 30684991 NR Description: expressed protein [Arabidopsis thaliana]
  misc_feature (1)..(105): Homolog of NCBI NO: 34907664 NR Description: P0506A10.18 [Oryza sativa (japonica
MLEAAAASGSGGGGVVVGRTRSLTEEDLEELKGCLDLGFGFSYHQIPGLCGTLPGLELCYSMTRRFLDEQRTVVGQLEPVAAAAPIPDWKISGPGDSPEEVKARLKYWAQTVACTVKLCS

SEQ ID NO: 62448 - DNA, 1428 bp, Triticum aestivum
  misc_feature (1)..(1428): Ceres Seq. ID no. 13596593
actcaccaacttttcctttgctggtttgttctcttgcgctttcccgaaaggaggaaagggggagaaaaaaatcgcacccaaatccttcgagcagaaccaaatccgtcacgactccacgagcgctcgagcagggcaacacagattcgcgcagcccacctcgtcgagcattccccatcagatcggatcgaatccggcggcggtgatggcggcggagaagctggccccggcgaaggtgctctactgcggcgtgtgcggcctccccgcggagtactgcgagttcggccccgacttcgagcgctgcaagccgtggctccgcgcccacgcgcccggcgtctaccccgacgagctcgtggcctcctcctccggcggcgatgataaggacgtcggcaaggtcggcgagcgcctccagggcgtcagcatctccaccgccgacggctccacaagcgcagggggtgcttcggcatcttctaagactgaagaggtgaaacgactgcccggtggcaagctcaagaaaaaggacaagcaagaggttattattgagaagattgtccgcaacaagcgcaagtgtgtcactgtggtgaaaggcctggatttgtttggtgtaaagctgagtgatgcttcaaagaagcttggaaagaagtttgctactggagcttcggttgtcaagggcccaactgagaaggagcaaatcgatgtccaaggagacatatcatatgatgttgtggacttcattacagctacatggcctgatgttcctgaatccgccgtatatttcatagaagatggaaggaaggttgctgctgcttgattgcatatggtttacaaggcaatacaccagtggagctacaaatatgatagaaatataaggcaagagatggccgttaaggcatgcctgtcaaatgggttctttatccttactcccaagacacaactcgctccattttgacttgtgggtcagttcacaagtggtgttttaattactgctggcatgtcgccttcgtgtatcatcttttatttgatagccgagttcctcctgcaggcaagtatgacatccatatgtggtttatatatgtttaatgtgcttttgaatcctagtttcagaacaattcagtaccaactatctgtggacctgcagagataagtgcagattagtagtgctccagtctcctgtgctttcataggaacagtctggtgttttgtgttactttgtattgcatccagcaagttataacctacttttagggagatagatcgttgtcggtgtgcaccattggtattttgtcatcattttgttgcagagtcctgtgtgaagcccattattataaaaaagaagcaagatagatctggatgatgcatcatgaattagtgtggccatgtaattattataaaagtatttccgataaattgccattttcattaaacttgttc

SEQ ID NO: 62449 - protein, 268 aa, Triticum aestivum
  peptide (1)..(268): Ceres Seq. ID no. 13596594
  misc_feature (75)..(241): Homolog of NCBI NO: 4755083 NR Description: density regulated protein drp1 [Homo sapiens]
  misc_feature (77)..(244): Homolog of NCBI NO: 6322474 NR Description: Hypothetical ORF; Yjr014wp [Saccharomyces
  misc_feature (75)..(264): Homolog of NCBI NO: 34872329 NR Description: similar to density-regulated protein [Rattus
  misc_feature (75)..(125): Homolog of NCBI NO: 18859973 NR Description: CG9099-PA [Drosophila melanogaster]
  misc_feature (152)..(264): Homolog of NCBI NO: 18859973 NR Description: CG9099-PA [Drosophila melanogaster]
  misc_feature (68)..(261): Homolog of NCBI NO: 19113595 NR Description: hypothetical protein [Schizosaccharomyces pombe]
  misc_feature (70)..(161): Homolog of NCBI NO: 11357422 NR Description: hypothetical protein F14F18.70 - Arabidopsis
  misc_feature (155)..(267): Homolog of NCBI NO: 11357422 NR Description: hypothetical protein F14F18.70 - Arabidopsis
  misc_feature (70)..(267): Homolog of NCBI NO: 22326739 NR Description: expressed protein [Arabidopsis thaliana]
  misc_feature (25)..(259): Homolog of NCBI NO: 34903554 NR Description: P0001B06.29 [Oryza sativa (japonica
LTNFSFAGLFSCAFPKGGKGEKKIAPKSFEQNQIRHDSTSARAGQHRFAQPTSSSIPHQIGSNPAAVMAAEKLAPAKVLYCGVCGLPAEYCEFGPDFERCKPWLRAHAPGVYPDELVASSSGGDDKDVGKVGERLQGVSISTADGSTSAGGASASSKTEEVKRLPGGKLKKKDKQEVIIEKIVRNKRKCVTVVKGLDLFGVKLSDASKKLGKKFATGASVVKGPTEKEQIDVQGDISYDVVDFITATWPDVPESAVYFIEDGRKVAAA

SEQ ID NO: 62450 - protein, 201 aa, Triticum aestivum
  peptide (1)..(201): Ceres Seq. ID no. 13596595
  misc_feature (8)..(174): Homolog of NCBI NO: 4755083 NR Description: density regulated protein drp1 [Homo sapiens]
  misc_feature (10)..(177): Homolog of NCBI NO: 6322474 NR Description: Hypothetical ORF; Yjr014wp [Saccharomyces
  misc_feature (8)..(197): Homolog of NCBI NO: 34872329 NR Description: similar to density-regulated protein [Rattus
  misc_feature (8)..(58): Homolog of NCBI NO: 18859973 NR Description: CG9099-PA [Drosophila melanogaster]
  misc_feature (85)..(197): Homolog of NCBI NO: 18859973 NR Description: CG9099-PA [Drosophila melanogaster]
  misc_feature (1)..(194): Homolog of NCBI NO: 19113595 NR Description: hypothetical protein [Schizosaccharomyces pombe]
  misc_feature (3)..(94): Homolog of NCBI NO: 11357422 NR Description: hypothetical protein F14F18.70 - Arabidopsis
  misc_feature (88)..(200): Homolog of NCBI NO: 11357422 NR Description: hypothetical protein F14F18.70 - Arabidopsis
  misc_feature (3)..(200): Homolog of NCBI NO: 22326739 NR Description: expressed protein [Arabidopsis thaliana]
  misc_feature (1)..(192): Homolog of NCBI NO: 34903554 NR Description: P0001B06.29 [Oryza sativa (japonica
MAAEKLAPAKVLYCGVCGLPAEYCEFGPDFERCKPWLRAHAPGVYPDELVASSSGGDDKDVGKVGERLQGVSISTADGSTSAGGASASSKTEEVKRLPGGKLKKKDKQEVIIEKIVRNKRKCVTVVKGLDLFGVKLSDASKKLGKKFATGASVVKGPTEKEQIDVQGDISYDVVDFITATWPDVPESAVYFIEDGRKVAAA

SEQ ID NO: 62451 - DNA, 1399 bp, Triticum aestivum
  misc_feature (1)..(1399): Ceres Seq. ID no. 12578315
ccaacacttgccttgcattgttaatgcgtgcggctgcagcgggcatagatcgaatataattgagatcgtcaatgccttccacagaatcggccgccggcgtggcctgggaccgccggcgtgagctgcaggcgtttgacgacaccaaggcgggcgtcaagggcctcgtggacgccggcgtcacggccctcccgcccatcttccgccactcgccggagtccctggagagcatcacgtcctcaaaccatgtcgcgggggccatcccgaccgtcgacctagcggccccgcgacgcgaggacgcggtcgccctggtgcggcacgcggccaggacggtgggcttctttcaggtggtcaaccatggcgtgccggccgagctcatggccggcatgctcgagggggtgcgccggttcaacgagggacccgccgaggcgaagcaggccatctacagcagggaccaagctcgcaaggtgcgtttcgcctccaacttcgacctcttctcgtcggcggcggccaactggcgcgacaccctcttcttccacctcgctccggacccggcaccttccgaagagctgcccgaggctgtcagggatgtggtcacggagtacggccacgcggtgaccaaggtggggctgtccgtgctggagctgctgtcggagtcccttggcctgagcagcgaccacctgcgcgacatggactgcgcggagaacctcaacgccgtgtgccaatactacccaccgtgtccggagccgtatctcacttggggcaccaagaggcacaccgacccgggcttcctcaccgtcctcctgcaagacggcatgggcggcctccaggtgctcgtcgacggcaagacctgggtggatgtccctcccgtgcccggcgctttcatcatcaacatcggcgaccttcttcagctcgtcagcaatgaccagttcaggagcgtggagcaccgagtcctggcgaacaagagcaaagacaccgctagggtctctgtggcgtccttcttcaacaccaacattgagagatcgacgaggttgtatggccccatcaccgatggacgcaaccccccgatctacaggagcgtcaccgctagagagttcatcgcaacgtttaatcgcataggccttgatggtcgctcgctcgaccagtaccggttggaccgggatactcccacacctgccgtggaggggtgtgaatgaagcgggcatttccgtttctttataatttatttgcaagtttaaatttaagcattttcaaataagggaacgtactcgctttctcaactaaagtgtcagaaccgtggacaaaagtctctcgctccaccaaagtatgagcagcaccacaaaagtgagagactgttggaaagatgccccagacgcaataataaagttattaagtattatcc

SEQ ID NO: 62452 - protein, 373 aa, Triticum aestivum
  peptide (1)..(373): Ceres Seq. ID no. 12578316
  misc_feature (210)..(310): Pfam Name: 2OG-Fe(II) oxygenase superfamily Pfam Description: 2OG-Fe(II) oxygenase superfamily
  misc_feature (13)..(367): Homolog of NCBI NO: 40253427 NR Description: putative 2-oxoglutarate-dependent oxygenase
  misc_feature (277)..(354): Homolog of NCBI NO: 25406927 NR Description: protein F12K11.6 [imported] - Arabidopsis
  misc_feature (1)..(286): Homolog of NCBI NO: 25406927 NR Description: protein F12K11.6 [imported] - Arabidopsis
  misc_feature (1)..(354): Homolog of NCBI NO: 30679748 NR Description: 2-oxoglutarate-dependent dioxygenase, putative
  misc_feature (1)..(354): Homolog of NCBI NO: 15221544 NR Description: oxidoreductase, putative
  misc_feature (13)..(360): Homolog of NCBI NO: 40253419 NR Description: putative 2-oxoglutarate-dependent oxygenase
  misc_feature (13)..(367): Homolog of NCBI NO: 40253431 NR Description: putative 2-oxoglutarate-dependent oxygenase
  misc_feature (13)..(367): Homolog of NCBI NO: 31193909 NR Description: putative dioxygenase [Oryza sativa (japonica
  misc_feature (13)..(367): Homolog of NCBI NO: 40253423 NR Description: putative 2-oxoglutarate-dependent oxygenase
  misc_feature (3)..(360): Homolog of NCBI NO: 29123084 NR Description: 2-oxoglutarate-dependent oxygenase [Zea mays]
MPSTESAAGVAWDRRRELQAFDDTKAGVKGLVDAGVTALPPIFRHSPESLESITSSNHVAGAIPTVDLAAPRREDAVALVRHAARTVGFFQVVNHGVPAELMAGMLEGVRRFNEGPAEAKQAIYSRDQARKVRFASNFDLFSSAAANWRDTLFFHLAPDPAPSEELPEAVRDVVTEYGHAVTKVGLSVLELLSESLGLSSDHLRDMDCAENLNAVCQYYPPCPEPYLTWGTKRHTDPGFLTVLLQDGMGGLQVLVDGKTWVDVPPVPGAFIINIGDLLQLVSNDQFRSVEHRVLANKSKDTARVSVASFFNTNIERSTRLYGPITDGRNPPIYRSVTAREFIATFNRIGLDGRSLDQYRLDRDTPTPAVEGCE

SEQ ID NO: 62453 - protein, 272 aa, Triticum aestivum
  peptide (1)..(272): Ceres Seq. ID no. 12578317
  misc_feature (109)..(209): Pfam Name: 2OG-Fe(II) oxygenase superfamily Pfam Description: 2OG-Fe(II) oxygenase superfamily
  misc_feature (1)..(266): Homolog of NCBI NO: 40253427 NR Description: putative 2-oxoglutarate-dependent oxygenase
  misc_feature (176)..(253): Homolog of NCBI NO: 25406927 NR Description: protein F12K11.6 [imported] - Arabidopsis
  misc_feature (1)..(185): Homolog of NCBI NO: 25406927 NR Description: protein F12K11.6 [imported] - Arabidopsis
  misc_feature (1)..(253): Homolog of NCBI NO: 30679748 NR Description: 2-oxoglutarate-dependent dioxygenase, putative
  misc_feature (1)..(253): Homolog of NCBI NO: 15221544 NR Description: oxidoreductase, putative
  misc_feature (1)..(259): Homolog of NCBI NO: 40253419 NR Description: putative 2-oxoglutarate-dependent oxygenase
  misc_feature (1)..(266): Homolog of NCBI NO: 40253431 NR Description: putative 2-oxoglutarate-dependent oxygenase
  misc_feature (1)..(266): Homolog of NCBI NO: 31193909 NR Description: putative dioxygenase [Oryza sativa (japonica
  misc_feature (1)..(266): Homolog of NCBI NO: 40253423 NR Description: putative 2-oxoglutarate-dependent oxygenase
  misc_feature (1)..(259): Homolog of NCBI NO: 29123084 NR Description: 2-oxoglutarate-dependent oxygenase [Zea mays]
MAGMLEGVRRFNEGPAEAKQAIYSRDQARKVRFASNFDLFSSAAANWRDTLFFHLAPDPAPSEELPEAVRDVVTEYGHAVTKVGLSVLELLSESLGLSSDHLRDMDCAENLNAVCQYYPPCPEPYLTWGTKRHTDPGFLTVLLQDGMGGLQVLVDGKTWVDVPPVPGAFIINIGDLLQLVSNDQFRSVEHRVLANKSKDTARVSVASFFNTNIERSTRLYGPITDGRNPPIYRSVTAREFIATFNRIGLDGRSLDQYRLDRDTPTPAVEGCE

SEQ ID NO: 62454 - protein, 269 aa, Triticum aestivum
  peptide (1)..(269): Ceres Seq. ID no. 12578318
  misc_feature (106)..(206): Pfam Name: 2OG-Fe(II) oxygenase superfamily Pfam Description: 2OG-Fe(II) oxygenase superfamily
  misc_feature (1)..(263): Homolog of NCBI NO: 40253427 NR Description: putative 2-oxoglutarate-dependent oxygenase
  misc_feature (173)..(250): Homolog of NCBI NO: 25406927 NR Description: protein F12K11.6 [imported] - Arabidopsis
  misc_feature (1)..(182): Homolog of NCBI NO: 25406927 NR Description: protein F12K11.6 [imported] - Arabidopsis
  misc_feature (1)..(250): Homolog of NCBI NO: 30679748 NR Description: 2-oxoglutarate-dependent dioxygenase, putative
  misc_feature (1)..(250): Homolog of NCBI NO: 15221544 NR Description: oxidoreductase, putative
  misc_feature (1)..(256): Homolog of NCBI NO: 40253419 NR Description: putative 2-oxoglutarate-dependent oxygenase
  misc_feature (1)..(263): Homolog of NCBI NO: 40253431 NR Description: putative 2-oxoglutarate-dependent oxygenase
  misc_feature (1)..(263): Homolog of NCBI NO: 31193909 NR Description: putative dioxygenase [Oryza sativa (japonica
  misc_feature (1)..(263): Homolog of NCBI NO: 40253423 NR Description: putative 2-oxoglutarate-dependent oxygenase
  misc_feature (1)..(256): Homolog of NCBI NO: 29123084 NR Description: 2-oxoglutarate-dependent oxygenase [Zea mays]
MLEGVRRFNEGPAEAKQAIYSRDQARKVRFASNFDLFSSAAANWRDTLFFHLAPDPAPSEELPEAVRDVVTEYGHAVTKVGLSVLELLSESLGLSSDHLRDMDCAENLNAVCQYYPPCPEPYLTWGTKRHTDPGFLTVLLQDGMGGLQVLVDGKTWVDVPPVPGAFIINIGDLLQLVSNDQFRSVEHRVLANKSKDTARVSVASFFNTNIERSTRLYGPITDGRNPPIYRSVTAREFIATFNRIGLDGRSLDQYRLDRDTPTPAVEGCE

SEQ ID NO: 62455 - DNA, 1370 bp, Triticum aestivum
  misc_feature (1)..(1370): Ceres Seq. ID no. 12615972
actaccccgctgccgttaccactctccacgagaccgcagccgattagagccgttgctccaggaacgcagctcgcccgcaccgcgccacgcgacagctcgctcgctagcccgtatgtcgtgggcgccatggccggctcgcggcgcgacgcggaccagaaggagaaggccccgccggcggcgccgccgcagcagcagccggggcgcgaggaggagagggagtgggtgccgtggatcgtgccggtcttcgtggccgccaacgtcgccctgttcgccgtggcgatgtacgccaacaactgccccgcgcacgcgcgcggcggccgcggcggcaggaagtgcgtcggcgcggggttcctccgccgcttcgccttccagccgctcagccagaacccgctcctcgggccctcctccgccacattgcagaagctgggcgcgctcgtgtgggacaaggtggtgcacgagcaccaggggtggagactcgtgacctgcatctggctccacgccggcgtcgtccacctgctcgccaacatgctcagcctcgtgctcgtcgggctcaggctggagcagcagttcggatttgtgagagtcggcgtcatctacctcgtctccggcgtcgggggcagcgtgatgtcgtccctgttcatcagagacaacatctccgtgggcgcgtccggtgcgctcttcgggctcctcggagccatgctctcagagctcttcaccaactggaccatctacaccaacaaggcggcggcgctggtgacgttgctgttcgtgatcgcggtcaatctggcgatcggcatcctgccgcacgtggacaacttcgcgcacatcggggggttcctcacggggttcctcctcgggttcgtactgctcatgcgcccgcactacggctgggcgcagcgctacgtgctgccgtcctccgtcaaggacgtcggccggaagttcctggcctaccagtgggctctgctcgccctggcctcggtcctggtcgtcatcgggctggcggttgggatggcgatgctcttccgaggggtgaacggcaacgagcactgcgagtggtgccactacctcagctgcgtgccgaccgccagatggagctgcgggaaatgaaatgggagcaagcaacttcatggacctccatattacttcgttcttttccgcacaggcattttgatgcgcagatgctgtatatacgagtactgctatataacggattacacccctggatttactcgatgattgtttccttcggttgttggacttgaaaaacggggaatatcttgaatcttacacctgcatgtgcctgacagcgcggctgccttttaaatttgtgtgccaaacagatccatctttatataatttacccaatgatt

SEQ ID NO: 62456 - protein, 368 aa, Triticum aestivum
  peptide (1)..(368): Ceres Seq. ID no. 12615973
  misc_feature (54)..(365): Homolog of NCBI NO: 15236387 NR Description: putative membrane protein; protein id:
  misc_feature (67)..(368): Homolog of NCBI NO: 11357824 NR Description: hypothetical protein F5K20.80 - Arabidopsis
  misc_feature (67)..(366): Homolog of NCBI NO: 25402744 NR Description: protein T12C24.28 [imported] - Arabidopsis
  misc_feature (67)..(366): Homolog of NCBI NO: 15222058 NR Description: membrane protein, putative
  misc_feature (67)..(368): Homolog of NCBI NO: 30693911 NR Description: membrane protein, Rhomboid family [Arabidopsis
  misc_feature (58)..(368): Homolog of NCBI NO: 38344377 NR Description: OSJNBb0032E06.11 [Oryza sativa (japonica
  misc_feature (45)..(366): Homolog of NCBI NO: 15240744 NR Description: membrane protein
  misc_feature (71)..(366): Homolog of NCBI NO: 15221690 NR Description: membrane protein, putative; protein id:
  misc_feature (70)..(366): Homolog of NCBI NO: 294845 NR Description: membrane protein [Saccharum hybrid cultivar
  misc_feature (32)..(367): Homolog of NCBI NO: 37536172 NR Description: putative membrane protein
TTPLPLPLSTRPQPIRAVAPGTQLARTAPRDSSLASPYVVGAMAGSRRDADQKEKAPPAAPPQQQPGREEEREWVPWIVPVFVAANVALFAVAMYANNCPAHARGGRGGRKCVGAGFLRRFAFQPLSQNPLLGPSSATLQKLGALVWDKVVHEHQGWRLVTCIWLHAGVVHLLANMLSLVLVGLRLEQQFGFVRVGVIYLVSGVGGSVMSSLFIRDNISVGASGALFGLLGAMLSELFTNWTIYTNKAAALVTLLFVIAVNLAIGILPHVDNFAHIGGFLTGFLLGFVLLMRPHYGWAQRYVLPSSVKDVGRKFLAYQWALLALASVLVVIGLAVGMAMLFRGVNGNEHCEWCHYLSCVPTARWSCGK

SEQ ID NO: 62457 - protein, 326 aa, Triticum aestivum
  peptide (1)..(326): Ceres Seq. ID no. 12615974
  misc_feature (12)..(323): Homolog of NCBI NO: 15236387 NR Description: putative membrane protein; protein id:
  misc_feature (25)..(326): Homolog of NCBI NO: 11357824 NR Description: hypothetical protein F5K20.80 - Arabidopsis
  misc_feature (25)..(324): Homolog of NCBI NO: 25402744 NR Description: protein T12C24.28 [imported] - Arabidopsis
  misc_feature (25)..(324): Homolog of NCBI NO: 15222058 NR Description: membrane protein, putative
  misc_feature (25)..(326): Homolog of NCBI NO: 30693911 NR Description: membrane protein, Rhomboid family [Arabidopsis
  misc_feature (16)..(326): Homolog of NCBI NO: 38344377 NR Description: OSJNBb0032E06.11 [Oryza sativa (japonica
  misc_feature (3)..(324): Homolog of NCBI NO: 15240744 NR Description: membrane protein
  misc_feature (29)..(324): Homolog of NCBI NO: 15221690 NR Description: membrane protein, putative; protein id:
  misc_feature (28)..(324): Homolog of NCBI NO: 294845 NR Description: membrane protein [Saccharum hybrid cultivar
  misc_feature (1)..(325): Homolog of NCBI NO: 37536172 NR Description: putative membrane protein
MAGSRRDADQKEKAPPAAPPQQQPGREEEREWVPWIVPVFVAANVALFAVAMYANNCPAHARGGRGGRKCVGAGFLRRFAFQPLSQNPLLGPSSATLQKLGALVWDKVVHEHQGWRLVTCIWLHAGVVHLLANMLSLVLVGLRLEQQFGFVRVGVIYLVSGVGGSVMSSLFIRDNISVGASGALFGLLGAMLSELFTNWTIYTNKAAALVTLLFVIAVNLAIGILPHVDNFAHIGGFLTGFLLGFVLLMRPHYGWAQRYVLPSSVKDVGRKFLAYQWALLALASVLVVIGLAVGMAMLFRGVNGNEHCEWCHYLSCVPTARWSCGK

SEQ ID NO: 62458 - protein, 275 aa, Triticum aestivum
  peptide (1)..(275): Ceres Seq. ID no. 12615975
  misc_feature (1)..(272): Homolog of NCBI NO: 15236387 NR Description: putative membrane protein; protein id:
  misc_feature (1)..(275): Homolog of NCBI NO: 11357824 NR Description: hypothetical protein F5K20.80 - Arabidopsis
  misc_feature (1)..(273): Homolog of NCBI NO: 25402744 NR Description: protein T12C24.28 [imported] - Arabidopsis
  misc_feature (1)..(273): Homolog of NCBI NO: 15222058 NR Description: membrane protein, putative
  misc_feature (1)..(275): Homolog of NCBI NO: 30693911 NR Description: membrane protein, Rhomboid family [Arabidopsis
  misc_feature (1)..(275): Homolog of NCBI NO: 38344377 NR Description: OSJNBb0032E06.11 [Oryza sativa (japonica
  misc_feature (1)..(273): Homolog of NCBI NO: 15240744 NR Description: membrane protein
  misc_feature (1)..(273): Homolog of NCBI NO: 15221690 NR Description: membrane protein, putative; protein id:
  misc_feature (1)..(273): Homolog of NCBI NO: 294845 NR Description: membrane protein [Saccharum hybrid cultivar
  misc_feature (1)..(274): Homolog of NCBI NO: 37536172 NR Description: putative membrane protein
MYANNCPAHARGGRGGRKCVGAGFLRRFAFQPLSQNPLLGPSSATLQKLGALVWDKVVHEHQGWRLVTCIWLHAGVVHLLANMLSLVLVGLRLEQQFGFVRVGVIYLVSGVGGSVMSSLFIRDNISVGASGALFGLLGAMLSELFTNWTIYTNKAAALVTLLFVIAVNLAIGILPHVDNFAHIGGFLTGFLLGFVLLMRPHYGWAQRYVLPSSVKDVGRKFLAYQWALLALASVLVVIGLAVGMAMLFRGVNGNEHCEWCHYLSCVPTARWSCGK

SEQ ID NO: 62459 - DNA, 1132 bp, Triticum aestivum
  misc_feature (1)..(1132): Ceres Seq. ID no. 13654847
aaacgagatcagcgtctcgtgaatcctacggcccattcccccccgatcccctcccactttttcgtgctttactccaaagcgcaaggcgccttctcgcttccgcccctctccttcctcctcgccctcctctccgcccgccgcctgctcgccgtccgatccgccgccccccgtccgtctccatgggtctgctgtccaacaggatcgggaaggagagcctgaaggcgggggatcacatctactcgtggagggccgcgtgggtctacgcgcatcacggaatatatgtgggcgatgataaggtgattcattttaccagaggaagggaccaagaagtcggaacaggaactgtcattgattttcttcttgtgagctctggccctaataggagcaccacaccatgcttagtatgcagcagcgaagaagccaccaccgccgcggagacaaatggtgtgacttcctcttgcctcagctgtttcctggcagggggtgccctctatcgtttcgagtatgacgtcaacccggcactcttccttgccaaagtgcgaggagggacctgcacgcttgccgccactgatcccggcgaggtggttgtccgacgcgccaaatacttgttgaccaatggtttcaggtgctacagcctgttcaagaacaactgcgaggactttgcgatatactgcaagactggtctgcttgtggctgagcagggcaacgtcgggctcgggcagagtgggcaggctgtgtccatcatcggcggccctcttgctgctgtggtttcaacccctttccgcctagtaaccacaaacatctatggagtggcagtgatggctgttggggtgtattgtgtcagcaggtacgcaggtgacattggcaaccgccgagacgtgctgaaactggaagtggaggacctgactgccgggctcgcaagcggccggattcgtccagcgaacatcagtcagctggcaactccggggcaagtccaggctccggcagtgaccacactcgttgctgcttagaatgcagcactgatgttgtaaaatatggagatgtatacatcaccatcactactgctatatgtaccaccggaatagttgttcaaacctgctaaaactgtgccaagagtgaaatcccatcagca

SEQ ID NO: 62460 - protein, 335 aa, Triticum aestivum
  peptide (1)..(335): Ceres Seq. ID no. 13654848
  misc_feature (164)..(247): Pfam Name: NC domain Pfam Description: NC domain
  misc_feature (60)..(260): Homolog of NCBI NO: 15237327 NR Description: hypothetical protein [Arabidopsis thaliana]
  misc_feature (60)..(305): Homolog of NCBI NO: 22328196 NR Description: expressed protein [Arabidopsis thaliana]
  misc_feature (256)..(303): Homolog of NCBI NO: 15237330 NR Description: expressed protein [Arabidopsis thaliana]
  misc_feature (60)..(253): Homolog of NCBI NO: 15237330 NR Description: expressed protein [Arabidopsis thaliana]
  misc_feature (60)..(305): Homolog of NCBI NO: 21592684 NR Description: unknown [Arabidopsis thaliana]
  misc_feature (60)..(305): Homolog of NCBI NO: 18378812 NR Description: expressed protein [Arabidopsis thaliana]
  misc_feature (60)..(306): Homolog of NCBI NO: 21594170 NR Description: unknown [Arabidopsis thaliana]
  misc_feature (60)..(306): Homolog of NCBI NO: 18396282 NR Description: expressed protein [Arabidopsis thaliana]
  misc_feature (91)..(321): Homolog of NCBI NO: 9758417 NR Description: gb|AAF32477.1~gene_id:MHF15.11~similar to unknown
  misc_feature (60)..(321): Homolog of NCBI NO: 18415178 NR Description: expressed protein [Arabidopsis thaliana]
TRSASRESYGPFPPDPLPLFRALLQSARRLLASAPLLPPRPPLRPPPARRPIRRPPSVSMGLLSNRIGKESLKAGDHIYSWRAAWVYAHHGIYVGDDKVIHFTRGRDQEVGTGTVIDFLLVSSGPNRSTTPCLVCSSEEATTAAETNGVTSSCLSCFLAGGALYRFEYDVNPALFLAKVRGGTCTLAATDPGEVVVRRAKYLLTNGFRCYSLFKNNCEDFAIYCKTGLLVAEQGNVGLGQSGQAVSIIGGPLAAVVSTPFRLVTTNIYGVAVMAVGVYCVSRYAGDIGNRRDVLKLEVEDLTAGLASGRIRPANISQLATPGQVQAPAVTTLVAA

SEQ ID NO: 62461 - protein, 276 aa, Triticum aestivum
  peptide (1)..(276): Ceres Seq. ID no. 13654849
  misc_feature (105)..(188): Pfam Name: NC domain Pfam Description: NC domain
  misc_feature (1)..(201): Homolog of NCBI NO: 15237327 NR Description: hypothetical protein [Arabidopsis thaliana]
  misc_feature (1)..(246): Homolog of NCBI NO: 22328196 NR Description: expressed protein [Arabidopsis thaliana]
  misc_feature (197)..(244): Homolog of NCBI NO: 15237330 NR Description: expressed protein [Arabidopsis thaliana]
  misc_feature (1)..(194): Homolog of NCBI NO: 15237330 NR Description: expressed protein [Arabidopsis thaliana]
  misc_feature (1)..(246): Homolog of NCBI NO: 21592684 NR Description: unknown [Arabidopsis thaliana]
  misc_feature (1)..(246): Homolog of NCBI NO: 18378812 NR Description: expressed protein [Arabidopsis thaliana]
  misc_feature (1)..(247): Homolog of NCBI NO: 21594170 NR Description: unknown [Arabidopsis thaliana]
  misc_feature (1)..(247): Homolog of NCBI NO: 18396282 NR Description: expressed protein [Arabidopsis thaliana]
  misc_feature (32)..(262): Homolog of NCBI NO: 9758417 NR Description: gb|AAF32477.1~gene_id:MHF15.11~similar to unknown
  misc_feature (1)..(262): Homolog of NCBI NO: 18415178 NR Description: expressed protein [Arabidopsis thaliana]
MGLLSNRIGKESLKAGDHIYSWRAAWVYAHHGIYVGDDKVIHFTRGRDQEVGTGTVIDFLLVSSGPNRSTTPCLVCSSEEATTAAETNGVTSSCLSCFLAGGALYRFEYDVNPALFLAKVRGGTCTLAATDPGEVVVRRAKYLLTNGFRCYSLFKNNCEDFAIYCKTGLLVAEQGNVGLGQSGQAVSIIGGPLAAVVSTPFRLVTTNIYGVAVMAVGVYCVSRYAGDIGNRRDVLKLEVEDLTAGLASGRIRPANISQLATPGQVQAPAVTTLVAA

SEQ ID NO: 62462 - DNA, 1738 bp, Triticum aestivum
  misc_feature (1)..(1738): Ceres Seq. ID no. 15176122
ccaagcgccaaaccctctccccatccgtcttcctcgtgctctccgcccctccccttctcccctcccatcctctcctctctttatacgcctccgccccgagctctcctcccccattccgccgcattacgtcgcgcacacgggcaggggagagccggcagcggagagagagcaggagacgagatggcggccgcgtccttcaccgccgccaagttcctggcgccggcggccgcgagatccggcggcgaccgggcgcccttccccgcgccgtccgcgttctccatgcgctcgctccgccacaggcccgccaggcgcctcagctccgtcctggccgtctcctccgacgtgctcaaggccgcgcccgccgccgccgcgtacccggctgtgacacgcgaagaggcattggagctttacgaggacatgatccttggccgtaacttcgaagacatgtgcgcgcaaatgtactaccgtggcaagatgtttggtttcgtccatctttacaacgggcaggaggccgtctccaccggcttcatcaagcagctgaaccaacccgactgtgtcgtcagcacgtaccgtgaccacgtccacgcgctgtccaagggtgtcccggcccgtgcagtcatggccgagctctttggcaaggccactggctgctgccgtggacagggtggttccatgcacatgttctctgaaccccacaacctccttggaggctttgccttcattggcgagggcatccctgtcgccactggcgctgcctttgccgccaagtaccgccatgaggtgctcaagcagtctagccctgatgggcttgatgtcacacttgcattctttggggacggtacctgtaacaacggccagttctttgagtgcctgaacatggctcagctgtggaagcttccgattatttttgttgtggagaacaacctatgggcaatcgggatgtctcaccttaggtctacttcagatcccgagatctggaagaagggcccagcattcggaatgcctggggtacacgtcgatgggatggatgtcctgaaggtcagggaggtggctaaggaggcaattgacagggcaaggagaggtgaaggaccaactctagtggaatgtgaaacttaccggttcagaggccactctcttgctgatccagatgaactcaggaggcccgatgagaaatctcactacgccgcaagggaccccatcacctccctgaagaagtacatcatcgagcagaacctcgcgtccgaagccgagctgaagaacatcgagaagaagattgacgacgtcgtcgaagaggctgtggagtttgccgacgcgagcccgctgcccccacggagccagctgctggagaacgtgtttgccgatcccaagggcttcggcatcggccccgacggcaagtacaggtgcgaggaccccaagttcacccaaggcacggcgcaagtctaagggccgctgctgcagaagcagcttgtttacgcctcttttctcatgtactacctctctagctacctgcccctagttttgtcgatcccgccgtcgatttcttgtgttgttagaggtcacatatcactgtaattcattgctcgctgtgccaccgtgcggcgtctgatgcccccagttttttttacccaagaaatgttccccagtccagttgttgttctacagtaactctacatctgtctggtttgtagtaattggtacagatattggaagagatgtgaaacataatagtatctgttgt

SEQ ID NO: 62463 - protein, 480 aa, Triticum aestivum
  peptide (1)..(480): Ceres Seq. ID no. 15176123
  misc_feature (138)..(445): Pfam Name: Dehydrogenase E1 component Pfam Description: Dehydrogenase E1 component
  misc_feature (128)..(260): Homolog of NCBI NO: 23508447 NR Description: pyruvate dehydrogenase E1 component, alpha
  misc_feature (261)..(432): Homolog of NCBI NO: 23508447 NR Description: pyruvate dehydrogenase E1 component, alpha
  misc_feature (128)..(454): Homolog of NCBI NO: 23041416 NR Description: hypothetical protein [Trichodesmium erythraeum
  misc_feature (127)..(454): Homolog of NCBI NO: 16331186 NR Description: pyruvate dehydrogenase E1 component, alpha
  misc_feature (128)..(454): Homolog of NCBI NO: 23128827 NR Description: hypothetical protein [Nostoc punctiforme]
  misc_feature (128)..(454): Homolog of NCBI NO: 17230200 NR Description: pyruvate dehydrogenase E1 component, alpha
  misc_feature (128)..(454): Homolog of NCBI NO: 11465733 NR Description: pyruvate dehydrogenase E1 component alpha subunit
  misc_feature (91)..(469): Homolog of NCBI NO: 6715645 NR Description: T25K16.8 [Arabidopsis thaliana]
  misc_feature (91)..(480): Homolog of NCBI NO: 15223294 NR Description: pyruvate dehydrogenase E1 alpha subunit
  misc_feature (62)..(480): Homolog of NCBI NO: 38344868 NR Description: OSJNBa0020P07.11 [Oryza sativa (japonica
PSAKPSPHPSSSCSPPLPFSPPILSSLYTPPPRALLPHSAALRRAHGQGRAGSGERAGDEMAAASFTAAKFLAPAAARSGGDRAPFPAPSAFSMRSLRHRPARRLSSVLAVSSDVLKAAPAAAAYPAVTREEALELYEDMILGRNFEDMCAQMYYRGKMFGFVHLYNGQEAVSTGFIKQLNQPDCVVSTYRDHVHALSKGVPARAVMAELFGKATGCCRGQGGSMHMFSEPHNLLGGFAFIGEGIPVATGAAFAAKYRHEVLKQSSPDGLDVTLAFFGDGTCNNGQFFECLNMAQLWKLPIIFVVENNLWAIGMSHLRSTSDPEIWKKGPAFGMPGVHVDGMDVLKVREVAKEAIDRARRGEGPTLVECETYRFRGHSLADPDELRRPDEKSHYAARDPITSLKKYIIEQNLASEAELKNIEKKIDDVVEEAVEFADASPLPPRSQLLENVFADPKGFGIGPDGKYRCEDPKFTQGTAQV

SEQ ID NO: 62464 - protein, 420 aa, Triticum aestivum
  peptide (1)..(420): Ceres Seq. ID no. 15176124
  misc_feature (78)..(385): Pfam Name: Dehydrogenase E1 component Pfam Description: Dehydrogenase E1 component
  misc_feature (68)..(200): Homolog of NCBI NO: 23508447 NR Description: pyruvate dehydrogenase E1 component, alpha
  misc_feature (201)..(372): Homolog of NCBI NO: 23508447 NR Description: pyruvate dehydrogenase E1 component, alpha
  misc_feature (68)..(394): Homolog of NCBI NO: 23041416 NR Description: hypothetical protein [Trichodesmium erythraeum
  misc_feature (67)..(394): Homolog of NCBI NO: 16331186 NR Description: pyruvate dehydrogenase E1 component, alpha
  misc_feature (68)..(394): Homolog of NCBI NO: 23128827 NR Description: hypothetical protein [Nostoc punctiforme]
  misc_feature (68)..(394): Homolog of NCBI NO: 17230200 NR Description: pyruvate dehydrogenase E1 component, alpha
  misc_feature (68)..(394): Homolog of NCBI NO: 11465733 NR Description: pyruvate dehydrogenase E1 component alpha subunit
  misc_feature (31)..(409): Homolog of NCBI NO: 6715645 NR Description: T25K16.8 [Arabidopsis thaliana]
  misc_feature (31)..(420): Homolog of NCBI NO: 15223294 NR Description: pyruvate dehydrogenase E1 alpha subunit
  misc_feature (2)..(420): Homolog of NCBI NO: 38344868 NR Description: OSJNBa0020P07.11 [Oryza sativa (japonica
MAAASFTAAKFLAPAAARSGGDRAPFPAPSAFSMRSLRHRPARRLSSVLAVSSDVLKAAPAAAAYPAVTREEALELYEDMILGRNFEDMCAQMYYRGKMFGFVHLYNGQEAVSTGFIKQLNQPDCVVSTYRDHVHALSKGVPARAVMAELFGKATGCCRGQGGSMHMFSEPHNLLGGFAFIGEGIPVATGAAFAAKYRHEVLKQSSPDGLDVTLAFFGDGTCNNGQFFECLNMAQLWKLPIIFVVENNLWAIGMSHLRSTSDPEIWKKGPAFGMPGVHVDGMDVLKVREVAKEAIDRARRGEGPTLVECETYRFRGHSLADPDELRRPDEKSHYAARDPITSLKKYIIEQNLASEAELKNIEKKIDDVVEEAVEFADASPLPPRSQLLENVFADPKGFGIGPDGKYRCEDPKFTQGTAQV

SEQ ID NO: 62465 - protein, 387 aa, Triticum aestivum
  peptide (1)..(387): Ceres Seq. ID no. 15176125
  misc_feature (45)..(352): Pfam Name: Dehydrogenase E1 component Pfam Description: Dehydrogenase E1 component
  misc_feature (35)..(167): Homolog of NCBI NO: 23508447 NR Description: pyruvate dehydrogenase E1 component, alpha
  misc_feature (168)..(339): Homolog of NCBI NO: 23508447 NR Description: pyruvate dehydrogenase E1 component, alpha
  misc_feature (35)..(361): Homolog of NCBI NO: 23041416 NR Description: hypothetical protein [Trichodesmium erythraeum
  misc_feature (34)..(361): Homolog of NCBI NO: 16331186 NR Description: pyruvate dehydrogenase E1 component, alpha
  misc_feature (35)..(361): Homolog of NCBI NO: 23128827 NR Description: hypothetical protein [Nostoc punctiforme]
  misc_feature (35)..(361): Homolog of NCBI NO: 17230200 NR Description: pyruvate dehydrogenase E1 component, alpha
  misc_feature (35)..(361): Homolog of NCBI NO: 11465733 NR Description: pyruvate dehydrogenase E1 component alpha subunit
  misc_feature (1)..(376): Homolog of NCBI NO: 6715645 NR Description: T25K16.8 [Arabidopsis thaliana]
  misc_feature (1)..(387): Homolog of NCBI NO: 15223294 NR Description: pyruvate dehydrogenase E1 alpha subunit
  misc_feature (1)..(387): Homolog of NCBI NO: 38344868 NR Description: OSJNBa0020P07.11 [Oryza sativa (japonica
MRSLRHRPARRLSSVLAVSSDVLKAAPAAAAYPAVTREEALELYEDMILGRNFEDMCAQMYYRGKMFGFVHLYNGQEAVSTGFIKQLNQPDCVVSTYRDHVHALSKGVPARAVMAELFGKATGCCRGQGGSMHMFSEPHNLLGGFAFIGEGIPVATGAAFAAKYRHEVLKQSSPDGLDVTLAFFGDGTCNNGQFFECLNMAQLWKLPIIFVVENNLWAIGMSHLRSTSDPEIWKKGPAFGMPGVHVDGMDVLKVREVAKEAIDRARRGEGPTLVECETYRFRGHSLADPDELRRPDEKSHYAARDPITSLKKYIIEQNLASEAELKNIEKKIDDVVEEAVEFADASPLPPRSQLLENVFADPKGFGIGPDGKYRCEDPKFTQGTAQV

SEQ ID NO: 62466 - DNA, 941 bp, Triticum aestivum
  misc_feature (1)..(941): Ceres Seq. ID no. 13654854
aagcggcgccggcggctagcgagatcgcggcggtgggtgtgatcggcgcggggcagatgggctcgggcatcgcccagctcgccgccgccgccggctgcggcgtcttcctcctcgactccgaccccgcggccctctcccgtgccgtcgcctccatctcctcctccctcggccgcctcgtctccaagggccagctctcccaggctgcgtgcgatgattccgtcaagcggataaagtgcgtctccgatgtgcaagagctgcggggcgtggatctggtgattgaggccatcgttgagtccgaagacgtcaagaagaagctgttcgtggagctggacaggatcaccaaaccttctgccattcttgcgtccaacaccagctccatttctataacccggctcgcctcagctactagccgcccctctcaggtgataggcatgcacttttttaaccctcctcctataatgaagctggttgaaataatacgaggagctgatacatccgaagaggttttctctcaaggtaaatctttctctgaaaggattgggaagaccgttatatgctcacaagattatcccggcttcatggtaaaccgcatcctaatgccgatgattaatgaagcattttgggcactttacactggggtagcaaccaaagaggacatcgacgcagggatgaagctcggcacgaatcatccaatggggcctctgcagcttgctgacttcatagggttagatgtttgcctttcagtacttagggtgctccacaacgggctaggagataacaagtacagcccttgccctcttcttgtccaatatgtcgatgccggacgacttggaaagaagcgcggactaggtgtatctcttacaggagaaactcttcatccgttaaacccaaatcatctctgtaaaaatatcagcgcggctgttgagcaaagaaatgaagtt

SEQ ID NO: 62467 - protein, 313 aa, Triticum aestivum
  peptide (1)..(313): Ceres Seq. ID no. 13654855
  misc_feature (5)..(189): Pfam Name: 3-hydroxyacyl-CoA dehydrogenase, NAD binding domain Pfam Description: 3-hydroxyacyl-CoA dehydrogenase, NAD binding
  misc_feature (5)..(283): Homolog of NCBI NO: 27376490 NR Description: 3-hydroxybutyryl-CoA dehydrogenase
  misc_feature (8)..(293): Homolog of NCBI NO: 22967143 NR Description: hypothetical protein [Rhodospirillum rubrum]
  misc_feature (8)..(283): Homolog of NCBI NO: 23053816 NR Description: hypothetical protein [Geobacter metallireducens]
  misc_feature (6)..(294): Homolog of NCBI NO: 13473014 NR Description: 3-hydroxybutyryl-CoA dehydrogenase [Mesorhizobium
  misc_feature (8)..(283): Homolog of NCBI NO: 15966398 NR Description: PROBABLE 3-HYDROXYBUTYRYL-COA DEHYDROGENASE
  misc_feature (8)..(293): Homolog of NCBI NO: 23013719 NR Description: hypothetical protein [Magnetospirillum
  misc_feature (8)..(294): Homolog of NCBI NO: 23502817 NR Description: 3-hydroxybutyryl-CoA dehydrogenase [Brucella suis
  misc_feature (8)..(294): Homolog of NCBI NO: 17986383 NR Description: 3-HYDROXYBUTYRYL-COA DEHYDROGENASE [Brucella
  misc_feature (6)..(296): Homolog of NCBI NO: 15232545 NR Description: 3-hydroxybutyryl-CoA dehydrogenase, putative
  misc_feature (5)..(284): Homolog of NCBI NO: 34908888 NR Description: putative 3-hydroxybutyryl-CoA dehydrogenase
AAPAASEIAAVGVIGAGQMGSGIAQLAAAAGCGVFLLDSDPAALSRAVASISSSLGRLVSKGQLSQAACDDSVKRIKCVSDVQELRGVDLVIEAIVESEDVKKKLFVELDRITKPSAILASNTSSISITRLASATSRPSQVIGMHFFNPPPIMKLVEIIRGADTSEEVFSQGKSFSERIGKTVICSQDYPGFMVNRILMPMINEAFWALYTGVATKEDIDAGMKLGTNHPMGPLQLADFIGLDVCLSVLRVLHNGLGDNKYSPCPLLVQYVDAGRLGKKRGLGVSLTGETLHPLNPNHLCKNISAAVEQRNEV

SEQ ID NO: 62468 - protein, 295 aa, Triticum aestivum
  peptide (1)..(295): Ceres Seq. ID no. 13654856
  misc_feature (1)..(171): Pfam Name: 3-hydroxyacyl-CoA dehydrogenase, NAD binding domain Pfam Description: 3-hydroxyacyl-CoA dehydrogenase, NAD binding
  misc_feature (1)..(265): Homolog of NCBI NO: 27376490 NR Description: 3-hydroxybutyryl-CoA dehydrogenase
  misc_feature (1)..(275): Homolog of NCBI NO: 22967143 NR Description: hypothetical protein [Rhodospirillum rubrum]
  misc_feature (1)..(265): Homolog of NCBI NO: 23053816 NR Description: hypothetical protein [Geobacter metallireducens]
  misc_feature (1)..(276): Homolog of NCBI NO: 13473014 NR Description: 3-hydroxybutyryl-CoA dehydrogenase [Mesorhizobium
  misc_feature (1)..(265): Homolog of NCBI NO: 15966398 NR Description: PROBABLE 3-HYDROXYBUTYRYL-COA DEHYDROGENASE
  misc_feature (1)..(275): Homolog of NCBI NO: 23013719 NR Description: hypothetical protein [Magnetospirillum
  misc_feature (1)..(276): Homolog of NCBI NO: 23502817 NR Description: 3-hydroxybutyryl-CoA dehydrogenase [Brucella suis
  misc_feature (1)..(276): Homolog of NCBI NO: 17986383 NR Description: 3-HYDROXYBUTYRYL-COA DEHYDROGENASE [Brucella
  misc_feature (1)..(278): Homolog of NCBI NO: 15232545 NR Description: 3-hydroxybutyryl-CoA dehydrogenase, putative
  misc_feature (1)..(266): Homolog of NCBI NO: 34908888 NR Description: putative 3-hydroxybutyryl-CoA dehydrogenase
MGSGIAQLAAAAGCGVFLLDSDPAALSRAVASISSSLGRLVSKGQLSQAACDDSVKRIKCVSDVQELRGVDLVIEAIVESEDVKKKLFVELDRITKPSAILASNTSSISITRLASATSRPSQVIGMHFFNPPPIMKLVEIIRGADTSEEVFSQGKSFSERIGKTVICSQDYPGFMVNRILMPMINEAFWALYTGVATKEDIDAGMKLGTNHPMGPLQLADFIGLDVCLSVLRVLHNGLGDNKYSPCPLLVQYVDAGRLGKKRGLGVSLTGETLHPLNPNHLCKNISAAVEQRNEV

SEQ ID NO: 62469 - protein, 170 aa, Triticum aestivum
  peptide (1)..(170): Ceres Seq. ID no. 13654857
  misc_feature (48)..(141): Pfam Name: 3-hydroxyacyl-CoA dehydrogenase, C-terminal domain Pfam Description: 3-hydroxyacyl-CoA dehydrogenase, C-terminal
  misc_feature (1)..(140): Homolog of NCBI NO: 27376490 NR Description: 3-hydroxybutyryl-CoA dehydrogenase
  misc_feature (1)..(150): Homolog of NCBI NO: 22967143 NR Description: hypothetical protein [Rhodospirillum rubrum]
  misc_feature (1)..(140): Homolog of NCBI NO: 23053816 NR Description: hypothetical protein [Geobacter metallireducens]
  misc_feature (1)..(151): Homolog of NCBI NO: 13473014 NR Description: 3-hydroxybutyryl-CoA dehydrogenase [Mesorhizobium
  misc_feature (1)..(140): Homolog of NCBI NO: 15966398 NR Description: PROBABLE 3-HYDROXYBUTYRYL-COA DEHYDROGENASE
  misc_feature (1)..(150): Homolog of NCBI NO: 23013719 NR Description: hypothetical protein [Magnetospirillum
  misc_feature (1)..(151): Homolog of NCBI NO: 23502817 NR Description: 3-hydroxybutyryl-CoA dehydrogenase [Brucella suis
  misc_feature (1)..(151): Homolog of NCBI NO: 17986383 NR Description: 3-HYDROXYBUTYRYL-COA DEHYDROGENASE [Brucella
  misc_feature (1)..(153): Homolog of NCBI NO: 15232545 NR Description: 3-hydroxybutyryl-CoA dehydrogenase, putative
  misc_feature (1)..(141): Homolog of NCBI NO: 34908888 NR Description: putative 3-hydroxybutyryl-CoA dehydrogenase
MHFFNPPPIMKLVEIIRGADTSEEVFSQGKSFSERIGKTVICSQDYPGFMVNRILMPMINEAFWALYTGVATKEDIDAGMKLGTNHPMGPLQLADFIGLDVCLSVLRVLHNGLGDNKYSPCPLLVQYVDAGRLGKKRGLGVSLTGETLHPLNPNHLCKNISAAVEQRNEV

SEQ ID NO: 62470 - DNA, 1102 bp, Triticum aestivum
  misc_feature (1)..(1102): Ceres Seq. ID no. 12615217
actctccactcggccttcccctcgctaccactccgcctgctgccgcgccatggcgctccacgccgtctcccctgcggcggcggcctccccaccctgcgccctctcctctgcccgtctgccccagcgcccaggttgtggttgtctctcaaaccgttcatccctgttaagttcgtccacaaacttcatgaaatttcagtatggagcagtgggtttctttggtgtgcctttggttcttcaacactcggacaagagagcagttttgaggcatgccactaatgaagaaattgaggaagaaaagatgatcgttgaagaacaagctaaagaaaagatggagaaggccattgaaacagttcaatcgaacttcaataccgtcaggactgggcgggcaaacccgtctatgctcgacaggattgaggttgagtactatggaactcctgtaaacttgaagactattgcacagataaataccccagatgcgacttctcttcttatccaaccatatgacaagtcttgcctcaagctcattgagaaagctatagttgctgcaaatattggggtaacaccaagcaatgatggagaagtgatacgagtcactgtcccaccattgacatctgaccgcagaaaggaaatgacaaaaaccgtagccaagttatctgaagaaggcaaggttgctatcagaaacataagacgagatgcaatcaaagcctacgataagctagagaaggaaaagaaactttctgaagataatgtgaaggatttatcagccgatctacaaaaaatcacagacgagtacatgaagaaggttgaagccatccaaaagcaaaaggaacaggagctgagcaaggtttagatccagacccgactccgactgaacaaaaactggctacatgttttctgaagccctcctctggtcatcggatggctgccagtgcgatggggtgcactcgttgggttgttggagtctcgctaagactgatggatgcaaagttgagacagtgttgctgcgtccctcctttcccttttgtaattaggccttccccgtcttcctgtccgactgccattgtcaatatttccatgaattaaattctgtgatgtgcactcc

SEQ ID NO: 62471 - protein, 282 aa, Triticum aestivum
  peptide (1)..(282): Ceres Seq. ID no. 12615218
  misc_feature (116)..(279): Pfam Name: Ribosome recycling factor Pfam Description: Ribosome recycling factor
  misc_feature (107)..(282): Homolog of NCBI NO: 22297803 NR Description: ribosome releasing factor [Thermosynechococcus
  misc_feature (104)..(282): Homolog of NCBI NO: 23041074 NR Description: hypothetical protein [Trichodesmium erythraeum
  misc_feature (100)..(282): Homolog of NCBI NO: 23126085 NR Description: hypothetical protein [Nostoc punctiforme]
  misc_feature (105)..(282): Homolog of NCBI NO: 17228703 NR Description: ribosome recycling factor [Nostoc sp. PCC 7120]
  misc_feature (128)..(282): Homolog of NCBI NO: 629661 NR Description: ribosome releasing factor - carrot
  misc_feature (48)..(282): Homolog of NCBI NO: 11277801 NR Description: hypothetical protein F16M2.40 - Arabidopsis
  misc_feature (56)..(282): Homolog of NCBI NO: 7404451 NR Description: RIBOSOME RECYCLING FACTOR, CHLOROPLAST PRECURSOR
  misc_feature (47)..(282): Homolog of NCBI NO: 18412657 NR Description: putative protein
  misc_feature (45)..(282): Homolog of NCBI NO: 7388105 NR Description: Ribosome recycling factor, chloroplast precursor
  misc_feature (19)..(282): Homolog of NCBI NO: 34394208 NR Description: putative Ribosome recycling factor, chloroplast
LSTRPSPRYHSACCRAMALHAVSPAAAASPPCALSSARLPQRPGCGCLSNRSSLLSSSTNFMKFQYGAVGFFGVPLVLQHSDKRAVLRHATNEEIEEEKMIVEEQAKEKMEKAIETVQSNFNTVRTGRANPSMLDRIEVEYYGTPVNLKTIAQINTPDATSLLIQPYDKSCLKLIEKAIVAANIGVTPSNDGEVIRVTVPPLTSDRRKEMTKTVAKLSEEGKVAIRNIRRDAIKAYDKLEKEKKLSEDNVKDLSADLQKITDEYMKKVEAIQKQKEQELSKV

SEQ ID NO: 62472 - protein, 266 aa, Triticum aestivum
  peptide (1)..(266): Ceres Seq. ID no. 12615219
  misc_feature (100)..(263): Pfam Name: Ribosome recycling factor Pfam Description: Ribosome recycling factor
  misc_feature (91)..(266): Homolog of NCBI NO: 22297803 NR Description: ribosome releasing factor [Thermosynechococcus
  misc_feature (88)..(266): Homolog of NCBI NO: 23041074 NR Description: hypothetical protein [Trichodesmium erythraeum
  misc_feature (84)..(266): Homolog of NCBI NO: 23126085 NR Description: hypothetical protein [Nostoc punctiforme]
  misc_feature (89)..(266): Homolog of NCBI NO: 17228703 NR Description: ribosome recycling factor [Nostoc sp. PCC 7120]
  misc_feature (112)..(266): Homolog of NCBI NO: 629661 NR Description: ribosome releasing factor - carrot
  misc_feature (32)..(266): Homolog of NCBI NO: 11277801 NR Description: hypothetical protein F16M2.40 - Arabidopsis
  misc_feature (40)..(266): Homolog of NCBI NO: 7404451 NR Description: RIBOSOME RECYCLING FACTOR, CHLOROPLAST PRECURSOR
  misc_feature (31)..(266): Homolog of NCBI NO: 18412657 NR Description: putative protein
  misc_feature (29)..(266): Homolog of NCBI NO: 7388105 NR Description: Ribosome recycling factor, chloroplast precursor
  misc_feature (3)..(266): Homolog of NCBI NO: 34394208 NR Description: putative Ribosome recycling factor, chloroplast
MALHAVSPAAAASPPCALSSARLPQRPGCGCLSNRSSLLSSSTNFMKFQYGAVGFFGVPLVLQHSDKRAVLRHATNEEIEEEKMIVEEQAKEKMEKAIETVQSNFNTVRTGRANPSMLDRIEVEYYGTPVNLKTIAQINTPDATSLLIQPYDKSCLKLIEKAIVAANIGVTPSNDGEVIRVTVPPLTSDRRKEMTKTVAKLSEEGKVAIRNIRRDAIKAYDKLEKEKKLSEDNVKDLSADLQKITDEYMKKVEAIQKQKEQELSKV

SEQ ID NO: 62473 - protein, 221 aa, Triticum aestivum
  peptide (1)..(221): Ceres Seq. ID no. 12615220
  misc_feature (55)..(218): Pfam Name: Ribosome recycling factor Pfam Description: Ribosome recycling factor
  misc_feature (46)..(221): Homolog of NCBI NO: 22297803 NR Description: ribosome releasing factor [Thermosynechococcus
  misc_feature (43)..(221): Homolog of NCBI NO: 23041074 NR Description: hypothetical protein [Trichodesmium erythraeum
  misc_feature (39)..(221): Homolog of NCBI NO: 23126085 NR Description: hypothetical protein [Nostoc punctiforme]
  misc_feature (44)..(221): Homolog of NCBI NO: 17228703 NR Description: ribosome recycling factor [Nostoc sp. PCC 7120]
  misc_feature (67)..(221): Homolog of NCBI NO: 629661 NR Description: ribosome releasing factor - carrot
  misc_feature (1)..(221): Homolog of NCBI NO: 11277801 NR Description: hypothetical protein F16M2.40 - Arabidopsis
  misc_feature (1)..(221): Homolog of NCBI NO: 7404451 NR Description: RIBOSOME RECYCLING FACTOR, CHLOROPLAST PRECURSOR
  misc_feature (1)..(221): Homolog of NCBI NO: 18412657 NR Description: putative protein
  misc_feature (1)..(221): Homolog of NCBI NO: 7388105 NR Description: Ribosome recycling factor, chloroplast precursor
  misc_feature (1)..(221): Homolog of NCBI NO: 34394208 NR Description: putative Ribosome recycling factor, chloroplast
MKFQYGAVGFFGVPLVLQHSDKRAVLRHATNEEIEEEKMIVEEQAKEKMEKAIETVQSNFNTVRTGRANPSMLDRIEVEYYGTPVNLKTIAQINTPDATSLLIQPYDKSCLKLIEKAIVAANIGVTPSNDGEVIRVTVPPLTSDRRKEMTKTVAKLSEEGKVAIRNIRRDAIKAYDKLEKEKKLSEDNVKDLSADLQKITDEYMKKVEAIQKQKEQELSKV

SEQ ID NO: 62474 - DNA, 1360 bp, Triticum aestivum
  misc_feature (1)..(1360): Ceres Seq. ID no. 14313451
attcatccatccatcttgccgagcgctacaatggcgagcatcagaagtgtctcccctctcctcgctccgctcgccgccgcggccacggtgctcgccgtgttgatgtctgcgccggtgtccgccaggagcttgccggagggcctcccggacatcaagccgctgctgtccaacccgtggtcggcgttccagaacctgtccggctgccagttcggggaccagcggcaggggctcgcgaggctcaaggactacctcagccgcttcggctacctccccgcgccgccggccaagttcaacgacatgttcgacgccgacatggagtccgccatccggacctaccagcacaacttcggcctcgaggccacgggccagctggacgcgtccaccgtcgccaagatgatgtccccgcgctgcggcgtcgccgacatcatcaacggcacctccgccatgggcaagacgacggtccacggccggaacctctactcctacttcccggggtccccctcgtggccgcgctccaagaagagcctccggtacgccatcacggcggccaccgagacgaccatcgaccgggccacgctgagcaaggtgttcgccagcgccttcgcacgctggtcggcggccaccacgctcaacttcaccgagacggcgtcggcgtccgacgccgacatcaccatcgggttccactcgggcgaccacggcgacggcgaggccttcgacgggccgctgggcacgttggcgcacgccttctcgcccaccgacggccggttccacctggacgcgtcggaggcctgggtggccggcggcgacgtgtcgcgcgcctcgctggacgccgccgtcgacctggagtcggtggccgtgcacgagatcggccacctgctggggctcggccactcgtcggtggagggcgccatcatgtacccgaccatcacgtcgcgcacgcagaaggtggagctggccaaagacgacgtcgacggcatccagagcctctacggcggcaaccccaacttcaagggcgtcacgccgccggccaccagcagcgaggagacccacagcgccgccccgcgcgcgctctccggcccgtggagcggcctggccggggcggctgcgctcgcactagccttgtcgtgctagttcttcttgcgtcgatcgattcacgaccatttttttaacgggcatatattcactttgctctaggatttgtgttgtacaaacattagtcactgggtgtgcaagatagtgtagatacgtgaattttgcgtgtatagatcgaatcatatagtacgatagtggtgcgcccatgtggccatgtgatatcatatgagttttgcagaatgtgccattgtgagttgtcaaaaaaaat

SEQ ID NO: 62475 - protein, 388 aa, Triticum aestivum
  peptide (1)..(388): Ceres Seq. ID no. 14313452
SSIHLAERYNGEHQKCLPSPRSARRRGHGARRVDVCAGVRQELAGGPPGHQAAAVQPVVGVPEPVRLPVRGPAAGAREAQGLPQPLRLPPRAAGQVQRHVRRRHGVRHPDLPAQLRPRGHGPAGRVHRRQDDVPALRRRRHHQRHLRHGQDDGPRPEPLLLLPGVPLVAALQEEPPVRHHGGHRDDHRPGHAEQGVRQRLRTLVGGHHAQLHRDGVGVRRRHHHRVPLGRPRRRRGLRRAAGHVGARLLAHRRPVPPGRVGGLGGRRRRVARLAGRRRRPGVGGRARDRPPAGARPLVGGGRHHVPDHHVAHAEGGAGQRRRRRHPEPLRRQPQLQGRHAAGHQQRGDPQRRPARALRPVERPGRGGCARTSLVVLVLLASIDSRPFF

SEQ ID NO: 62476 - protein, 376 aa, Triticum aestivum
  peptide (1)..(376): Ceres Seq. ID no. 14313453
  misc_feature (163)..(269): Pfam Name: Matrixin Pfam Description: Matrixin
  misc_feature (25)..(370): Homolog of NCBI NO: 37536782 NR Description: putative metalloproteinase
  misc_feature (56)..(363): Homolog of NCBI NO: 21553383 NR Description: proteinase like protein [Arabidopsis thaliana]
  misc_feature (56)..(363): Homolog of NCBI NO: 28393482 NR Description: putative proteinase [Arabidopsis thaliana]
  misc_feature (56)..(363): Homolog of NCBI NO: 15235820 NR Description: proteinase like protein [Arabidopsis thaliana]
  misc_feature (40)..(364): Homolog of NCBI NO: 30688744 NR Description: metallo proteinase -related [Arabidopsis thaliana]
  misc_feature (40)..(364): Homolog of NCBI NO: 7488435 NR Description: zinc metalloproteinase homolog F3I6.6 -
  misc_feature (29)..(375): Homolog of NCBI NO: 15218963 NR Description: metallo proteinase -related [Arabidopsis
  misc_feature (34)..(375): Homolog of NCBI NO: 15223067 NR Description: matrix metallo proteinase -related [Arabidopsis
IHPSILPSATMASIRSVSPLLAPLAAAATVLAVLMSAPVSARSLPEGLPDIKPLLSNPWSAFQNLSGCQFGDQRQGLARLKDYLSRFGYLPAPPAKFNDMFDADMESAIRTYQHNFGLEATGQLDASTVAKMMSPRCGVADIINGTSAMGKTTVHGRNLYSYFPGSPSWPRSKKSLRYAITAATETTIDRATLSKVFASAFARWSAATTLNFTETASASDADITIGFHSGDHGDGEAFDGPLGTLAHAFSPTDGRFHLDASEAWVAGGDVSRASLDAAVDLESVAVHEIGHLLGLGHSSVEGAIMYPTITSRTQKVELAKDDVDGIQSLYGGNPNFKGVTPPATSSEETHSAAPRALSGPWSGLAGAAALALALSC

SEQ ID NO: 62477 - protein, 366 aa, Triticum aestivum
  peptide (1)..(366): Ceres Seq. ID no. 14313454
  misc_feature (153)..(259): Pfam Name: Matrixin Pfam Description: Matrixin
  misc_feature (15)..(360): Homolog of NCBI NO: 37536782 NR Description: putative metalloproteinase
  misc_feature (46)..(353): Homolog of NCBI NO: 28393482 NR Description: putative proteinase [Arabidopsis thaliana]
  misc_feature (46)..(353): Homolog of NCBI NO: 21553383 NR Description: proteinase like protein [Arabidopsis thaliana]
  misc_feature (46)..(353): Homolog of NCBI NO: 15235820 NR Description: proteinase like protein [Arabidopsis thaliana]
  misc_feature (30)..(354): Homolog of NCBI NO: 30688744 NR Description: metallo proteinase -related [Arabidopsis thaliana]
  misc_feature (30)..(354): Homolog of NCBI NO: 7488435 NR Description: zinc metalloproteinase homolog F3I6.6 -
  misc_feature (19)..(365): Homolog of NCBI NO: 15218963 NR Description: metallo proteinase -related [Arabidopsis
  misc_feature (24)..(365): Homolog of NCBI NO: 15223067 NR Description: matrix metallo proteinase -related [Arabidopsis
MASIRSVSPLLAPLAAAATVLAVLMSAPVSARSLPEGLPDIKPLLSNPWSAFQNLSGCQFGDQRQGLARLKDYLSRFGYLPAPPAKFNDMFDADMESAIRTYQHNFGLEATGQLDASTVAKMMSPRCGVADIINGTSAMGKTTVHGRNLYSYFPGSPSWPRSKKSLRYAITAATETTIDRATLSKVFASAFARWSAATTLNFTETASASDADITIGFHSGDHGDGEAFDGPLGTLAHAFSPTDGRFHLDASEAWVAGGDVSRASLDAAVDLESVAVHEIGHLLGLGHSSVEGAIMYPTITSRTQKVELAKDDVDGIQSLYGGNPNFKGVTPPATSSEETHSAAPRALSGPWSGLAGAAALALALSC

SEQ ID NO: 62478 - DNA, 1056 bp, Triticum aestivum
  misc_feature (1)..(1056): Ceres Seq. ID no. 13585286
cttcgcgtttcttccccccacagtctcttttactctccccttctccttccccaagccaagcaaaggcagcagaggccaagaaatgggcgaccgggcgtacgggccgtcctccaagccggtccctgtggcggcaccgcggtccgccaacggcacggcgaacggcggcggtgtagggacacctcggcctccgtccatggtgcccggtcgcgtcccgccgccgccgatgtaccgaccaaagccgatgcaaccgccaccgggccgtcggcggagcgggcgcgggtggtgctgcgcgtgttgcctgtggctgacgctggtgttggtggggctggtgttccttggagcaatagcgttgggggtgttctacgtgatttaccacccggagcttccgaccttcgccgtgacgtcgctccgtctggcggcgctgaacgtctccgactccgactccgtcacctcccgcatcgagttcacggtgaccgcgcgcaaccccaacgagaagatcgcgttcgtgtacggcgacatcggggctgccttcgcggccgacggcacggacatcggggacggcaccgtgccgggcttcctccaccccagccgcaacacgacggtcatcaaggggtcggcttcggcggccgccgcgacggtggacccggtgcaggcggccagtctcagatccaagaagtcccatgcgatgtcagtggagatggactccaaggtgggtttccagatcgggcagttcaagtcgaagcgcatcagcgtccgtgtgctgtgcggtggcttcagcgcggggctggccaagccggcgccctccccggcgccgatcatcgtggccgcggcgcctgcgccgacccggtcaaaaatcaggctgtcgtcgtcttccaccggaggcggcgggtcggcgacgacggacgcaaagtgtaagctccgcgtcaagatctggatttggacgttttgatgcatctgcgggtagggagaggagggatttttttcggtttggtttaacctttttcacactgtatgtggatttattggagtatagtctatatgattttatcttcctct

SEQ ID NO: 62479 - protein, 315 aa, Triticum aestivum
  peptide (1)..(315): Ceres Seq. ID no. 13585287
  misc_feature (67)..(255): Homolog of NCBI NO: 15221846 NR Description: hypothetical protein [Arabidopsis thaliana]
  misc_feature (60)..(259): Homolog of NCBI NO: 26449684 NR Description: unknown protein [Arabidopsis thaliana]
  misc_feature (60)..(259): Homolog of NCBI NO: 30690312 NR Description: expressed protein [Arabidopsis thaliana]
  misc_feature (60)..(259): Homolog of NCBI NO: 25408980 NR Description: hypothetical protein At2g46300 [imported] -
  misc_feature (30)..(285): Homolog of NCBI NO: 18394509 NR Description: expressed protein [Arabidopsis thaliana]
  misc_feature (30)..(285): Homolog of NCBI NO: 11762174 NR Description: At1g17620 [Arabidopsis thaliana]
  misc_feature (36)..(288): Homolog of NCBI NO: 21536796 NR Description: unknown [Arabidopsis thaliana]
  misc_feature (36)..(288): Homolog of NCBI NO: 15239804 NR Description: expressed protein [Arabidopsis thaliana]
  misc_feature (32)..(315): Homolog of NCBI NO: 34903552 NR Description: P0001B06.28 [Oryza sativa (japonica
  misc_feature (28)..(315): Homolog of NCBI NO: 34914304 NR Description: B1151A10.19 [Oryza sativa (japonica
FAFLPPTVSFTLPFSFPKPSKGSRGQEMGDRAYGPSSKPVPVAAPRSANGTANGGGVGTPRPPSMVPGRVPPPPMYRPKPMQPPPGRRRSGRGWCCACCLWLTLVLVGLVFLGAIALGVFYVIYHPELPTFAVTSLRLAALNVSDSDSVTSRIEFTVTARNPNEKIAFVYGDIGAAFAADGTDIGDGTVPGFLHPSRNTTVIKGSASAAAATVDPVQAASLRSKKSHAMSVEMDSKVGFQIGQFKSKRISVRVLCGGFSAGLAKPAPSPAPIIVAAAPAPTRSKIRLSSSSTGGGGSATTDAKCKLRVKIWIWTF

SEQ ID NO: 62480 - protein, 304 aa, Triticum aestivum
  peptide (1)..(304): Ceres Seq. ID no. 13585288
LRVSSPHSLFYSPLLLPQAKQRQQRPRNGRPGVRAVLQAGPCGGTAVRQRHGERRRCRDTSASVHGARSRPAAADVPTKADATATGPSAERARVVLRVLPVADAGVGGAGVPWSNSVGGVLRDLPPGASDLRRDVAPSGGAERLRLRLRHLPHRVHGDRAQPQREDRVRVRRHRGCLRGRRHGHRGRHRAGLPPPQPQHDGHQGVGFGGRRDGGPGAGGQSQIQEVPCDVSGDGLQGGFPDRAVQVEAHQRPCAVRWLQRGAGQAGALPGADHRGRGACADPVKNQAVVVFHRRRRVGDDGRKV

SEQ ID NO: 62481 - protein, 288 aa, Triticum aestivum
  peptide (1)..(288): Ceres Seq. ID no. 13585289
  misc_feature (40)..(228): Homolog of NCBI NO: 15221846 NR Description: hypothetical protein [Arabidopsis thaliana]
  misc_feature (33)..(232): Homolog of NCBI NO: 26449684 NR Description: unknown protein [Arabidopsis thaliana]
  misc_feature (33)..(232): Homolog of NCBI NO: 30690312 NR Description: expressed protein [Arabidopsis thaliana]
  misc_feature (33)..(232): Homolog of NCBI NO: 25408980 NR Description: hypothetical protein At2g46300 [imported] -
  misc_feature (3)..(258): Homolog of NCBI NO: 18394509 NR Description: expressed protein [Arabidopsis thaliana]
  misc_feature (3)..(258): Homolog of NCBI NO: 11762174 NR Description: At1g17620 [Arabidopsis thaliana]
  misc_feature (9)..(261): Homolog of NCBI NO: 21536796 NR Description: unknown [Arabidopsis thaliana]
  misc_feature (9)..(261): Homolog of NCBI NO: 15239804 NR Description: expressed protein [Arabidopsis thaliana]
  misc_feature (5)..(288): Homolog of NCBI NO: 34903552 NR Description: P0001B06.28 [Oryza sativa (japonica
  misc_feature (1)..(288): Homolog of NCBI NO: 34914304 NR Description: B1151A10.19 [Oryza sativa (japonica
MGDRAYGPSSKPVPVAAPRSANGTANGGGVGTPRPPSMVPGRVPPPPMYRPKPMQPPPGRRRSGRGWCCACCLWLTLVLVGLVFLGAIALGVFYVIYHPELPTFAVTSLRLAALNVSDSDSVTSRIEFTVTARNPNEKIAFVYGDIGAAFAADGTDIGDGTVPGFLHPSRNTTVIKGSASAAAATVDPVQAASLRSKKSHAMSVEMDSKVGFQIGQFKSKRISVRVLCGGFSAGLAKPAPSPAPIIVAAAPAPTRSKIRLSSSSTGGGGSATTDAKCKLRVKIWIWTF

SEQ ID NO: 62482 - DNA, 1312 bp, Triticum aestivum
  misc_feature (1)..(1312): Ceres Seq. ID no. 13583590
gaacccttgctcgactgcgactgcgattgcgtcccggcggtagccgctgccgtccggccgcgctgctatggcgagttagacgtcgcggccctcattgatccccgttacggatttccccttcttccccggggatcccgcctgccctaccaccgaatcgtgctgctccattgccttggaaggtcgccgccgccgccgcccgttcctccttccgtcacaatacaaggtgatcaatggcgtcaggtgcacctggtatcatgctccgacacctttccaaaacacttgctgtaagcccagcagtggcatctggtatgaccagccagcatcaccagcttcaacagcgtgcaccagtgggtggcacatccaaaggcaaggctaagctcaaagccggcctgcctttgaagcgcagcgtcatagcaaagaaggggggcgcgcctgccactgctgggagcggtggtgctggccgtggtcgtcgtgaagccattgagcgcattactcagattgcagagtcttgtctgaagtcctctactcctctacggcacttgtcccccaaggagtgtcttcgcgaggcaaaacgtgaggagcttggactcatctccaaggaacgacaacgtgaacttgatattgccaaggctaaagccaagtccaaaggtaccattggaggtgatggtggccgtgttctgatgggtccacctggccttgactatatcagtcttggccttgtagatgagaagaccatccctacttatgagctgacagttgaggatggtcggcgtcttgccaaagaatacagccgtgtgctaatgcaacgacaccgtgcacgccaaactgcggaatcaacacttttgagcctcaagaaggaggccgttgctgcactccccgagaagctgcaagctgctgctatggttcctgacatgacaccattccctgcaaaccggtacatggcaacactcacgccaccaattgaagggtatattgaaaaggtgcgagatgctgccaagaagtattctgtgaaagagaagcttcgctgagttcaattcaatccatataaggtggctgagagttctggaactttttcttatgttgtattcttgagaatctgtcagttttgctgacttcgtgctgtttttgcctctaataatcagatagcggtaataaactgccacgattttgctttgcaagaccatgttattttggctgaatctttttactccagttttgctgtgtagcacaaattgatatgttgaactaaaatcaagaaaagtttgttgctttgaaatgatgcttatactgaaagtatcctgccaaggttact

SEQ ID NO: 62483 - protein, 265 aa, Triticum aestivum
  peptide (1)..(265): Ceres Seq. ID no. 15222763
  misc_feature (29)..(246): Homolog of NCBI NO: 15233539 NR Description: hypothetical protein [Arabidopsis thaliana]
  misc_feature (29)..(265): Homolog of NCBI NO: 15235571 NR Description: expressed protein [Arabidopsis thaliana]
  misc_feature (9)..(265): Homolog of NCBI NO: 34914612 NR Description: P0520B06.19 [Oryza sativa (japonica
MASGAPGIMLRHLSKTLAVSPAVASGMTSQHHQLQQRAPVGGTSKGKAKLKAGLPLKRSVIAKKGGAPATAGSGGAGRGRREAIERITQIAESCLKSSTPLRHLSPKECLREAKREELGLISKERQRELDIAKAKAKSKGTIGGDGGRVLMGPPGLDYISLGLVDEKTIPTYELTVEDGRRLAKEYSRVLMQRHRARQTAESTLLSLKKEAVAALPEKLQAAAMVPDMTPFPANRYMATLTPPIEGYIEKVRDAAKKYSVKEKLR

SEQ ID NO: 62484 - protein, 257 aa, Triticum aestivum
  peptide (1)..(257): Ceres Seq. ID no. 15222764
  misc_feature (21)..(238): Homolog of NCBI NO: 15233539 NR Description: hypothetical protein [Arabidopsis thaliana]
  misc_feature (21)..(257): Homolog of NCBI NO: 15235571 NR Description: expressed protein [Arabidopsis thaliana]
  misc_feature (1)..(257): Homolog of NCBI NO: 34914612 NR Description: P0520B06.19 [Oryza sativa (japonica
MLRHLSKTLAVSPAVASGMTSQHHQLQQRAPVGGTSKGKAKLKAGLPLKRSVIAKKGGAPATAGSGGAGRGRREAIERITQIAESCLKSSTPLRHLSPKECLREAKREELGLISKERQRELDIAKAKAKSKGTIGGDGGRVLMGPPGLDYISLGLVDEKTIPTYELTVEDGRRLAKEYSRVLMQRHRARQTAESTLLSLKKEAVAALPEKLQAAAMVPDMTPFPANRYMATLTPPIEGYIEKVRDAAKKYSVKEKLR

SEQ ID NO: 62485 - protein, 239 aa, Triticum aestivum
  peptide (1)..(239): Ceres Seq. ID no. 15222765
  misc_feature (3)..(220): Homolog of NCBI NO: 15233539 NR Description: hypothetical protein [Arabidopsis thaliana]
  misc_feature (3)..(239): Homolog of NCBI NO: 15235571 NR Description: expressed protein [Arabidopsis thaliana]
  misc_feature (1)..(239): Homolog of NCBI NO: 34914612 NR Description: P0520B06.19 [Oryza sativa (japonica
MTSQHHQLQQRAPVGGTSKGKAKLKAGLPLKRSVIAKKGGAPATAGSGGAGRGRREAIERITQIAESCLKSSTPLRHLSPKECLREAKREELGLISKERQRELDIAKAKAKSKGTIGGDGGRVLMGPPGLDYISLGLVDEKTIPTYELTVEDGRRLAKEYSRVLMQRHRARQTAESTLLSLKKEAVAALPEKLQAAAMVPDMTPFPANRYMATLTPPIEGYIEKVRDAAKKYSVKEKLR

SEQ ID NO: 62486 - DNA, 1206 bp, Triticum aestivum
  misc_feature (1)..(1206): Ceres Seq. ID no. 13596601
agaacatcctaatcgaaaaccgatctagtatccctcaaagcttccatggagaaggcgccaggcacgagcatcgaggctatcatccgacggcttaggctccaccaggcgcctccctccccttactccggcgatccctcaacagcggcgacccccgccgcagccaacctgtttcagccgcggagagccgccgtactggtctgcctcttccacgacgctgccggcgagctgcgtgtcctccttaccaagcgcgcttcctccctctccacccactccggggaggttgcattgcccggaggaaaggcagaggagggtgatgctgatgatgcagcaacggcattaagggaggcaaaggaggagattgggcttgatccagccttggtcactgtcgtctcctcgcttgagcacttcttgtccaagcatcttctggtagttgttcctgttgttggcatactctcagatatacaggctttcaaacctgtccttaatgttgatgaggtggacgacatttttgatgtacccctagagatgttcctcaaggatgagcgcaggagatccgaggagcgagaatggatggggcaggcgttcacacttcaccacttcgattatgagaaaggcgacaagacgtatgtaatctgggggctgactgctggcatcctgattcacgcggcttcagttgtataccagcggccaccagactttgctgagcgaagggtacaattcaacctgccgaagtactcacaggagtcttctccaatgccatgatcaggattaggatgcgcactcagttacatgcctgattcagcacacagaagactacatacaccaaaagaaatggtatagaatctaaaaggtttccaaatcatgtgttgttatacaattcattcattcttctatgcgccacgaccctgcgattgatgtgaagtgcgataccctggtggttcagctgcgacgatgatcatgcaggccgggccgcatcaagcaatggattacgatgcattcgatggtgtgcagcttgccacacacagcgactaaaaatcaaacgttcgacaaacatatttgtattctattctttgcataataatacattgcaagaacattaacattcagaaaattatttggtgctaatttgagtacactccaaaaatttgctccgctgcttctgtactatggttgctcctttcttgtactatattatttcccccgtct

SEQ ID NO: 62487 - protein, 238 aa, Triticum aestivum
  peptide (1)..(238): Ceres Seq. ID no. 15221931
  misc_feature (45)..(178): Pfam Name: NUDIX domain Pfam Description: NUDIX domain
  misc_feature (44)..(218): Homolog of NCBI NO: 34851788 NR Description: similar to coenzyme A diphosphatase [Rattus
  misc_feature (47)..(212): Homolog of NCBI NO: 23470438 NR Description: hypothetical protein [Pseudomonas syringae pv.
  misc_feature (42)..(228): Homolog of NCBI NO: 15242543 NR Description: MutT/nudix family protein [Arabidopsis thaliana]
  misc_feature (42)..(228): Homolog of NCBI NO: 21553389 NR Description: unknown [Arabidopsis thaliana]
  misc_feature (42)..(232): Homolog of NCBI NO: 18403412 NR Description: MutT/nudix family protein [Arabidopsis thaliana]
  misc_feature (42)..(229): Homolog of NCBI NO: 26450576 NR Description: unknown protein [Arabidopsis thaliana]
  misc_feature (42)..(238): Homolog of NCBI NO: 10764850 NR Description: F1K23.5 [Arabidopsis thaliana]
  misc_feature (42)..(229): Homolog of NCBI NO: 30690557 NR Description: MutT/nudix family protein [Arabidopsis thaliana]
  misc_feature (42)..(238): Homolog of NCBI NO: 18396900 NR Description: MutT/nudix family protein [Arabidopsis thaliana]
  misc_feature (1)..(238): Homolog of NCBI NO: 40253324 NR Description: putative phosphohydrolase
MEKAPGTSIEAIIRRLRLHQAPPSPYSGDPSTAATPAAANLFQPRRAAVLVCLFHDAAGELRVLLTKRASSLSTHSGEVALPGGKAEEGDADDAATALREAKEEIGLDPALVTVVSSLEHFLSKHLLVVVPVVGILSDIQAFKPVLNVDEVDDIFDVPLEMFLKDERRRSEEREWMGQAFTLHHFDYEKGDKTYVIWGLTAGILIHAASVVYQRPPDFAERRVQFNLPKYSQESSPMP

SEQ ID NO: 62488 - DNA, 1658 bp, Triticum aestivum
  misc_feature (1)..(1658): Ceres Seq. ID no. 13596635
agcgcaccacggtcgacctaccgcgcaggaccaccgagcccctcccttctcccgtgcctgctgcggatcccctttcctttgccttctctcctccagtcagctcctcttccgcgcgtgtggtggccgatggcggcggcggcggacacttccgcggcttccacgaccgggctcgcgctctcggaggcgagcatcaactgggagaggttggacaagacaaagtttcatgtcattggagcaatcctatttacggcccagcaaggtgttctgcacccaacagctgttgtgaagactagaatgcaggttgccgaaggaggactttcacatatgtctggctttgtcgtttttagaaagatattgaggagtgatggcatccctggtgttttcagaggatttggcaccagtgcagttggagctctgcctggacgaatcttggctctaacttcactagagatctccaaagaaatggcatttaaatactctgagcatttcgatatgtccgaggcatcaaggattgctgttgctaatggtgtagcaggcttagtgtcaagtaccttttcaagttcatattctgtacccctagatgtggtttgtcagagactcatggttcagggattgccagggatgcaaacatatagaggcccatttgatgtgataaataaggttgtcaggagtgaaggcctccggggcctttaccgaggttttggaattacccttttaactcaatcaccagcttctgccctttggtggagttcatatggtggggctcaacatgctatctggaggagcttgggctatggaaatggtacgcagaagaaaccctcccatacagaacttgttgctgtgcaagcaacagctggaacaattgctggagcttgctcatcgattatcactacaccaatagataccatcaagacccggcttcaggtaatggacaactacgggagtggaaggccatccgtcatgaagactaccaggctgctactgcgagaagaaggttggagaggtttataccgagggtttggaccacgctttcttaacatgtctctttggggtacatcaatgattgtcacatatgagctaataaaaagactttctgtgaaacctgagcaatgaaccttttggcttctgctccgcctatctggtcatcatttccgttttggccatctagtgaattccttttggtacagggattggcatgtaacactggttggaaattcttgatgcaagtccccttataaagtctgacatgtttctgtacggaactaccctgtaaatacctccaagtgcaagggtgctcgtttcagatgagagccagaggatcgatctgggcactggagcgccttgtagttgttgagcaaaaatttccctgtaagtgctgaagggagctcgtttcaggatgagagccagaggctggatctgggtactgagcaccttgtagttgttcagcaaaaattccggaaacatagttttgtgtcttcccatctaattggcatagttaccccacttgaattttcaatttcgcattacttttgtagctcacttcttgggatgagatgtggcatgtccaaatcaatttagcatcatcagtgaggtggtaggctgcaatgtataccttgtcgagtgtcgacattctacagtgagaggtagatactttcttt

SEQ ID NO: 62489 - protein, 370 aa, Triticum aestivum
  peptide (1)..(370): Ceres Seq. ID no. 13596636
  misc_feature (49)..(370): Homolog of NCBI NO: 21594326 NR Description: mitochondrial carrier-like protein [Arabidopsis
  misc_feature (49)..(370): Homolog of NCBI NO: 12278522 NR Description: putative mitochondrial carrier protein
  misc_feature (49)..(370): Homolog of NCBI NO: 18496651 NR Description: putative mitochondrial carrier protein [Triticum
  misc_feature (48)..(370): Homolog of NCBI NO: 12061241 NR Description: 36I5.1 [Oryza sativa (japonica cultivar-group)]
  misc_feature (261)..(364): Homolog of NCBI NO: 11358653 NR Description: probable mitochondrial carrier protein -
  misc_feature (48)..(261): Homolog of NCBI NO: 11358653 NR Description: probable mitochondrial carrier protein -
  misc_feature (48)..(364): Homolog of NCBI NO: 21553961 NR Description: putative mitochondrial carrier protein
  misc_feature (48)..(364): Homolog of NCBI NO: 18417739 NR Description: mitochondrial carrier protein family [Arabidopsis
  misc_feature (48)..(370): Homolog of NCBI NO: 21326111 NR Description: putative mitochondrial carrier protein [Sorghum
  misc_feature (116)..(369): Homolog of NCBI NO: 34894824 NR Description: P0554D10.15 [Oryza sativa (japonica
SAPRSTYRAGPPSPSLLPCLLRIPFPLPSLLQSAPLPRVWWPMAAAADTSAASTTGLALSEASINWERLDKTKFHVIGAILFTAQQGVLHPTAVVKTRMQVAEGGLSHMSGFVVFRKILRSDGIPGVFRGFGTSAVGALPGRILALTSLEISKEMAFKYSEHFDMSEASRIAVANGVAGLVSSTFSSSYSVPLDVVCQRLMVQGLPGMQTYRGPFDVINKVVRSEGLRGLYRGFGITLLTQSPASALWWSSYGGAQHAIWRSLGYGNGTQKKPSHTELVAVQATAGTIAGACSSIITTPIDTIKTRLQVMDNYGSGRPSVMKTTRLLLREEGWRGLYRGFGPRFLNMSLWGTSMIVTYELIKRLSVKPEQ

SEQ ID NO: 62490 - protein, 328 aa, Triticum aestivum
  peptide (1)..(328): Ceres Seq. ID no. 13596637
  misc_feature (7)..(328): Homolog of NCBI NO: 21594326 NR Description: mitochondrial carrier-like protein [Arabidopsis
  misc_feature (7)..(328): Homolog of NCBI NO: 12278522 NR Description: putative mitochondrial carrier protein
  misc_feature (7)..(328): Homolog of NCBI NO: 18496651 NR Description: putative mitochondrial carrier protein [Triticum
  misc_feature (6)..(328): Homolog of NCBI NO: 12061241 NR Description: 36I5.1 [Oryza sativa (japonica cultivar-group)]
  misc_feature (219)..(322): Homolog of NCBI NO: 11358653 NR Description: probable mitochondrial carrier protein -
  misc_feature (6)..(219): Homolog of NCBI NO: 11358653 NR Description: probable mitochondrial carrier protein -
  misc_feature (6)..(322): Homolog of NCBI NO: 21553961 NR Description: putative mitochondrial carrier protein
  misc_feature (6)..(322): Homolog of NCBI NO: 18417739 NR Description: mitochondrial carrier protein family [Arabidopsis
  misc_feature (6)..(328): Homolog of NCBI NO: 21326111 NR Description: putative mitochondrial carrier protein [Sorghum
  misc_feature (74)..(327): Homolog of NCBI NO: 34894824 NR Description: P0554D10.15 [Oryza sativa (japonica
MAAAADTSAASTTGLALSEASINWERLDKTKFHVIGAILFTAQQGVLHPTAVVKTRMQVAEGGLSHMSGFVVFRKILRSDGIPGVFRGFGTSAVGALPGRILALTSLEISKEMAFKYSEHFDMSEASRIAVANGVAGLVSSTFSSSYSVPLDVVCQRLMVQGLPGMQTYRGPFDVINKVVRSEGLRGLYRGFGITLLTQSPASALWWSSYGGAQHAIWRSLGYGNGTQKKPSHTELVAVQATAGTIAGACSSIITTPIDTIKTRLQVMDNYGSGRPSVMKTTRLLLREEGWRGLYRGFGPRFLNMSLWGTSMIVTYELIKRLSVKPEQ

SEQ ID NO: 62491 - protein, 272 aa, Triticum aestivum
  peptide (1)..(272): Ceres Seq. ID no. 13596638
  misc_feature (1)..(272): Homolog of NCBI NO: 21594326 NR Description: mitochondrial carrier-like protein [Arabidopsis
  misc_feature (1)..(272): Homolog of NCBI NO: 12278522 NR Description: putative mitochondrial carrier protein
  misc_feature (1)..(272): Homolog of NCBI NO: 18496651 NR Description: putative mitochondrial carrier protein [Triticum
  misc_feature (1)..(272): Homolog of NCBI NO: 12061241 NR Description: 36I5.1 [Oryza sativa (japonica cultivar-group)]
  misc_feature (163)..(266): Homolog of NCBI NO: 11358653 NR Description: probable mitochondrial carrier protein -
  misc_feature (1)..(163): Homolog of NCBI NO: 11358653 NR Description: probable mitochondrial carrier protein -
  misc_feature (1)..(266): Homolog of NCBI NO: 21553961 NR Description: putative mitochondrial carrier protein
  misc_feature (1)..(266): Homolog of NCBI NO: 18417739 NR Description: mitochondrial carrier protein family [Arabidopsis
  misc_feature (1)..(272): Homolog of NCBI NO: 21326111 NR Description: putative mitochondrial carrier protein [Sorghum
  misc_feature (18)..(271): Homolog of NCBI NO: 34894824 NR Description: P0554D10.15 [Oryza sativa (japonica
MQVAEGGLSHMSGFVVFRKILRSDGIPGVFRGFGTSAVGALPGRILALTSLEISKEMAFKYSEHFDMSEASRIAVANGVAGLVSSTFSSSYSVPLDVVCQRLMVQGLPGMQTYRGPFDVINKVVRSEGLRGLYRGFGITLLTQSPASALWWSSYGGAQHAIWRSLGYGNGTQKKPSHTELVAVQATAGTIAGACSSIITTPIDTIKTRLQVMDNYGSGRPSVMKTTRLLLREEGWRGLYRGFGPRFLNMSLWGTSMIVTYELIKRLSVKPEQ

SEQ ID NO: 62492 - DNA, 1095 bp, Triticum aestivum
  misc_feature (1)..(1095): Ceres Seq. ID no. 12544053
ttagttatacccacatgagagatgagactatttatgattgagctccttgctggagcagaacgggagacgcccattgctgcagctacttcacccactttgctcacgttatctgactccgactgatttgatttgtctgaagtacagtgtgccttcccttgtttcaaaggatgaggcatcagagagtgctactaaagttaacttggatagtaagttggatgatgtagctgacaaagaacctgggggttcagaagacacactggttgcatctgatagcaagaaggacccgtttaaacggcggcaagaactgttggtgaaaagcgagctttttgaggttctcatcgagacttgcattgaaaatgttggagagttacttagaacaaacttcggcaaagatgtattatacgaggttgctgtaggtggaaaaaataatgtcttggagggggtcaccgacaggatccacgtgcttcacaatgctatagcttctgacgcagaacgcccgaggacagaagatgttgagcatgcctttgataactaccactcgagccgcgtaatcagaaagatgatacttgattgtcctgcgtttgctgctaccctatggaaaaaagccctcaaagggaagtgcaagtcatttgcagatggattcagctccaaggtggtggctgcctatctggaatcttcggattccaaggtgaaggatcttgcgaaatccgaggtgcagccgctcatcgacggtggcatactgaagattccagaccataaagcagcggagaagaagtgagtcttctctcaacgggcctctcaccatcgccagcaacacaaagcaggccgaggcggcgaccgtgcttgcgtgttagatgaaagagtgtaatacatacatccgcggtcatcctactggaggtgtatgttcaattttggcactggataccaatggactcgaaatacatacagtcgttaagggtttaggttaatacttgactgttactggggaggtttgctgcgatatattcgtgtgatgtggcataagtttgaccgttcgccatcacatntaagcagacgatgtgaccaaagtagatttcatttgcatattggcatgcc

SEQ ID NO: 62493 - protein, 72 aa, Triticum aestivum
  peptide (1)..(72): Ceres Seq. ID no. 12544054
  misc_feature (1)..(70): Homolog of NCBI NO: 18401257 NR Description: expressed protein
  misc_feature (1)..(71): Homolog of NCBI NO: 34897258 NR Description: unknown protein [Oryza sativa (japonica
MILDCPAFAATLWKKALKGKCKSFADGFSSKVVAAYLESSDSKVKDLAKSEVQPLIDGGILKIPDHKAAEKK

SEQ ID NO: 62494 - protein, 54 aa, Triticum aestivum
  peptide (1)..(54): Ceres Seq. ID no. 12544055
MEKSPQREVQVICRWIQLQGGGCLSGIFGFQGEGSCEIRGAAAHRRWHTEDSRP

SEQ ID NO: 62495 - protein, 37 aa, Triticum aestivum
  peptide (1)..(37): Ceres Seq. ID no. 12544056
MKECNTYIRGHPTGGVCSILALDTNGLEIHTVVKGLG

SEQ ID NO: 62496 - DNA, 457 bp, Triticum aestivum
  misc_feature (1)..(457): Ceres Seq. ID no. 15175006
atcattgctctgtcagttcccttctttgcgcttgtgatggctctgattggttctttattcgcgatgcttgtgacctacattcttccttgcgcctgctttctggccatcctcaaggcaaaagcgacttggtatcagactgcgacatgctcattcatcatcgccgtaggggttacctgcgcctgcgtggggacatactcatccctctccgggattgtccagaactacgcaacctgattctccctacatacataattgagaagattgctcgttcaaccgcgttattatacatataattaagcatatgtatgagcgagagtggaggattcaaattttgccgaacaatgaattatgtccatcgatatataaatgttgtatgattaaatttgtattgctgttaaatttgtggcaaccccgataactttgcattattattgttaaatttgtgtgttgatggatc

SEQ ID NO: 62497 - protein, 96 aa, Triticum aestivum
  peptide (1)..(96): Ceres Seq. ID no. 15175007
HCSVSSLLCACDGSDWFFIRDACDLHSSLRLLSGHPQGKSDLVSDCDMLIHHRRRGYLRLRGDILIPLRDCPELRNLILPTYIIEKIARSTALLYI

SEQ ID NO: 62498 - protein, 77 aa, Triticum aestivum
  peptide (1)..(77): Ceres Seq. ID no. 15175008
  misc_feature (3)..(75): Homolog of NCBI NO: 18405629 NR Description: amino acid transporter family [Arabidopsis
  misc_feature (3)..(75): Homolog of NCBI NO: 23397299 NR Description: unknown protein [Arabidopsis thaliana]
  misc_feature (1)..(73): Homolog of NCBI NO: 30687791 NR Description: amino acid transporter family [Arabidopsis
  misc_feature (1)..(73): Homolog of NCBI NO: 15292735 NR Description: unknown protein [Arabidopsis thaliana]
  misc_feature (1)..(73): Homolog of NCBI NO: 25408639 NR Description: hypothetical protein At2g39130 [imported] -
  misc_feature (1)..(72): Homolog of NCBI NO: 22326569 NR Description: amino acid transporter family [Arabidopsis
  misc_feature (1)..(72): Homolog of NCBI NO: 11358405 NR Description: hypothetical protein T7H20.220 - Arabidopsis
  misc_feature (1)..(69): Homolog of NCBI NO: 30679549 NR Description: amino acid transporter family [Arabidopsis
  misc_feature (1)..(69): Homolog of NCBI NO: 11358406 NR Description: hypothetical protein T7H20.230 - Arabidopsis
  misc_feature (1)..(75): Homolog of NCBI NO: 32488047 NR Description: OSJNBa0014F04.26 [Oryza sativa (japonica
IIALSVPFFALVMALIGSLFAMLVTYILPCACFLAILKAKATWYQTATCSFIIAVGVTCACVGTYSSLSGIVQNYAT

SEQ ID NO: 62499 - protein, 65 aa, Triticum aestivum
  peptide (1)..(65): Ceres Seq. ID no. 15175009
  misc_feature (1)..(63): Homolog of NCBI NO: 18405629 NR Description: amino acid transporter family [Arabidopsis
  misc_feature (1)..(63): Homolog of NCBI NO: 23397299 NR Description: unknown protein [Arabidopsis thaliana]
  misc_feature (1)..(61): Homolog of NCBI NO: 30687791 NR Description: amino acid transporter family [Arabidopsis
  misc_feature (1)..(61): Homolog of NCBI NO: 15292735 NR Description: unknown protein [Arabidopsis thaliana]
  misc_feature (1)..(61): Homolog of NCBI NO: 25408639 NR Description: hypothetical protein At2g39130 [imported] -
  misc_feature (1)..(60): Homolog of NCBI NO: 22326569 NR Description: amino acid transporter family [Arabidopsis
  misc_feature (1)..(60): Homolog of NCBI NO: 11358405 NR Description: hypothetical protein T7H20.220 - Arabidopsis
  misc_feature (1)..(57): Homolog of NCBI NO: 30679549 NR Description: amino acid transporter family [Arabidopsis
  misc_feature (1)..(57): Homolog of NCBI NO: 11358406 NR Description: hypothetical protein T7H20.230 - Arabidopsis
  misc_feature (1)..(63): Homolog of NCBI NO: 32488047 NR Description: OSJNBa0014F04.26 [Oryza sativa (japonica
MALIGSLFAMLVTYILPCACFLAILKAKATWYQTATCSFIIAVGVTCACVGTYSSLSGIVQNYAT

SEQ ID NO: 62500 - protein, 49 aa, Triticum aestivum
  peptide (1)..(49): Ceres Seq. ID no. 15175010
MLIHHRRRGYLRLRGDILIPLRDCPELRNLILPTYIIEKIARSTALLYI

SEQ ID NO: 62501 - DNA, 862 bp, Triticum aestivum
  misc_feature (1)..(862): Ceres Seq. ID no. 15226850
accaaatcaatcaaacgcggtcttcctccctgagacgcacgcaccgcacctcaccgccccgcgtcgcgagatctcaaatccccgatccgaccccaccggcggcgatggccggcaaggagctgagcgacgagcaggttgcgtcgatgcgggaggccttctccctcttcgacactgacggcgacggccgcatcgccccctcggagctcggcgtcctcatgcgctccctgggtgggaacccgacgcaggcgcagctccgcgacatcaccgcccaggagaagctcacggcgcccttcgacttcaagcgattcctcgaactcatgcgcgcccacctccgcccggagccgttcgaccgcccgctccgcgacgccttccgcgtcctcgacaaggacgcgtcgggcaccgtctccgtcgcggacctccgccacgtcctcacctccatcggcgagaagctcgagccccatgagttcgacgagtggatccgcgaggtcgacgtcgccgcggacggcaccatccgctacgacgacttcatccgccgcatcgtcgccaagtagtggattgatccgtctcccagcctgctcagacttcttcgtatttaataactcctccttcgcgtgattttatttcgtatcatctcatctgatctgctgcgcttctgttttgtgctttggtttcgttgtggttccccaaccgccctagggtttggataaaaatggtgtgattatggattaatggatctgtccgatggtattgcaatgtaaagcatggatcctgttactttctgtgattgattgattgcttaatcagaaaccagtgaaatgcgccagtttatgcattcatgttaatacagcctatgatttgtttt

SEQ ID NO: 62502 - protein, 182 aa, Triticum aestivum
  peptide (1)..(182): Ceres Seq. ID no. 15226851
  misc_feature (47)..(75): Pfam Name: EF hand Pfam Description: EF hand
  misc_feature (39)..(182): Homolog of NCBI NO: 4959151 NR Description: calmodulin mutant SYNCAM48 [synthetic construct]
  misc_feature (38)..(182): Homolog of NCBI NO: 115525 NR Description: CALMODULIN
  misc_feature (39)..(182): Homolog of NCBI NO: 4959645 NR Description: calmodulin mutant SYNCAM31 [synthetic construct]
  misc_feature (39)..(182): Homolog of NCBI NO: 1076793 NR Description: calmodulin cam2 - maize
  misc_feature (24)..(181): Homolog of NCBI NO: 6630454 NR Description: F23N19.18 [Arabidopsis thaliana]
  misc_feature (35)..(182): Homolog of NCBI NO: 15221593 NR Description: calmodulin, putative [Arabidopsis thaliana]
  misc_feature (37)..(181): Homolog of NCBI NO: 25402719 NR Description: protein F5O11.4 [imported] - Arabidopsis thaliana
  misc_feature (37)..(182): Homolog of NCBI NO: 15221284 NR Description: calmodulin, putative [Arabidopsis thaliana]
  misc_feature (37)..(182): Homolog of NCBI NO: 28629126 NR Description: putative serine/threonine kinase [Vitis vinifera]
  misc_feature (35)..(182): Homolog of NCBI NO: 29367559 NR Description: putative serine/threonine kinase
QINQTRSSSLRRTHRTSPPRVARSQIPDPTPPAAMAGKELSDEQVASMREAFSLFDTDGDGRIAPSELGVLMRSLGGNPTQAQLRDITAQEKLTAPFDFKRFLELMRAHLRPEPFDRPLRDAFRVLDKDASGTVSVADLRHVLTSIGEKLEPHEFDEWIREVDVAADGTIRYDDFIRRIVAK

SEQ ID NO: 62503 - protein, 148 aa, Triticum aestivum
  peptide (1)..(148): Ceres Seq. ID no. 15226852
  misc_feature (13)..(41): Pfam Name: EF hand Pfam Description: EF hand
  misc_feature (5)..(148): Homolog of NCBI NO: 4959151 NR Description: calmodulin mutant SYNCAM48 [synthetic construct]
  misc_feature (4)..(148): Homolog of NCBI NO: 115525 NR Description: CALMODULIN
  misc_feature (5)..(148): Homolog of NCBI NO: 4959645 NR Description: calmodulin mutant SYNCAM31 [synthetic construct]
  misc_feature (5)..(148): Homolog of NCBI NO: 1076793 NR Description: calmodulin cam2 - maize
  misc_feature (1)..(147): Homolog of NCBI NO: 6630454 NR Description: F23N19.18 [Arabidopsis thaliana]
  misc_feature (1)..(148): Homolog of NCBI NO: 15221593 NR Description: calmodulin, putative [Arabidopsis thaliana]
  misc_feature (3)..(147): Homolog of NCBI NO: 25402719 NR Description: protein F5O11.4 [imported] - Arabidopsis thaliana
  misc_feature (3)..(148): Homolog of NCBI NO: 15221284 NR Description: calmodulin, putative [Arabidopsis thaliana]
  misc_feature (3)..(148): Homolog of NCBI NO: 28629126 NR Description: putative serine/threonine kinase [Vitis vinifera]
  misc_feature (1)..(148): Homolog of NCBI NO: 29367559 NR Description: putative serine/threonine kinase
MAGKELSDEQVASMREAFSLFDTDGDGRIAPSELGVLMRSLGGNPTQAQLRDITAQEKLTAPFDFKRFLELMRAHLRPEPFDRPLRDAFRVLDKDASGTVSVADLRHVLTSIGEKLEPHEFDEWIREVDVAADGTIRYDDFIRRIVAK

SEQ ID NO: 62504 - protein, 135 aa, Triticum aestivum
  peptide (1)..(135): Ceres Seq. ID no. 15226853
  misc_feature (1)..(28): Pfam Name: EF hand Pfam Description: EF hand
  misc_feature (1)..(135): Homolog of NCBI NO: 4959151 NR Description: calmodulin mutant SYNCAM48 [synthetic construct]
  misc_feature (1)..(135): Homolog of NCBI NO: 115525 NR Description: CALMODULIN
  misc_feature (1)..(135): Homolog of NCBI NO: 4959645 NR Description: calmodulin mutant SYNCAM31 [synthetic construct]
  misc_feature (1)..(135): Homolog of NCBI NO: 1076793 NR Description: calmodulin cam2 - maize
  misc_feature (1)..(134): Homolog of NCBI NO: 6630454 NR Description: F23N19.18 [Arabidopsis thaliana]
  misc_feature (1)..(135): Homolog of NCBI NO: 15221593 NR Description: calmodulin, putative [Arabidopsis thaliana]
  misc_feature (1)..(134): Homolog of NCBI NO: 25402719 NR Description: protein F5O11.4 [imported] - Arabidopsis thaliana
  misc_feature (1)..(135): Homolog of NCBI NO: 15221284 NR Description: calmodulin, putative [Arabidopsis thaliana]
  misc_feature (1)..(135): Homolog of NCBI NO: 28629126 NR Description: putative serine/threonine kinase [Vitis vinifera]
  misc_feature (1)..(135): Homolog of NCBI NO: 29367559 NR Description: putative serine/threonine kinase
MREAFSLFDTDGDGRIAPSELGVLMRSLGGNPTQAQLRDITAQEKLTAPFDFKRFLELMRAHLRPEPFDRPLRDAFRVLDKDASGTVSVADLRHVLTSIGEKLEPHEFDEWIREVDVAADGTIRYDDFIRRIVAK

SEQ ID NO: 62505 - DNA, 1424 bp, Triticum aestivum
  misc_feature (1)..(1424): Ceres Seq. ID no. 12615223
agtaaagaaacctaaccgccgccgccagcaccaccacgtccgggtccagggcattcagagccgagatggcgtccgcgtcgccgtcgtgggtcatcctgggccgcgtggccaaggtgtcggccgccgacgccgatcttcctccgggcgccgacctctccctcgcgctgccgccgccgccgcgcgtcgcgctcctcaccatccccccgcgcatcttcccgggccaaaccacctccgacaacttcccctccgtcctcgccgtcgaccgctccggcctcctcctcctccacgcctcccagggccccgccgcgggccccgccatcgtcgacctccccggccgccaggaggtctgctggcgcccattcgtcgcgggctacttcgtcctcgactccaaatccgcctcggccttcccgctccccaaccccgagcgcatcatgaacccgggccgcctcggcctcatcgcctcccccgagggcgcaggccgctacatggtcgctgagctccagccggtcgccggcggcgagcaggccgacctcctctgcttctcgtcgcaatccgggcagtgggacaggaagaccgtcgcctacccgcttccatcccgccccttgacggacaacggcgtggtctcgcactccgggaggctctggtgggtcgacctctcctggggcctcatcacctgcgaccccttcgcggacgcgcctgtgctgagcttcgtcccactcccgccgcgcaaggcgctcaagtacggggtagattgtgcagtgctcgacaagtaccgccgcgtcgctgtcagccgcggcaagctgcggttcgtggacatgtacaagaaccgtagcagcttcggctctggcacagatcagcgtgtggacgctcgccgatccggactccaccgagtggacgctggagtatgaagcgaccttttcggagatctttaatgatgcgagcttcaaggcgactcgtctgacaaggcagctcccggtgctcgcgctcatccatcccagggaccccgacgtggtctacttcttcctggacaggcacctgttcagcgtcgacgtgcctgaccgcagggtcgtgcagtgcgagctttacgagctggttgaggagctatccagcaaaagcatcgccacccgtttcgttcacgcttggaggctgccaccggctctccgctcagctgcggatgccgttgcggagaagctaaacgcaggaggaaatcaagaaatcattgatgccgctgcagtctcaacttgccaaactgaagttgaagtcggtggcggcgacacgcctgagtccaagcggcgtaggctagagtgacctgagcttgttgagatctgttcttgtagtctctctgtttcaatatcttgtaggcatcaccttcccagaaaaaaaaaacttgtaggctttgctagagagctggtaaccccagcatg

SEQ ID NO: 62506 - protein, 280 aa, Triticum aestivum
  peptide (1)..(280): Ceres Seq. ID no. 12615224
  misc_feature (1)..(164): Homolog of NCBI NO: 34904596 NR Description: OSJNBa0004G10.9 [Oryza sativa (japonica
  misc_feature (25)..(279): Homolog of NCBI NO: 34904596 NR Description: OSJNBa0004G10.9 [Oryza sativa (japonica
  misc_feature (5)..(251): Homolog of NCBI NO: 34904566 NR Description: B1008C01.15 [Oryza sativa (japonica
  misc_feature (7)..(279): Homolog of NCBI NO: 34904594 NR Description: B1008C01.30 [Oryza sativa (japonica
  misc_feature (8)..(253): Homolog of NCBI NO: 34904586 NR Description: B1008C01.26 [Oryza sativa (japonica
  misc_feature (1)..(253): Homolog of NCBI NO: 34904568 NR Description: B1008C01.16 [Oryza sativa (japonica
  misc_feature (5)..(250): Homolog of NCBI NO: 34904496 NR Description: OSJNBa0010K01.9 [Oryza sativa (japonica
  misc_feature (4)..(262): Homolog of NCBI NO: 34904504 NR Description: OSJNBa0010K01.14 [Oryza sativa (japonica
  misc_feature (1)..(251): Homolog of NCBI NO: 34904588 NR Description: B1008C01.27 [Oryza sativa (japonica
  misc_feature (1)..(253): Homolog of NCBI NO: 34904558 NR Description: B1008C01.10 [Oryza sativa (japonica
MASASPSWVILGRVAKVSAADADLPPGADLSLALPPPPRVALLTIPPRIFPGQTTSDNFPSVLAVDRSGLLLLHASQGPAAGPAIVDLPGRQEVCWRPFVAGYFVLDSKSASAFPLPNPERIMNPGRLGLIASPEGAGRYMVAELQPVAGGEQADLLCFSSQSGQWDRKTVAYPLPSRPLTDNGVVSHSGRLWWVDLSWGLITCDPFADAPVLSFVPLPPRKALKYGVDCAVLDKYRRVAVSRGKLRFVDMYKNRSSFGSGTDQRVDARRSGLHRVDAGV

SEQ ID NO: 62507 - protein, 164 aa, Triticum aestivum
  peptide (1)..(164): Ceres Seq. ID no. 12615225
  misc_feature (50)..(160): Homolog of NCBI NO: 28574875 NR Description: CG13731-PA [Drosophila melanogaster]
VKKPNRRRQHHHVRVQGIQSRDGVRVAVVGHPGPRGQGVGRRRRSSSGRRPLPRAAAAAARRAPHHPPAHLPGPNHLRQLPLRPRRRPLRPPPPPRLPGPRRGPRHRRPPRPPGGLLAPIRRGLLRPRLQIRLGLPAPQPRAHHEPGPPRPHRLPRGRRPLHGR

SEQ ID NO: 62508 - protein, 158 aa, Triticum aestivum
  peptide (1)..(158): Ceres Seq. ID no. 12615226
  misc_feature (1)..(42): Homolog of NCBI NO: 34904596 NR Description: OSJNBa0004G10.9 [Oryza sativa (japonica
  misc_feature (1)..(157): Homolog of NCBI NO: 34904596 NR Description: OSJNBa0004G10.9 [Oryza sativa (japonica
  misc_feature (1)..(129): Homolog of NCBI NO: 34904566 NR Description: B1008C01.15 [Oryza sativa (japonica
  misc_feature (1)..(157): Homolog of NCBI NO: 34904594 NR Description: B1008C01.30 [Oryza sativa (japonica
  misc_feature (1)..(131): Homolog of NCBI NO: 34904586 NR Description: B1008C01.26 [Oryza sativa (japonica
  misc_feature (1)..(131): Homolog of NCBI NO: 34904568 NR Description: B1008C01.16 [Oryza sativa (japonica
  misc_feature (1)..(128): Homolog of NCBI NO: 34904496 NR Description: OSJNBa0010K01.9 [Oryza sativa (japonica
  misc_feature (1)..(140): Homolog of NCBI NO: 34904504 NR Description: OSJNBa0010K01.14 [Oryza sativa (japonica
  misc_feature (1)..(129): Homolog of NCBI NO: 34904588 NR Description: B1008C01.27 [Oryza sativa (japonica
  misc_feature (1)..(131): Homolog of NCBI NO: 34904558 NR Description: B1008C01.10 [Oryza sativa (japonica
MNPGRLGLIASPEGAGRYMVAELQPVAGGEQADLLCFSSQSGQWDRKTVAYPLPSRPLTDNGVVSHSGRLWWVDLSWGLITCDPFADAPVLSFVPLPPRKALKYGVDCAVLDKYRRVAVSRGKLRFVDMYKNRSSFGSGTDQRVDARRSGLHRVDAGV

SEQ ID NO: 62509 - DNA, 1258 bp, Triticum aestivum
  misc_feature (1)..(1258): Ceres Seq. ID no. 13598249
ctctctggacgagggagaatcttgtactagtcccactcccccctcccgtcgccgtcgccgccggcccaaaccaaaccctagccgcctgcccgccggcgggcgccaggccatggaccgcaagcgcatcaacgacgcgctcgacaggcacctgcgggcggccacggagcggtcgtcgccctccacctcccgcggcgccaagcccaagccgccccccgccgccgcccccaaacccaaagagcagctggattcggacagcagcgaggggggcagcgtcggcgggtcctcggaggcggacgacaccttctggatcaactggttctgcgccatgaggggcaacgagttcttcgccgaggtggatgatgactacatccaggacgacttcaatctctgcggcctcagcgcccaggtcccctactacgaccacgcccttgatctcatcctcgacctcgagcccgtccagggggatgtgtttgccgatgaccagaatgagctgatagtggcgtccgcggagatgctttacgggttgatccacgcccggtacatcttgaccaccaagggcttggctgccatgctggagaagttcaagaactgcgactttggaaggtgcccccgcgtgtcctgctctggtcagccctgtcttccaatgggccagtccgatatccctaggtccagtaccgtcaagatatattgtcccaaatgcgaagatctctactacccaagatccaagcaccaagccaatacagacggcgcatactttgggacgacgtttcctcatattttcatgatgacccactcacaattgaagccacagaagccagcgcagcaatacgttccccggatattcggcttcaaagtccacaagaaaacatgacggtatcgtggtggcgtactgccttgggcttgtttcgcctagtatgtcaccaggaacgatgaggacccgcactatagctgggcatggaaaaatgctttggccggttcaagacgacaaggcaccgaacaactatggcacattctttctctgtatgaagacctgctcttgggaaaagaaatctcgaggaggtctgatcaagctgtcagatccatgtcatgttgggtatttggatgatcccggtgagacggcaatgggtttgtgcctctgctctgttttgattttgaatgttcgtccaaacagggcatatgttgctggatctgttgtgtatcctaatgtatttcgctcttcattctgtggtgccgagaaatcggacggctgagactgctg

SEQ ID NO: 62510 - protein, 289 aa, Triticum aestivum
  peptide (1)..(289): Ceres Seq. ID no. 13598250
  misc_feature (98)..(276): Pfam Name: Casein kinase II regulatory subunit Pfam Description: Casein kinase II regulatory subunit
  misc_feature (38)..(287): Homolog of NCBI NO: 11527000 NR Description: protein kinase CK2 regulatory subunit CK2B1 [Zea
  misc_feature (58)..(287): Homolog of NCBI NO: 29367573 NR Description: possible protein kinase CK2 regulatory subunit
  misc_feature (46)..(287): Homolog of NCBI NO: 34901776 NR Description: OJ1058_B11.17 [Oryza sativa (japonica
  misc_feature (32)..(287): Homolog of NCBI NO: 15232283 NR Description: casein kinase II beta chain, putative
  misc_feature (37)..(287): Homolog of NCBI NO: 11527002 NR Description: protein kinase CK2 regulatory subunit CK2B2 [Zea
  misc_feature (32)..(288): Homolog of NCBI NO: 30689795 NR Description: casein kinase II beta chain, putative
  misc_feature (37)..(287): Homolog of NCBI NO: 21261784 NR Description: protein kinase Ck2 regulatory subunit 2
  misc_feature (31)..(287): Homolog of NCBI NO: 11527004 NR Description: protein kinase CK2 regulatory subunit CK2B3 [Zea
  misc_feature (32)..(288): Homolog of NCBI NO: 15224934 NR Description: casein kinase II beta chain, putative
  misc_feature (32)..(289): Homolog of NCBI NO: 37536920 NR Description: putative casein kinase II beta subunit
SLDEGESCTSPTPPSRRRRRRPKPNPSRLPAGGRQAMDRKRINDALDRHLRAATERSSPSTSRGAKPKPPPAAAPKPKEQLDSDSSEGGSVGGSSEADDTFWINWFCAMRGNEFFAEVDDDYIQDDFNLCGLSAQVPYYDHALDLILDLEPVQGDVFADDQNELIVASAEMLYGLIHARYILTTKGLAAMLEKFKNCDFGRCPRVSCSGQPCLPMGQSDIPRSSTVKIYCPKCEDLYYPRSKHQANTDGAYFGTTFPHIFMMTHSQLKPQKPAQQYVPRIFGFKVHKKT

SEQ ID NO: 62511 - protein, 253 aa, Triticum aestivum
  peptide (1)..(253): Ceres Seq. ID no. 13598251
  misc_feature (62)..(240): Pfam Name: Casein kinase II regulatory subunit Pfam Description: Casein kinase II regulatory subunit
  misc_feature (2)..(251): Homolog of NCBI NO: 11527000 NR Description: protein kinase CK2 regulatory subunit CK2B1 [Zea
  misc_feature (22)..(251): Homolog of NCBI NO: 29367573 NR Description: possible protein kinase CK2 regulatory subunit
  misc_feature (10)..(251): Homolog of NCBI NO: 34901776 NR Description: OJ1058_B11.17 [Oryza sativa (japonica
  misc_feature (1)..(251): Homolog of NCBI NO: 15232283 NR Description: casein kinase II beta chain, putative
  misc_feature (1)..(251): Homolog of NCBI NO: 11527002 NR Description: protein kinase CK2 regulatory subunit CK2B2 [Zea
  misc_feature (1)..(252): Homolog of NCBI NO: 30689795 NR Description: casein kinase II beta chain, putative
  misc_feature (1)..(251): Homolog of NCBI NO: 21261784 NR Description: protein kinase Ck2 regulatory subunit 2
  misc_feature (1)..(251): Homolog of NCBI NO: 11527004 NR Description: protein kinase CK2 regulatory subunit CK2B3 [Zea
  misc_feature (1)..(252): Homolog of NCBI NO: 15224934 NR Description: casein kinase II beta chain, putative
  misc_feature (1)..(253): Homolog of NCBI NO: 37536920 NR Description: putative casein kinase II beta subunit
MDRKRINDALDRHLRAATERSSPSTSRGAKPKPPPAAAPKPKEQLDSDSSEGGSVGGSSEADDTFWINWFCAMRGNEFFAEVDDDYIQDDFNLCGLSAQVPYYDHALDLILDLEPVQGDVFADDQNELIVASAEMLYGLIHARYILTTKGLAAMLEKFKNCDFGRCPRVSCSGQPCLPMGQSDIPRSSTVKIYCPKCEDLYYPRSKHQANTDGAYFGTTFPHIFMMTHSQLKPQKPAQQYVPRIFGFKVHKKT

SEQ ID NO: 62512 - protein, 181 aa, Triticum aestivum
  peptide (1)..(181): Ceres Seq. ID no. 13598252
  misc_feature (1)..(168): Pfam Name: Casein kinase II regulatory subunit Pfam Description: Casein kinase II regulatory subunit
  misc_feature (1)..(179): Homolog of NCBI NO: 11527000 NR Description: protein kinase CK2 regulatory subunit CK2B1 [Zea
  misc_feature (1)..(179): Homolog of NCBI NO: 29367573 NR Description: possible protein kinase CK2 regulatory subunit
  misc_feature (1)..(179): Homolog of NCBI NO: 34901776 NR Description: OJ1058_B11.17 [Oryza sativa (japonica
  misc_feature (1)..(179): Homolog of NCBI NO: 15232283 NR Description: casein kinase II beta chain, putative
  misc_feature (1)..(179): Homolog of NCBI NO: 11527002 NR Description: protein kinase CK2 regulatory subunit CK2B2 [Zea
  misc_feature (1)..(180): Homolog of NCBI NO: 30689795 NR Description: casein kinase II beta chain, putative
  misc_feature (1)..(179): Homolog of NCBI NO: 21261784 NR Description: protein kinase Ck2 regulatory subunit 2
  misc_feature (1)..(179): Homolog of NCBI NO: 11527004 NR Description: protein kinase CK2 regulatory subunit CK2B3 [Zea
  misc_feature (1)..(180): Homolog of NCBI NO: 15224934 NR Description: casein kinase II beta chain, putative
  misc_feature (1)..(181): Homolog of NCBI NO: 37536920 NR Description: putative casein kinase II beta subunit
MRGNEFFAEVDDDYIQDDFNLCGLSAQVPYYDHALDLILDLEPVQGDVFADDQNELIVASAEMLYGLIHARYILTTKGLAAMLEKFKNCDFGRCPRVSCSGQPCLPMGQSDIPRSSTVKIYCPKCEDLYYPRSKHQANTDGAYFGTTFPHIFMMTHSQLKPQKPAQQYVPRIFGFKVHKKT

SEQ ID NO: 62513 - DNA, 1424 bp, Triticum aestivum
  misc_feature (1)..(1424): Ceres Seq. ID no. 12615230
ctaaaccacccctgaaaaccctcagacgaacgaaagacctagcgctcctctcccttcgtctctcgcgactggcggcggcggtcgaacgaggccacccgacggcggcagagcgagtaggtgctttccaagcttcgccagaggtgtaaacccttcgctagaggcctcagtccctttcccgcgcggcttgagcaagatgagcaagatggcgatcagggttcccaagtccatgcgcgccaagcgtgagctcctcaagcacgcgcccaagctcgttgagaatggcaagaagatgcttattcttcatggtacaaagaccagcgcagttttgaactctgtgctggcagatcttttccacctgaagcgtgatcatgctgtcaagtacaccaagaagaacgacagcatcaggccatttgagagcgggggtgaaacttccctggagttcttctcccttaaatctgactgcagcctcttagtgtatggttctcattcaaagaagaggcccaacaatcttgttctgggaaggacttacgatcaccacatatatgacctcgttgaagtgggagttgagaactacaaatccatagaatcctatgcatatgataaaaagttggcacctaaacttgggacaaagcctttctttgctttcattggggagcactttgagagtgttgaaggactgaagcatttgaaggaaatgctgcttgatcatttcaaaggagaggtggtagagaatctgaaccttgctggtgtagatcggatattcgtgtgcacagcaatttctcctactaccgtctacatgatgcactgcgctctccgtctaaaaaggtcaggcacatctattcctagaatggagctggttgaagttgggccttcagtggacctggtacttaggcggcaccgacaagcagctgaaagtttacagaaagaagctatgaaggctcctggtcatgctaagaaggtgaaaaatgtcaccaataatccagttgaaggcaagcagggcaggatctacattccagaccaggaggtctcaaaattgaccgtaacaagcaacataaagggtctgaagcgggagcgccgtgacgccaagaaaaacaaggagcactcgaagaagcaaaaggtggccgaaaaccctgagtgaccactggagaaggctagtatctgtaaccggtcagtttaaggactttcggtcgataggttcagtggtaaatagtccagtaccatcttttaaggctatcaaacctgtgtacggacttaggcatcagtatcgaggcagcctctctatcagacataagcatgaaattttggagcaacatatgctacaagtattttttttactgttgttattcgcccctgatattagccaatcagagacgactgttgtgatgacatggttaagtttggttatcatggacattatgccttttctg

SEQ ID NO: 62514 - protein, 313 aa, Triticum aestivum; identical to SEQ ID NO: 56161
  peptide (1)..(313): Ceres Seq. ID no. 12615231
  misc_feature (9)..(307): Homolog of NCBI NO: 28461332 NR Description: Similar to RIKEN cDNA 2810470K21 gene [Xenopus
  misc_feature (9)..(311): Homolog of NCBI NO: 12850727 NR Description: unnamed protein product [Mus musculus]
  misc_feature (9)..(307): Homolog of NCBI NO: 27705690 NR Description: similar to RIKEN cDNA 2810470K21 gene
  misc_feature (9)..(311): Homolog of NCBI NO: 31982662 NR Description: RIKEN cDNA 2810470K21 [Mus musculus]
  misc_feature (9)..(311): Homolog of NCBI NO: 18203123 NR Description: Brix domain containing protein 1
  misc_feature (6)..(311): Homolog of NCBI NO: 7670547 NR Description: unnamed protein product [Mus musculus]
  misc_feature (9)..(307): Homolog of NCBI NO: 39930469 NR Description: brix domain containing 1 [Homo sapiens]
  misc_feature (4)..(309): Homolog of NCBI NO: 21554561 NR Description: unknown [Arabidopsis thaliana]
  misc_feature (4)..(309): Homolog of NCBI NO: 18403828 NR Description: expressed protein
  misc_feature (5)..(313): Homolog of NCBI NO: 34914658 NR Description: P0504D03.20 [Oryza sativa (japonica

SEQ ID NO: 62515 - protein, 310 aa, Triticum aestivum; identical to SEQ ID NO: 56162
  peptide (1)..(310): Ceres Seq. ID no. 12615232
  misc_feature (6)..(304): Homolog of NCBI NO: 28461332 NR Description: Similar to RIKEN cDNA 2810470K21 gene [Xenopus
  misc_feature (6)..(308): Homolog of NCBI NO: 12850727 NR Description: unnamed protein product [Mus musculus]
  misc_feature (6)..(304): Homolog of NCBI NO: 27705690 NR Description: similar to RIKEN cDNA 2810470K21 gene
  misc_feature (6)..(308): Homolog of NCBI NO: 31982662 NR Description: RIKEN cDNA 2810470K21 [Mus musculus]
  misc_feature (6)..(308): Homolog of NCBI NO: 18203123 NR Description: Brix domain containing protein 1
  misc_feature (3)..(308): Homolog of NCBI NO: 7670547 NR Description: unnamed protein product [Mus musculus]
  misc_feature (6)..(304): Homolog of NCBI NO: 39930469 NR Description: brix domain containing 1 [Homo sapiens]
  misc_feature (1)..(306): Homolog of NCBI NO: 21554561 NR Description: unknown [Arabidopsis thaliana]
  misc_feature (1)..(306): Homolog of NCBI NO: 18403828 NR Description: expressed protein
  misc_feature (2)..(310): Homolog of NCBI NO: 34914658 NR Description: P0504D03.20 [Oryza sativa (japonica

SEQ ID NO: 62516 - protein, 302 aa, Triticum aestivum; identical to SEQ ID NO: 56163
  peptide (1)..(302): Ceres Seq. ID no. 12615233
  misc_feature (1)..(296): Homolog of NCBI NO: 28461332 NR Description: Similar to RIKEN cDNA 2810470K21 gene [Xenopus
  misc_feature (1)..(300): Homolog of NCBI NO: 12850727 NR Description: unnamed protein product [Mus musculus]
  misc_feature (1)..(296): Homolog of NCBI NO: 27705690 NR Description: similar to RIKEN cDNA 2810470K21 gene
  misc_feature (1)..(300): Homolog of NCBI NO: 31982662 NR Description: RIKEN cDNA 2810470K21 [Mus musculus]
  misc_feature (1)..(300): Homolog of NCBI NO: 18203123 NR Description: Brix domain containing protein 1
  misc_feature (1)..(300): Homolog of NCBI NO: 7670547 NR Description: unnamed protein product [Mus musculus]
  misc_feature (1)..(296): Homolog of NCBI NO: 39930469 NR Description: brix domain containing 1 [Homo sapiens]
  misc_feature (1)..(298): Homolog of NCBI NO: 21554561 NR Description: unknown [Arabidopsis thaliana]
  misc_feature (1)..(298): Homolog of NCBI NO: 18403828 NR Description: expressed protein
  misc_feature (1)..(302): Homolog of NCBI NO: 34914658 NR Description: P0504D03.20 [Oryza sativa (japonica

SEQ ID NO: 62517 - DNA, 1051 bp, Triticum aestivum
  misc_feature (1)..(1051): Ceres Seq. ID no. 12615311
agtaaagcagtaagcaattccactcccgccgccacctccctctactccggcgctcccgcggctgctccggcctcttctgcatgttcaacacccacgaggaccaggccggctgcgacgaggtgatggtggaggtggaggtccgggcggcgcagaacgtgctggaggcgtgcgcgcagacggtgaccatggagcgggtggtcttcacctcctccgtcaccgccgtcgtctggaaggacgacgaccacaagcccgtcgacgccttcgacgagcggaactggagcgacctcaacctctgcaggaagcgcaagttgtggcatgcgctggccaagacgctgtcggagaagacggcctgggccttggccatggacagaggggtggacatggtggccatcaacgccggcctgctcaccgggccggggctctcctccgcccacccctgcctcaagggggtccccgagatgtacgagcacggcgtcctcgtcaccgtngacgccgacttcctcgccgacgcccacgtggccgcctacgagtgccccacggccttcggccgctacctntgcttcaacaacgtcgtgtgccggcccgaggacgccctccagttcgcccagatgctcaccccgtccgctccatgctacccgccgagtgatgagctgaaggtgatcccccaaaggattcagaacaagaagctgaacaacctgatggtggagtttgccagtgccatatacggggacttggattagagaatcactagttcattgatttacatctcaagggcagctagggttgtattctttatgtacctaaatatctgtattctttttcctcctgaaaagggaaatatggttggtcagatgtacaaatttgtacaaggccaagcatgccgcatgtattccaccacttttaccaggatggtaggagcatttgagccagtgcttagcaatgtagtagtaatccttaggtccaacaaaagggaaaataagtccacagttatgttactactgccttgtacagcagcattatatgaatatgatgaacaaatgttgaaagcttc

SEQ ID NO: 62518 - protein, 219 aa, Triticum aestivum
  peptide (1)..(219): Ceres Seq. ID no. 12615312
  misc_feature (1)..(167): Homolog of NCBI NO: 21553833 NR Description: cinnamoyl CoA reductase-like protein [Arabidopsis
  misc_feature (1)..(167): Homolog of NCBI NO: 15241467 NR Description: cinnamoyl CoA reductase - like protein
  misc_feature (1)..(210): Homolog of NCBI NO: 9964087 NR Description: cinnamoyl CoA reductase [Lolium perenne]
  misc_feature (1)..(178): Homolog of NCBI NO: 34911590 NR Description: putative cinnamoyl CoA reductase
  misc_feature (1)..(213): Homolog of NCBI NO: 21553548 NR Description: cinnamoyl-CoA reductase-like protein [Arabidopsis
  misc_feature (1)..(213): Homolog of NCBI NO: 15234751 NR Description: cinnamoyl-CoA reductase - like protein
  misc_feature (1)..(207): Homolog of NCBI NO: 21553382 NR Description: putative cinnamoyl CoA reductase [Arabidopsis
  misc_feature (1)..(207): Homolog of NCBI NO: 18400407 NR Description: putative cinnamoyl CoA reductase
  misc_feature (1)..(207): Homolog of NCBI NO: 25412171 NR Description: probable cinnamoyl CoA reductase [imported] -
  misc_feature (1)..(219): Homolog of NCBI NO: 37537132 NR Description: putative cinnamoyl-CoA reductase
  misc_feature (136)..(136): Xaa is any aa, unknown or other
  misc_feature (159)..(159): Xaa is any aa, unknown or other
MFNTHEDQAGCDEVMVEVEVRAAQNVLEACAQTVTMERVVFTSSVTAVVWKDDDHKPVDAFDERNWSDLNLCRKRKLWHALAKTLSEKTAWALAMDRGVDMVAINAGLLTGPGLSSAHPCLKGVPEMYEHGVLVTXDADFLADAHVAAYECPTAFGRYXCFNNVVCRPEDALQFAQMLTPSAPCYPPSDELKVIPQRIQNKKLNNLMVEFASAIYGDLD

SEQ ID NO: 62519 - protein, 205 aa, Triticum aestivum
  peptide (1)..(205): Ceres Seq. ID no. 12615313
  misc_feature (1)..(153): Homolog of NCBI NO: 21553833 NR Description: cinnamoyl CoA reductase-like protein [Arabidopsis
  misc_feature (1)..(153): Homolog of NCBI NO: 15241467 NR Description: cinnamoyl CoA reductase - like protein
  misc_feature (1)..(196): Homolog of NCBI NO: 9964087 NR Description: cinnamoyl CoA reductase [Lolium perenne]
  misc_feature (1)..(164): Homolog of NCBI NO: 34911590 NR Description: putative cinnamoyl CoA reductase
  misc_feature (1)..(199): Homolog of NCBI NO: 21553548 NR Description: cinnamoyl-CoA reductase-like protein [Arabidopsis
  misc_feature (1)..(199): Homolog of NCBI NO: 15234751 NR Description: cinnamoyl-CoA reductase - like protein
  misc_feature (1)..(193): Homolog of NCBI NO: 21553382 NR Description: putative cinnamoyl CoA reductase [Arabidopsis
  misc_feature (1)..(193): Homolog of NCBI NO: 18400407 NR Description: putative cinnamoyl CoA reductase
  misc_feature (1)..(193): Homolog of NCBI NO: 25412171 NR Description: probable cinnamoyl CoA reductase [imported] -
  misc_feature (1)..(205): Homolog of NCBI NO: 37537132 NR Description: putative cinnamoyl-CoA reductase
  misc_feature (122)..(122): Xaa is any aa, unknown or other
  misc_feature (145)..(145): Xaa is any aa, unknown or other
MVEVEVRAAQNVLEACAQTVTMERVVFTSSVTAVVWKDDDHKPVDAFDERNWSDLNLCRKRKLWHALAKTLSEKTAWALAMDRGVDMVAINAGLLTGPGLSSAHPCLKGVPEMYEHGVLVTXDADFLADAHVAAYECPTAFGRYXCFNNVVCRPEDALQFAQMLTPSAPCYPPSDELKVIPQRIQNKKLNNLMVEFASAIYGDLD

SEQ ID NO: 62520 - protein, 184 aa, Triticum aestivum
  peptide (1)..(184): Ceres Seq. ID no. 12615314
  misc_feature (1)..(132): Homolog of NCBI NO: 21553833 NR Description: cinnamoyl CoA reductase-like protein [Arabidopsis
  misc_feature (1)..(132): Homolog of NCBI NO: 15241467 NR Description: cinnamoyl CoA reductase - like protein
  misc_feature (1)..(175): Homolog of NCBI NO: 9964087 NR Description: cinnamoyl CoA reductase [Lolium perenne]
  misc_feature (1)..(143): Homolog of NCBI NO: 34911590 NR Description: putative cinnamoyl CoA reductase
  misc_feature (1)..(178): Homolog of NCBI NO: 21553548 NR Description: cinnamoyl-CoA reductase-like protein [Arabidopsis
  misc_feature (1)..(178): Homolog of NCBI NO: 15234751 NR Description: cinnamoyl-CoA reductase - like protein
  misc_feature (1)..(172): Homolog of NCBI NO: 21553382 NR Description: putative cinnamoyl CoA reductase [Arabidopsis
  misc_feature (1)..(172): Homolog of NCBI NO: 18400407 NR Description: putative cinnamoyl CoA reductase
  misc_feature (1)..(172): Homolog of NCBI NO: 25412171 NR Description: probable cinnamoyl CoA reductase [imported] -
  misc_feature (1)..(184): Homolog of NCBI NO: 37537132 NR Description: putative cinnamoyl-CoA reductase
  misc_feature (101)..(101): Xaa is any aa, unknown or other
  misc_feature (124)..(124): Xaa is any aa, unknown or other
MERVVFTSSVTAVVWKDDDHKPVDAFDERNWSDLNLCRKRKLWHALAKTLSEKTAWALAMDRGVDMVAINAGLLTGPGLSSAHPCLKGVPEMYEHGVLVTXDADFLADAHVAAYECPTAFGRYXCFNNVVCRPEDALQFAQMLTPSAPCYPPSDELKVIPQRIQNKKLNNLMVEFASAIYGDLD

SEQ ID NO: 62521 - DNA, 1328 bp, Triticum aestivum
  misc_feature (1)..(1328): Ceres Seq. ID no. 13596902
cctaatcgaaaagtcgccgctaaccactgcttcctctgctccgcacccaaatctcagatcgagccccgcaagtcaaccgccgatggccgcctccaccggcagccgccgcttcaagatcttcgcggccgccgacggcttcggggagccgctcaaggacgccgtcgtcgcgcacctccgcgcccactcctccgtcgccgacgtcgtcgacctcggcgtcgacaagtactactccgcggccgccgccgtcgcccgcagcgtctcctcctcggtccccgaccccgcgctcgagccccgcggcgtcgtcgtctgcggcaccggcgccggcgtcaccatcttcgccaacaagtaccccggcgtgtacgccacccactgcagctccgccgccgacgccgtcaacacccgctccatcaacgcctgcaacgtcctcgccctctccggcatggccaccccgccggaggccgccgcggtcatcgccgacgcctggctcgccacccccttccgcgccccctgccccgcgtccggcgacgccccttggccggaggacattcagaagttctttgacgttgcccccggcgagatggcctccatccccgagggattggcggcccctcctgcgccggactccgcctgcgccatctgctgcctgaggaaggggatggagttcgagccggtggacatcatgcccggcggcgagatgcggattgtgcgggagagccccacttcggcctacgtgcggttcaaagctggaagcgtggagccggcccaccaccacaccttcggccacgacctggtggtgatcaagggcaagaagaaggtgtggaacttgaccaagaaggagagctatggcctcgtcgacggggacttcctgttcacgcctgctggggacgtgcaccgtgtcaagtacttggaggacacggagttcttcatccgctgggatgggcactgggacatattcctcgatgaagacctcgagaccgcacgcaatgccatcgatgcagagctcggtgtgatcgacagtgacaagtgaggagggcatggtgatgcgcctggatgagttatcttgaggagacatgtgaaggtgctatctcgttgttccaccttttctccatgttcacttctacaatgtttgttgcttgtgctgtgcctatactggtgctggtgacatgttttcaaatatgtatgttgctggacgatttgccatgcttgtcgaataaagtggtgataatggtagtaatgctaccttgttatggttgcacaaaaaaaaaaaaaaaaaagcttatcgataccgtcgactgtttaaacacaataaagttggaacgggagggggg

SEQ ID NO: 62522 - protein, 341 aa, Triticum aestivum
  peptide (1)..(341): Ceres Seq. ID no. 13596903
  misc_feature (99)..(176): Pfam Name: Ribose/Galactose Isomerase Pfam Description: Ribose/Galactose Isomerase
  misc_feature (111)..(333): Homolog of NCBI NO: 1169199 NR Description: DNA-damage-repair/toleration protein DRT102
  misc_feature (29)..(333): Homolog of NCBI NO: 18397039 NR Description: DNA-damage-repair/toleration protein DRT102
  misc_feature (28)..(335): Homolog of NCBI NO: 34913680 NR Description: putative DNA-damage-repair/toleration protein
LIEKSPLTTASSAPHPNLRSSPASQPPMAASTGSRRFKIFAAADGFGEPLKDAVVAHLRAHSSVADVVDLGVDKYYSAAAAVARSVSSSVPDPALEPRGVVVCGTGAGVTIFANKYPGVYATHCSSAADAVNTRSINACNVLALSGMATPPEAAAVIADAWLATPFRAPCPASGDAPWPEDIQKFFDVAPGEMASIPEGLAAPPAPDSACAICCLRKGMEFEPVDIMPGGEMRIVRESPTSAYVRFKAGSVEPAHHHTFGHDLVVIKGKKKVWNLTKKESYGLVDGDFLFTPAGDVHRVKYLEDTEFFIRWDGHWDIFLDEDLETARNAIDAELGVIDSDK

SEQ ID NO: 62523 - protein, 314 aa, Triticum aestivum
  peptide (1)..(314): Ceres Seq. ID no. 13596904
  misc_feature (72)..(149): Pfam Name: Ribose/Galactose Isomerase Pfam Description: Ribose/Galactose Isomerase
  misc_feature (84)..(306): Homolog of NCBI NO: 1169199 NR Description: DNA-damage-repair/toleration protein DRT102
  misc_feature (2)..(306): Homolog of NCBI NO: 18397039 NR Description: DNA-damage-repair/toleration protein DRT102
  misc_feature (1)..(308): Homolog of NCBI NO: 34913680 NR Description: putative DNA-damage-repair/toleration protein
MAASTGSRRFKIFAAADGFGEPLKDAVVAHLRAHSSVADVVDLGVDKYYSAAAAVARSVSSSVPDPALEPRGVVVCGTGAGVTIFANKYPGVYATHCSSAADAVNTRSINACNVLALSGMATPPEAAAVIADAWLATPFRAPCPASGDAPWPEDIQKFFDVAPGEMASIPEGLAAPPAPDSACAICCLRKGMEFEPVDIMPGGEMRIVRESPTSAYVRFKAGSVEPAHHHTFGHDLVVIKGKKKVWNLTKKESYGLVDGDFLFTPAGDVHRVKYLEDTEFFIRWDGHWDIFLDEDLETARNAIDAELGVIDSDK

SEQ ID NO: 62524 - protein, 195 aa, Triticum aestivum
  peptide (1)..(195): Ceres Seq. ID no. 13596905
  misc_feature (1)..(187): Homolog of NCBI NO: 1169199 NR Description: DNA-damage-repair/toleration protein DRT102
  misc_feature (1)..(187): Homolog of NCBI NO: 18397039 NR Description: DNA-damage-repair/toleration protein DRT102
  misc_feature (1)..(189): Homolog of NCBI NO: 34913680 NR Description: putative DNA-damage-repair/toleration protein
MATPPEAAAVIADAWLATPFRAPCPASGDAPWPEDIQKFFDVAPGEMASIPEGLAAPPAPDSACAICCLRKGMEFEPVDIMPGGEMRIVRESPTSAYVRFKAGSVEPAHHHTFGHDLVVIKGKKKVWNLTKKESYGLVDGDFLFTPAGDVHRVKYLEDTEFFIRWDGHWDIFLDEDLETARNAIDAELGVIDSDK

SEQ ID NO: 62525 - DNA, 1742 bp, Triticum aestivum
  misc_feature (1)..(1742): Ceres Seq. ID no. 14303604
accgagccctccgccccgccccgcgcccgacccgaaaccccagccgatcggcggcggccggccggcggagatgtcgctgacggaggtcaggatcggcgaggaggtgtggctcacctgcctctcccacgccctcaccaccgagaccgaggaggtcatgggcctcctcctcggcgacgtcgtgtcctccagcaagggcggctccacggcggtgatatggggcgcgtcgccgcagatgaggtgcgagcggaagaaggaccgcgtcgaggtcaaccccgagctgctcgccgccgcgtcggcgcaggccgaggtaatgacggccaccatcgggaagacgacccgggtgatcggctggtaccactcgcacccgcatatcaccgtcctgccttcccatgtagatgtgcgtacccaggctatgtttcagttgctagatccaggctttgttgggctgatattttcctgttttagtgaagatgctcaaaaggttgggaaaatccaagtgattgccttccagtcacttgatgggacacagaacacacagcgtgctattgttcctgttattaccaatcctgtcattaaccttgaaccatcttggagttcatccgatagctcattagcattgattgagggcattgaacaggacactggagattctagagcttcaaacggaagcaaggtctggggaagatctcaggatatggatctatatccttctttggacacaaatcattcggcaagacatctaccaatagaaaacgctattgttcctttcgaaccggaaaacagtgctgggccctctattgatcaagatggttcagatctgtccccaagcatacaggaggctttgcaccggtcaaccatggacataagtggtgcagagtataaaaggaaggaggtgccacttaaagtattccctacaaggcatctgctaaagctggacactacgttgagttcgtactgtgatatgcagcgtgtcctttttgaagaggaacaatcagcatataaccaagccatgcttcagaatatttgtgatgggaagatgcacccacttacatctatgcaccatacctccacatataatgcttctctatgcaaactgatggaatactgcttgagccctgctataactgtgcttcaggaccgtgtgaaagaaaacgaacttcggttagctatgctagtggaggaggctaaacaactggaggccgagcagagcacgaaaactggctctcctcgccgtgcgatgcccggagggactaccagtggcatcacttcgccaaggggccaggacaagtacccttccggcagacaagggggccctataagccctagcagcagcggccggaggaaggctccttgactcggaccttgctcgccattatgtcatgatggatagtccgattctgggccctgcctgatgctttctggaaccccaaacctgtcccttggcgcgaggggtgaagtcgcaatgcaaatgtacatacccatctcctttcagtgcctggcccgccgtccttctgtggaagtaaccaaccaacagtggttcccttttgctttgtgttgtccttgcgccaaatccttttgcctggttgcgctgagcttgtaatgtgtactcactgacgcgacgagtctcggggcagtggttgcgctgagcttgtaatgtgtactcactggcgcgacgagtctcgggcaggctttctagttggaagaaactcttgtaccaatcctgttgtcgaaatgttcagggg

SEQ ID NO: 62526 - protein, 450 aa, Triticum aestivum
  peptide (1)..(450): Ceres Seq. ID no. 14303605
  misc_feature (24)..(145): Pfam Name: Mov34/MPN/PAD-1 family Pfam Description: Mov34/MPN/PAD-1 family
  misc_feature (370)..(419): Homolog of NCBI NO: 15220090 NR Description: hypothetical protein [Arabidopsis thaliana]
  misc_feature (31)..(340): Homolog of NCBI NO: 15220090 NR Description: hypothetical protein [Arabidopsis thaliana]
  misc_feature (31)..(66): Homolog of NCBI NO: 25406643 NR Description: hypothetical protein F18B13.28 [imported] -
  misc_feature (370)..(419): Homolog of NCBI NO: 25406643 NR Description: hypothetical protein F18B13.28 [imported] -
  misc_feature (133)..(340): Homolog of NCBI NO: 25406643 NR Description: hypothetical protein F18B13.28 [imported] -
  misc_feature (370)..(426): Homolog of NCBI NO: 7549631 NR Description: unknown protein [Arabidopsis thaliana]
  misc_feature (31)..(341): Homolog of NCBI NO: 7549631 NR Description: unknown protein [Arabidopsis thaliana]
  misc_feature (31)..(426): Homolog of NCBI NO: 30680023 NR Description: expressed protein [Arabidopsis thaliana]
  misc_feature (24)..(426): Homolog of NCBI NO: 19715647 NR Description: AT3g06820/F3E22_4 [Arabidopsis thaliana]
  misc_feature (24)..(419): Homolog of NCBI NO: 20147355 NR Description: At1g80210/F18B13_28 [Arabidopsis thaliana]
PSPPPRPAPDPKPQPIGGGRPAEMSLTEVRIGEEVWLTCLSHALTTETEEVMGLLLGDVVSSSKGGSTAVIWGASPQMRCERKKDRVEVNPELLAAASAQAEVMTATIGKTTRVIGWYHSHPHITVLPSHVDVRTQAMFQLLDPGFVGLIFSCFSEDAQKVGKIQVIAFQSLDGTQNTQRAIVPVITNPVINLEPSWSSSDSSLALIEGIEQDTGDSRASNGSKVWGRSQDMDLYPSLDTNHSARHLPIENAIVPFEPENSAGPSIDQDGSDLSPSIQEALHRSTMDISGAEYKRKEVPLKVFPTRHLLKLDTTLSSYCDMQRVLFEEEQSAYNQAMLQNICDGKMHPLTSMHHTSTYNASLCKLMEYCLSPAITVLQDRVKENELRLAMLVEEAKQLEAEQSTKTGSPRRAMPGGTTSGITSPRGQDKYPSGRQGGPISPSSSGRRKAP

SEQ ID NO: 62527 - protein, 427 aa, Triticum aestivum
  peptide (1)..(427): Ceres Seq. ID no. 14303606
  misc_feature (1)..(122): Pfam Name: Mov34/MPN/PAD-1 family Pfam Description: Mov34/MPN/PAD-1 family
  misc_feature (347)..(396): Homolog of NCBI NO: 15220090 NR Description: hypothetical protein [Arabidopsis thaliana]
  misc_feature (8)..(317): Homolog of NCBI NO: 15220090 NR Description: hypothetical protein [Arabidopsis thaliana]
  misc_feature (8)..(43): Homolog of NCBI NO: 25406643 NR Description: hypothetical protein F18B13.28 [imported] -
  misc_feature (347)..(396): Homolog of NCBI NO: 25406643 NR Description: hypothetical protein F18B13.28 [imported] -
  misc_feature (110)..(317): Homolog of NCBI NO: 25406643 NR Description: hypothetical protein F18B13.28 [imported] -
  misc_feature (347)..(403): Homolog of NCBI NO: 7549631 NR Description: unknown protein [Arabidopsis thaliana]
  misc_feature (8)..(318): Homolog of NCBI NO: 7549631 NR Description: unknown protein [Arabidopsis thaliana]
  misc_feature (8)..(403): Homolog of NCBI NO: 30680023 NR Description: expressed protein [Arabidopsis thaliana]
  misc_feature (1)..(403): Homolog of NCBI NO: 19715647 NR Description: AT3g06820/F3E22_4 [Arabidopsis thaliana]
  misc_feature (1)..(396): Homolog of NCBI NO: 20147355 NR Description: At1g80210/F18B13_28 [Arabidopsis thaliana]
MSLTEVRIGEEVWLTCLSHALTTETEEVMGLLLGDVVSSSKGGSTAVIWGASPQMRCERKKDRVEVNPELLAAASAQAEVMTATIGKTTRVIGWYHSHPHITVLPSHVDVRTQAMFQLLDPGFVGLIFSCFSEDAQKVGKIQVIAFQSLDGTQNTQRAIVPVITNPVINLEPSWSSSDSSLALIEGIEQDTGDSRASNGSKVWGRSQDMDLYPSLDTNHSARHLPIENAIVPFEPENSAGPSIDQDGSDLSPSIQEALHRSTMDISGAEYKRKEVPLKVFPTRHLLKLDTTLSSYCDMQRVLFEEEQSAYNQAMLQNICDGKMHPLTSMHHTSTYNASLCKLMEYCLSPAITVLQDRVKENELRLAMLVEEAKQLEAEQSTKTGSPRRAMPGGTTSGITSPRGQDKYPSGRQGGPISPSSSGRRKAP

SEQ ID NO: 62528 - protein, 399 aa, Triticum aestivum
  peptide (1)..(399): Ceres Seq. ID no. 14303607
  misc_feature (1)..(94): Pfam Name: Mov34/MPN/PAD-1 family Pfam Description: Mov34/MPN/PAD-1 family
  misc_feature (319)..(368): Homolog of NCBI NO: 15220090 NR Description: hypothetical protein [Arabidopsis thaliana]
  misc_feature (1)..(289): Homolog of NCBI NO: 15220090 NR Description: hypothetical protein [Arabidopsis thaliana]
  misc_feature (1)..(15): Homolog of NCBI NO: 25406643 NR Description: hypothetical protein F18B13.28 [imported] -
  misc_feature (319)..(368): Homolog of NCBI NO: 25406643 NR Description: hypothetical protein F18B13.28 [imported] -
  misc_feature (82)..(289): Homolog of NCBI NO: 25406643 NR Description: hypothetical protein F18B13.28 [imported] -
  misc_feature (319)..(375): Homolog of NCBI NO: 7549631 NR Description: unknown protein [Arabidopsis thaliana]
  misc_feature (1)..(290): Homolog of NCBI NO: 7549631 NR Description: unknown protein [Arabidopsis thaliana]
  misc_feature (1)..(375): Homolog of NCBI NO: 30680023 NR Description: expressed protein [Arabidopsis thaliana]
  misc_feature (1)..(375): Homolog of NCBI NO: 19715647 NR Description: AT3g06820/F3E22_4 [Arabidopsis thaliana]
  misc_feature (1)..(368): Homolog of NCBI NO: 20147355 NR Description: At1g80210/F18B13_28 [Arabidopsis thaliana]
MGLLLGDVVSSSKGGSTAVIWGASPQMRCERKKDRVEVNPELLAAASAQAEVMTATIGKTTRVIGWYHSHPHITVLPSHVDVRTQAMFQLLDPGFVGLIFSCFSEDAQKVGKIQVIAFQSLDGTQNTQRAIVPVITNPVINLEPSWSSSDSSLALIEGIEQDTGDSRASNGSKVWGRSQDMDLYPSLDTNHSARHLPIENAIVPFEPENSAGPSIDQDGSDLSPSIQEALHRSTMDISGAEYKRKEVPLKVFPTRHLLKLDTTLSSYCDMQRVLFEEEQSAYNQAMLQNICDGKMHPLTSMHHTSTYNASLCKLMEYCLSPAITVLQDRVKENELRLAMLVEEAKQLEAEQSTKTGSPRRAMPGGTTSGITSPRGQDKYPSGRQGGPISPSSSGRRKAP

SEQ ID NO: 62529 - DNA, 1485 bp, Triticum aestivum
  misc_feature (1)..(1485): Ceres Seq. ID no. 12615948
attcgccccccaaaccaaaaccaaatccctcgccaaaatccccaatccccggccatggcgacgagcccgcctccgccgctccgctcccgccggacgctggagctgccagacgacgtcatggaggagatcttcctccgcctaccggcggacaaccccgccagcctcgcccgcgtcgccggcggctgcaagagctggctggccatggtctcggaccccaacttcgcccccgcctaccgcaggctccgcgacgcgccgcccatgctgggcttcctctacaactaccgctacaccgacgagggagcgccctactggacgtcccacttccgcgccgccgcggccctccccccgcgggtgcgccgcgaccgcaagcactggcgcgctctcgactcccgccacggcctcgtcctcttcgacacccctgagagtgacggccacctcgtcgtctccgacctcgtcaccggcgagcactggaaaatcgacggccacatcacgttcccggatgcgtgtaatgctacagtgctctgcgccagggacggatgtgaccaccgtgattgccatggcggccctttcctcgtggcctgcgtggactccgtcgtggcaggggaccggaggataacctgcgccatgttctactcatcagttactggcaagtggatcgacccgatcttcgtcgagcaacccaatgtcatcgatgccagggggcacagtgctgtgctgggaaataaggtctatgtcccctgtgtgaaggatggcagtgtcgtggagtacaacacgcgtgagaacaagctatctgtgatcaaggcgccatttgaggtccaggaccagaagattgagctcatgggggtggaggacggaatgctgctgtttgcgtctgtggtgaagcctagactctacctatggtcaatggaggctggtcccagaggagctgcgggacgggcacaaagcaggttcatcgagctcgggccgttgctccctcgtcctgtcctcgtggacaacaccgaagtgtcggcggttggttttgcggaaggtgttggtgtcatcttcatcaagacaaaagttgggttgtacacaattcatctcaaatcaaaacaaagcaaccaggtgcaccgagggtacatcaataaggtcatgccctacatgagcttctacactggagcatgggagcctttgccagcatctgatgaaacttaacgcgcagttgttgatgctacaatgatataaccaaatggcgccaggacttgggtttactttttctgcccaggaagaatttgaagtgaacttgagcctcattcactgccggttgtgttgaacagtttggttagagtggatgcgcttttgtcctatttgtgcttgtgccataaacttgagtttgtttgttcgtccgagttgggtgcggctcaaactgtccgtcaggagaaattttagcgatcagttgacggttttgtggcaaaaaaaaaaaaaaaaaaaaaaagaaaaaaaaaaaaa

SEQ ID NO: 62530 - protein, 396 aa, Triticum aestivum
  peptide (1)..(396): Ceres Seq. ID no. 12615949
  misc_feature (34)..(290): Homolog of NCBI NO: 34915428 NR Description: hypothetical protein~similar to Oryza sativa
  misc_feature (34)..(142): Homolog of NCBI NO: 34394502 NR Description: hypothetical protein [Oryza sativa (japonica
  misc_feature (157)..(383): Homolog of NCBI NO: 34394502 NR Description: hypothetical protein [Oryza sativa (japonica
  misc_feature (34)..(383): Homolog of NCBI NO: 34394503 NR Description: unknown protein [Oryza sativa (japonica
  misc_feature (29)..(383): Homolog of NCBI NO: 34914028 NR Description: OJ1014_G12.29 [Oryza sativa (japonica
  misc_feature (34)..(394): Homolog of NCBI NO: 33146558 NR Description: unknown protein [Oryza sativa (japonica
  misc_feature (34)..(394): Homolog of NCBI NO: 34915424 NR Description: hypothetical protein~similar to Oryza sativa
  misc_feature (34)..(384): Homolog of NCBI NO: 34915420 NR Description: contains EST C98814(E3124)~similar to Oryza
  misc_feature (22)..(384): Homolog of NCBI NO: 35215058 NR Description: hypothetical protein [Oryza sativa (japonica
  misc_feature (35)..(384): Homolog of NCBI NO: 34395380 NR Description: unknown protein [Oryza sativa (japonica
IRPPNQNQIPRQNPQSPAMATSPPPPLRSRRTLELPDDVMEEIFLRLPADNPASLARVAGGCKSWLAMVSDPNFAPAYRRLRDAPPMLGFLYNYRYTDEGAPYWTSHFRAAAALPPRVRRDRKHWRALDSRHGLVLFDTPESDGHLVVSDLVTGEHWKIDGHITFPDACNATVLCARDGCDHRDCHGGPFLVACVDSVVAGDRRITCAMFYSSVTGKWIDPIFVEQPNVIDARGHSAVLGNKVYVPCVKDGSVVEYNTRENKLSVIKAPFEVQDQKIELMGVEDGMLLFASVVKPRLYLWSMEAGPRGAAGRAQSRFIELGPLLPRPVLVDNTEVSAVGFAEGVGVIFIKTKVGLYTIHLKSKQSNQVHRGYINKVMPYMSFYTGAWEPLPASDET

SEQ ID NO: 62531 - protein, 378 aa, Triticum aestivum
  peptide (1)..(378): Ceres Seq. ID no. 12615950
  misc_feature (16)..(272): Homolog of NCBI NO: 34915428 NR Description: hypothetical protein~similar to Oryza sativa
  misc_feature (16)..(124): Homolog of NCBI NO: 34394502 NR Description: hypothetical protein [Oryza sativa (japonica
  misc_feature (139)..(365): Homolog of NCBI NO: 34394502 NR Description: hypothetical protein [Oryza sativa (japonica
  misc_feature (16)..(365): Homolog of NCBI NO: 34394503 NR Description: unknown protein [Oryza sativa (japonica
  misc_feature (11)..(365): Homolog of NCBI NO: 34914028 NR Description: OJ1014_G12.29 [Oryza sativa (japonica
  misc_feature (16)..(376): Homolog of NCBI NO: 33146558 NR Description: unknown protein [Oryza sativa (japonica
  misc_feature (16)..(376): Homolog of NCBI NO: 34915424 NR Description: hypothetical protein~similar to Oryza sativa
  misc_feature (16)..(366): Homolog of NCBI NO: 34915420 NR Description: contains EST C98814(E3124)~similar to Oryza
  misc_feature (4)..(366): Homolog of NCBI NO: 35215058 NR Description: hypothetical protein [Oryza sativa (japonica
  misc_feature (17)..(366): Homolog of NCBI NO: 34395380 NR Description: unknown protein [Oryza sativa (japonica
MATSPPPPLRSRRTLELPDDVMEEIFLRLPADNPASLARVAGGCKSWLAMVSDPNFAPAYRRLRDAPPMLGFLYNYRYTDEGAPYWTSHFRAAAALPPRVRRDRKHWRALDSRHGLVLFDTPESDGHLVVSDLVTGEHWKIDGHITFPDACNATVLCARDGCDHRDCHGGPFLVACVDSVVAGDRRITCAMFYSSVTGKWIDPIFVEQPNVIDARGHSAVLGNKVYVPCVKDGSVVEYNTRENKLSVIKAPFEVQDQKIELMGVEDGMLLFASVVKPRLYLWSMEAGPRGAAGRAQSRFIELGPLLPRPVLVDNTEVSAVGFAEGVGVIFIKTKVGLYTIHLKSKQSNQVHRGYINKVMPYMSFYTGAWEPLPASDET

SEQ ID NO: 62532 - protein, 357 aa, Triticum aestivum
  peptide (1)..(357): Ceres Seq. ID no. 12615951
  misc_feature (1)..(251): Homolog of NCBI NO: 34915428 NR Description: hypothetical protein~similar to Oryza sativa
  misc_feature (1)..(103): Homolog of NCBI NO: 34394502 NR Description: hypothetical protein [Oryza sativa (japonica
  misc_feature (118)..(344): Homolog of NCBI NO: 34394502 NR Description: hypothetical protein [Oryza sativa (japonica
  misc_feature (1)..(344): Homolog of NCBI NO: 34394503 NR Description: unknown protein [Oryza sativa (japonica
  misc_feature (1)..(344): Homolog of NCBI NO: 34914028 NR Description: OJ1014_G12.29 [Oryza sativa (japonica
  misc_feature (1)..(355): Homolog of NCBI NO: 33146558 NR Description: unknown protein [Oryza sativa (japonica
  misc_feature (1)..(355): Homolog of NCBI NO: 34915424 NR Description: hypothetical protein~similar to Oryza sativa
  misc_feature (1)..(345): Homolog of NCBI NO: 34915420 NR Description: contains EST C98814(E3124)~similar to Oryza
  misc_feature (1)..(345): Homolog of NCBI NO: 35215058 NR Description: hypothetical protein [Oryza sativa (japonica
  misc_feature (1)..(345): Homolog of NCBI NO: 34395380 NR Description: unknown protein [Oryza sativa (japonica
MEEIFLRLPADNPASLARVAGGCKSWLAMVSDPNFAPAYRRLRDAPPMLGFLYNYRYTDEGAPYWTSHFRAAAALPPRVRRDRKHWRALDSRHGLVLFDTPESDGHLVVSDLVTGEHWKIDGHITFPDACNATVLCARDGCDHRDCHGGPFLVACVDSVVAGDRRITCAMFYSSVTGKWIDPIFVEQPNVIDARGHSAVLGNKVYVPCVKDGSVVEYNTRENKLSVIKAPFEVQDQKIELMGVEDGMLLFASVVKPRLYLWSMEAGPRGAAGRAQSRFIELGPLLPRPVLVDNTEVSAVGFAEGVGVIFIKTKVGLYTIHLKSKQSNQVHRGYINKVMPYMSFYTGAWEPLPASDET

SEQ ID NO: 62533 - DNA, 759 bp, Triticum aestivum
  misc_feature (1)..(759): Ceres Seq. ID no. 13654942
ccatcaagctagcagcacggcattaaactaatttgacagcgatcccgatccgtcatcacatctcacacgagacagtcgttcgatccgtccgtggagcagccatggcgcagctgatggacaaggccaaggggttcgtggccgagaagatatcgggggtgcagaagccggaggcggacctgtcggacatgtcggtgcagcacgttggccgcgacggcgccaccctgtccggccgcctcgacgtgcgcaacccctactcgcacaccatccccatctgcgagatcagctactccctcaagagcgccggccgcgacgtggcctccgggaccatgccggacccggggtcgctggtggccagcgacaccaccagcctcgacataccggtgaaggtgccgtacgacttcctgatgagcctggtgaaggacgccggcaaggactgggacctcgactacgagatgcgcgtcggcctcaccgtcgacctccccatcgtcggcaacttcacgctgccgctcaccaaggccggcgagctcaagctccccacgctctccgacctgttctaaacttaccgccgcacccagctaagtaggttcgaccgtgccgtactagctgctgcgctctccatcgcctgtacgggtgatgggtagtactgggctgggcgagcgggacgatcgatcgctgcctagctctgtttttacttcggatcgcggtgtgggtgtgcacgacgtaataatgatgtattgcgtgttgtatttctagactttt

SEQ ID NO: 62534 - protein, 151 aa, Triticum aestivum; identical to SEQ ID NO: 51914
  peptide (1)..(151): Ceres Seq. ID no. 13654943
  misc_feature (2)..(151): Pfam Name: Late embryogenesis abundant protein Pfam Description: Late embryogenesis abundant protein
  misc_feature (5)..(151): Homolog of NCBI NO: 7595792 NR Description: late-embryogenesis abundant protein [Euphorbia
  misc_feature (1)..(151): Homolog of NCBI NO: 1170746 NR Description: Desiccation protectant protein Lea14 homolog
  misc_feature (1)..(151): Homolog of NCBI NO: 1170745 NR Description: Late embryogenesis abundant protein Lea14-A
  misc_feature (1)..(151): Homolog of NCBI NO: 34904186 NR Description: putative late embryogenesis abundant protein

SEQ ID NO: 62535 - protein, 147 aa, Triticum aestivum; identical to SEQ ID NO: 51915
  peptide (1)..(147): Ceres Seq. ID no. 13654944
  misc_feature (1)..(147): Pfam Name: Late embryogenesis abundant protein Pfam Description: Late embryogenesis abundant protein
  misc_feature (1)..(147): Homolog of NCBI NO: 7595792 NR Description: late-embryogenesis abundant protein [Euphorbia
  misc_feature (1)..(147): Homolog of NCBI NO: 1170746 NR Description: Desiccation protectant protein Lea14 homolog
  misc_feature (1)..(147): Homolog of NCBI NO: 1170745 NR Description: Late embryogenesis abundant protein Lea14-A
  misc_feature (1)..(147): Homolog of NCBI NO: 34904186 NR Description: putative late embryogenesis abundant protein

SEQ ID NO: 62536 - protein, 123 aa, Triticum aestivum; identical to SEQ ID NO: 51916
  peptide (1)..(123): Ceres Seq. ID no. 13654945
  misc_feature (1)..(123): Pfam Name: Late embryogenesis abundant protein Pfam Description: Late embryogenesis abundant protein
  misc_feature (1)..(123): Homolog of NCBI NO: 7595792 NR Description: late-embryogenesis abundant protein [Euphorbia
  misc_feature (1)..(123): Homolog of NCBI NO: 1170746 NR Description: Desiccation protectant protein Lea14 homolog
  misc_feature (1)..(123): Homolog of NCBI NO: 1170745 NR Description: Late embryogenesis abundant protein Lea14-A
  misc_feature (1)..(123): Homolog of NCBI NO: 34904186 NR Description: putative late embryogenesis abundant protein

SEQ ID NO: 62537 - DNA, 693 bp, Triticum aestivum
  misc_feature (1)..(693): Ceres Seq. ID no. 12615235
attctcgttccaatccaccactccgccgctagggtttttaggttttaatcccacagcagcggcggccgtcggcggcgacaaccaaaaccccgcgtcatctccagcgaactcgagcgagagagatgaggctcctcacgcacaacttcttggcgtcgaacgtgaagggcgtgagcacgggctacccgctcgcgctggaggtcgccaagacgtccatcaaggaggtggagctcaacgtcgacttcctccgcgggatccttcccaagatcgactggagagcgctcttcgcagccaccagcgccgcggggttcccggagctcctcgccgcggagcagccgcccgaggccgagctcttcgccgagggcgccgcggaggtcgagggcagcgctatccgccgcctccaccacgcgctcctcgagatccacgtcgaggagggcaccctcgtctgccccgacagcggccgctccttccccatcctgaagggcgtccccaatatgcttctccatgaggacgaggtgcggcactgactcgcgcgtagcaggccggttgccttgcttgcttgtttgctcgtgccacatacggttatgcacttccagggcttggactcctaagattgtgtgtatgaactatcttagtatgaattgtggatcttgaagtcgtaccttgataaatactactcctacctgtgacgttttc

SEQ ID NO: 62538 - protein, 167 aa, Triticum aestivum
  peptide (1)..(167): Ceres Seq. ID no. 12615236
  misc_feature (41)..(167): Homolog of NCBI NO: 88462 NR Description: proline-rich phosphoprotein (gene PRH1, Db
FSFQSTTPPLGFLGFNPTAAAAVGGDNQNPASSPANSSERDEAPHAQLLGVEREGREHGLPARAGGRQDVHQGGGAQRRLPPRDPSQDRLESALRSHQRRGVPGAPRRGAAARGRALRRGRRGGRGQRYPPPPPRAPRDPRRGGHPRLPRQRPLLPHPEGRPQYASP

SEQ ID NO: 62539 - protein, 133 aa, Triticum aestivum
  peptide (1)..(133): Ceres Seq. ID no. 12615237
  misc_feature (1)..(130): Homolog of NCBI NO: 12833869 NR Description: unnamed protein product [Mus musculus]
  misc_feature (1)..(131): Homolog of NCBI NO: 21358217 NR Description: CG12975-PA [Drosophila melanogaster]
  misc_feature (1)..(129): Homolog of NCBI NO: 16740612 NR Description: RIKEN cDNA 0610038D11 gene [Mus musculus]
  misc_feature (1)..(130): Homolog of NCBI NO: 13385802 NR Description: RIKEN cDNA 0610038D11 [Mus musculus]
  misc_feature (1)..(130): Homolog of NCBI NO: 27661288 NR Description: similar to RIKEN cDNA 0610038D11
  misc_feature (9)..(131): Homolog of NCBI NO: 30725332 NR Description: At1g78190 [Arabidopsis thaliana]
  misc_feature (1)..(131): Homolog of NCBI NO: 15218237 NR Description: unknown protein; protein id: At1g78190.1
  misc_feature (1)..(131): Homolog of NCBI NO: 25518574 NR Description: hypothetical protein T16E15.11 - Arabidopsis
  misc_feature (1)..(131): Homolog of NCBI NO: 18395095 NR Description: Expressed protein
  misc_feature (1)..(133): Homolog of NCBI NO: 22535669 NR Description: contains ESTs
MRLLTHNFLASNVKGVSTGYPLALEVAKTSIKEVELNVDFLRGILPKIDWRALFAATSAAGFPELLAAEQPPEAELFAEGAAEVEGSAIRRLHHALLEIHVEEGTLVCPDSGRSFPILKGVPNMLLHEDEVRH

SEQ ID NO: 62540 - DNA, 1148 bp, Triticum aestivum
  misc_feature (1)..(1148): Ceres Seq. ID no. 12615238
atcgaaacctccaccaactctgacgcacgttgattgagcgagagccacttggatcaccatgaccgccacctcgcggccacagcatcccaacgggagcctagccccggcctccgacggcggcgagtccttcgccaagttcttcgagtgctggatcttggagcagtcccgtgacctggccgcgctccgcgccgcggccacggcgcggcccgacgacgctgacctccggcgcctcgtcgatcgtgtcctcggccactacgagcactactaccgcgccaagtccgcggccgcctccgccgatgtgctccccatgttcgcgccctcgtggatctccgccaccgagagcctctacctctggtgcggcggctggcgccccacttccgcgatccagctgctctactccaagtccggcctgcagctcgaggcccagctcccggccttcctcgacggcggcagcctcggggacggtgacctgggcggcctctccgcggagcagctccaggccgccgaccagctgcagcgccgcaccatccggagggaacgggagatcgaggaggccgccgccggcgcgcaggagtcgttggcgacgacgaagatggtggagctcgccggaaagggagggatggacgcggcggaggggatggagctggagatggatgccaaggcggaggcgatgaagcgcgtgctggagatggcggacgggctgaggctggagacgctgcgcggcgtggtggggctgctccggcctgcccaggccgtgcacttcctcgtggccgccgcggagctccacctcgccgtgcacaagttcggccggcgcaaggacggcgccgcggcggcggagtgagcctgcaggctactggtggcgcgcgcaagtggttgctctgctccgcgcaacgctcgtcgtctagctagctccgagctgccttcgttttgcctggtcaacgcgaggtgtcgcgataagctttgaccgtgatccccttctgtttggtcagcatgtgcgttctgccattgtgtgaaacctgtggtaacttgtacgaagtgggctagctacttgtgtatgtataatgcacaagctcatgccatggtggtttagctacttgtatgtatgtgtaatgcattattatggaaaatggaggcgtaaaggggtggcc

SEQ ID NO: 62541 - protein, 260 aa, Triticum aestivum; identical to SEQ ID NO: 52060
  peptide (1)..(260): Ceres Seq. ID no. 12615239
  misc_feature (22)..(253): Homolog of NCBI NO: 30684489 NR Description: expressed protein [Arabidopsis thaliana]
  misc_feature (22)..(253): Homolog of NCBI NO: 7486277 NR Description: hypothetical protein F28A21.60 - Arabidopsis
  misc_feature (35)..(254): Homolog of NCBI NO: 15233977 NR Description: putative protein; protein id: At4g18680.1
  misc_feature (33)..(254): Homolog of NCBI NO: 9758930 NR Description: tumor-related protein-like [Arabidopsis thaliana]
  misc_feature (33)..(254): Homolog of NCBI NO: 30694832 NR Description: tumor-related protein-like [Arabidopsis thaliana]
  misc_feature (17)..(260): Homolog of NCBI NO: 15233979 NR Description: putative protein; protein id: At4g18690.1
  misc_feature (23)..(260): Homolog of NCBI NO: 8777471 NR Description: tumor-related protein-like [Arabidopsis thaliana]
  misc_feature (23)..(260): Homolog of NCBI NO: 15231945 NR Description: hypothetical protein; protein id: At3g14880.1
  misc_feature (22)..(258): Homolog of NCBI NO: 688423 NR Description: tumor-related protein [Nicotiana glauca x
  misc_feature (7)..(259): Homolog of NCBI NO: 34896008 NR Description: ESTs AU057825(S21823),AU057072(S21123) correspond a region of the predicted gene.~Similar to Nicotiana glauca X

SEQ ID NO: 62542 - protein, 177 aa, Triticum aestivum; identical to SEQ ID NO: 52061
  peptide (1)..(177): Ceres Seq. ID no. 12615240
  misc_feature (1)..(170): Homolog of NCBI NO: 30684489 NR Description: expressed protein [Arabidopsis thaliana]
  misc_feature (1)..(170): Homolog of NCBI NO: 7486277 NR Description: hypothetical protein F28A21.60 - Arabidopsis
  misc_feature (1)..(171): Homolog of NCBI NO: 15233977 NR Description: putative protein; protein id: At4g18680.1
  misc_feature (1)..(171): Homolog of NCBI NO: 9758930 NR Description: tumor-related protein-like [Arabidopsis thaliana]
  misc_feature (1)..(171): Homolog of NCBI NO: 30694832 NR Description: tumor-related protein-like [Arabidopsis thaliana]
  misc_feature (1)..(177): Homolog of NCBI NO: 15233979 NR Description: putative protein; protein id: At4g18690.1
  misc_feature (1)..(177): Homolog of NCBI NO: 8777471 NR Description: tumor-related protein-like [Arabidopsis thaliana]
  misc_feature (1)..(177): Homolog of NCBI NO: 15231945 NR Description: hypothetical protein; protein id: At3g14880.1
  misc_feature (1)..(175): Homolog of NCBI NO: 688423 NR Description: tumor-related protein [Nicotiana glauca x
  misc_feature (1)..(176): Homolog of NCBI NO: 34896008 NR Description: ESTs AU057825(S21823),AU057072(S21123) correspond a region of the predicted gene.~Similar to Nicotiana glauca X

SEQ ID NO: 62543 - DNA, 1463 bp, Triticum aestivum
  misc_feature (1)..(1463): Ceres Seq. ID no. 14302314
ccgtctccccccacagaaagtgagaacgccaagagcgtcaagctgagggaaagatgagggagctggtctcctcctccacctcctcccccaccgcggccctcgtcgccgccggccacgcggcgctccggggatggtgggaggaggtcaacgagtcgccggcgtggcaggacggcgccttcttctccctcaccgccgcctacgccctcgtctccgccgtcgcgctgattcagctggtgaggatccagcgcagagtgcccgagttcggctggaccacgcagaaggtgttccacctcatgaacttcgtcgtcaatggggttcgtgccgttgtattcggattccatgcctatgtcttcctcctccaaacaaaagtttataagttggtgttactagacctccccggcttgttgttcttctcggcctacaccttacttgttcttttctgggcagaaatatatcatcaggctaggagtctccccaccgataagttaaggattatatacctagccgttaatagcatcgtatatgcaattcagatctgtatttgggtgtaccttggaataaacgacaatgcgttggttgagctggtgagcaaaatcttcatcgtatctgtctccgctgtggcccttcttggtttcgcagtatatggtggaaggttgtttgtcttgctgagacgtttccccattgaatcaaaggggcgaaaaaagaagctttatgaggttgggactgtgacgacaatctgctgcacctgtttcctgataagatgcatcgtggtggccgtatctgcatttgatgctgatgtttctttggaggttttagatcatccaatcctagatttcttctattatatgttgacagagatactgccttccgcgctggtccttttcatccttcggaagcttccacctaagcgagtatcggcgcaatatcaccctattaactagaggtttttgtgcttatgtatgatgttatgcttagaataatggatgaacttggaattgcccaaaattttacatgtctggtgcgagctgaatgctggtgtttgagctgtgtgttttccaaaatcatcgaagtgttgtcgatggatcatgcaatgtgcagtccaggggccctataaaagtgaattttccgtcttctgcttgttctgtttctggtggaatttggttgagagccttgctctagtagaggagaaaatcctagtggattccctgatgtttatccgagtcgttttgtgattgcacttgccatgtttaccatcagagtgttgctggttatgccgactggagcttaatatttgtaaaatgttaccagtctcttgaattatgtgtgtattgtagagggcctcaaaagtcatatttgtaagtgtaactggtttggagtagatgatgtcctgcgcgttgccaaatttcatttcaagaatgtgagaaatacttggcatgattgcaatagtatttgtaatcgtactg

SEQ ID NO: 62544 - protein, 295 aa, Triticum aestivum
  peptide (1)..(295): Ceres Seq. ID no. 14302315
  misc_feature (42)..(295): Homolog of NCBI NO: 28828114 NR Description: hypothetical protein [Dictyostelium discoideum]
  misc_feature (13)..(294): Homolog of NCBI NO: 7262697 NR Description: Contains similarity to an unknown protein from
  misc_feature (14)..(295): Homolog of NCBI NO: 34902220 NR Description: Putative transmembrane protein
  misc_feature (7)..(294): Homolog of NCBI NO: 21537264 NR Description: unknown [Arabidopsis thaliana]
  misc_feature (3)..(294): Homolog of NCBI NO: 18395323 NR Description: TOM3 protein [Arabidopsis thaliana]
  misc_feature (1)..(295): Homolog of NCBI NO: 37536460 NR Description: putative transmembrane protein
  misc_feature (58)..(281): Homolog of NCBI NO: 14091866 NR Description: Putative transmembrane protein [Oryza sativa]
  misc_feature (23)..(294): Homolog of NCBI NO: 18415765 NR Description: TOM1 protein [Arabidopsis thaliana]
  misc_feature (1)..(294): Homolog of NCBI NO: 34896982 NR Description: unknown protein [Oryza sativa]
  misc_feature (16)..(295): Homolog of NCBI NO: 34394174 NR Description: putative transmembrane protein(TOM3)
MRELVSSSTSSPTAALVAAGHAALRGWWEEVNESPAWQDGAFFSLTAAYALVSAVALIQLVRIQRRVPEFGWTTQKVFHLMNFVVNGVRAVVFGFHAYVFLLQTKVYKLVLLDLPGLLFFSAYTLLVLFWAEIYHQARSLPTDKLRIIYLAVNSIVYAIQICIWVYLGINDNALVELVSKIFIVSVSAVALLGFAVYGGRLFVLLRRFPIESKGRKKKLYEVGTVTTICCTCFLIRCIVVAVSAFDADVSLEVLDHPILDFFYYMLTEILPSALVLFILRKLPPKRVSAQYHPIN

SEQ ID NO: 62545 - protein, 215 aa, Triticum aestivum
  peptide (1)..(215): Ceres Seq. ID no. 14302316
  misc_feature (1)..(215): Homolog of NCBI NO: 28828114 NR Description: hypothetical protein [Dictyostelium discoideum]
  misc_feature (1)..(214): Homolog of NCBI NO: 7262697 NR Description: Contains similarity to an unknown protein from
  misc_feature (1)..(215): Homolog of NCBI NO: 34902220 NR Description: Putative transmembrane protein
  misc_feature (1)..(214): Homolog of NCBI NO: 21537264 NR Description: unknown [Arabidopsis thaliana]
  misc_feature (1)..(214): Homolog of NCBI NO: 18395323 NR Description: TOM3 protein [Arabidopsis thaliana]
  misc_feature (1)..(215): Homolog of NCBI NO: 37536460 NR Description: putative transmembrane protein
  misc_feature (1)..(201): Homolog of NCBI NO: 14091866 NR Description: Putative transmembrane protein [Oryza sativa]
  misc_feature (1)..(214): Homolog of NCBI NO: 18415765 NR Description: TOM1 protein [Arabidopsis thaliana]
  misc_feature (1)..(214): Homolog of NCBI NO: 34896982 NR Description: unknown protein [Oryza sativa]
  misc_feature (1)..(215): Homolog of NCBI NO: 34394174 NR Description: putative transmembrane protein(TOM3)
MNFVVNGVRAVVFGFHAYVFLLQTKVYKLVLLDLPGLLFFSAYTLLVLFWAEIYHQARSLPTDKLRIIYLAVNSIVYAIQICIWVYLGINDNALVELVSKIFIVSVSAVALLGFAVYGGRLFVLLRRFPIESKGRKKKLYEVGTVTTICCTCFLIRCIVVAVSAFDADVSLEVLDHPILDFFYYMLTEILPSALVLFILRKLPPKRVSAQYHPIN

SEQ ID NO: 62546 - DNA, 1344 bp, Triticum aestivum
  misc_feature (1)..(1344): Ceres Seq. ID no. 13654928
actaaaaaagacttggccttttctattccaagtctctcttcccccatctctgcttctcttcttctcctgcacagtccacactgttcatctcctcttcgatccccaaatcccaagctgaccaaccaagaccccgccccgcatggagtggacggccccgaagtccaccccgctctccccgccccacctcctctgggactggggcgacgccgccgcgccgggctcctccggcgaggcggcggggaggcgcgggaaggagaagcgggccaggggggagggggccggcggaggaggaggaggaggaggagggggcgtgaggtgccaggtggagggctgcggggtcgagctccgcgacgcgaaggagtaccaccggaagcaccgggtctgcgaggcccacaccaagtccccccgcgtcgtcgtcgccggccaggagcgccgcttctgccagcagtgcagccggttccatgggctgtcggagttcgaccagaagaagaggagctgccggaggcgactgtccgatcacaatgctcggcgccggaagccacagccggacgcattctcctttgcaccggcaaggctcccgtcgtcattgatgtttgatgatagacggcaaataagttttgtctggaataaagatccacttagtcatggaaggcctttcccatgttctccatgggacagcccatctgacttcaagctcccgcaagtgaaggaaataagagaagtatcaatcaatgggcaagttcattttgataaatctcatctacccaatgctgttccagcactgagtcatgacatacctgagctgctaccaatgaaaggtccggacgcatctgtaaccgcttcgaaattaggtggagcaccggatcttcagcgtgctctctctcttctgtcagctagttcttgtggattacctgatcctgtacagcaagcatcttgtctcgtccaattcactggtgctagccaaaacagccggggcccttcaccacatggaggtagccctccgtcggtgtcctgtgccgaaggacagcccatggcgccatcgcctcagtttgtccgtttcaccatggacggcgccagcagtggctatgaatccactttcttcggcgtaaaccggatgaattgatgcgcgagacacacaagcttctgtacgattttggatctacagccaggaagagcttatgcaagaactgctcctgtcaagaaaatctcactgttcatgttacctacatactcattggtcaccttgttatttttccattgtacaaccctgctgccatttgttggctcttttgaaaccattgttgatgaatctggacatgatttgtttcatgaagtgatgacttg

SEQ ID NO: 62547 - protein, 327 aa, Triticum aestivum
  peptide (1)..(327): Ceres Seq. ID no. 13654929
  misc_feature (60)..(136): Pfam Name: SBP domain Pfam Description: SBP domain
  misc_feature (27)..(145): Homolog of NCBI NO: 15227896 NR Description: squamosa-promoter binding protein -related
  misc_feature (27)..(145): Homolog of NCBI NO: 15028115 NR Description: putative squamosa-promoter binding protein
  misc_feature (59)..(254): Homolog of NCBI NO: 22329813 NR Description: squamosa-promoter binding protein 2 -related
  misc_feature (59)..(254): Homolog of NCBI NO: 18650611 NR Description: At1g27370/F17L21_16 [Arabidopsis thaliana]
  misc_feature (59)..(254): Homolog of NCBI NO: 9802546 NR Description: F17L21.15 [Arabidopsis thaliana]
  misc_feature (21)..(302): Homolog of NCBI NO: 28411864 NR Description: putative SBP-domain protein 5
  misc_feature (60)..(188): Homolog of NCBI NO: 15239820 NR Description: squamosa promoter binding protein-related 2
  misc_feature (59)..(270): Homolog of NCBI NO: 25403307 NR Description: protein F17L21.14 [imported] - Arabidopsis
  misc_feature (59)..(270): Homolog of NCBI NO: 18396302 NR Description: squamosa-promoter binding protein 2 -related
  misc_feature (60)..(254): Homolog of NCBI NO: 25456646 NR Description: squamosa promoter binding protein 2
MEWTAPKSTPLSPPHLLWDWGDAAAPGSSGEAAGRRGKEKRARGEGAGGGGGGGGGGVRCQVEGCGVELRDAKEYHRKHRVCEAHTKSPRVVVAGQERRFCQQCSRFHGLSEFDQKKRSCRRRLSDHNARRRKPQPDAFSFAPARLPSSLMFDDRRQISFVWNKDPLSHGRPFPCSPWDSPSDFKLPQVKEIREVSINGQVHFDKSHLPNAVPALSHDIPELLPMKGPDASVTASKLGGAPDLQRALSLLSASSCGLPDPVQQASCLVQFTGASQNSRGPSPHGGSPPSVSCAEGQPMAPSPQFVRFTMDGASSGYESTFFGVNRMN

SEQ ID NO: 62548 - protein, 198 aa, Triticum aestivum
  peptide (1)..(198): Ceres Seq. ID no. 13654930
TKKDLAFSIPSLSSPISASLLLLHSPHCSSPLRSPNPKLTNQDPAPHGVDGPEVHPALPAPPPLGLGRRRRAGLLRRGGGEAREGEAGQGGGGRRRRRRRRRGREVPGGGLRGRAPRREGVPPEAPGLRGPHQVPPRRRRRPGAPLLPAVQPVPWAVGVRPEEEELPEATVRSQCSAPEATAGRILLCTGKAPVVIDV

SEQ ID NO: 62549 - protein, 177 aa, Triticum aestivum
  peptide (1)..(177): Ceres Seq. ID no. 13654931
  misc_feature (1)..(119): Homolog of NCBI NO: 18423163 NR Description: expressed protein [Arabidopsis thaliana]
  misc_feature (1)..(106): Homolog of NCBI NO: 25352582 NR Description: squamosa promoter binding protein-homolog 5
  misc_feature (1)..(104): Homolog of NCBI NO: 18650611 NR Description: At1g27370/F17L21_16 [Arabidopsis thaliana]
  misc_feature (1)..(104): Homolog of NCBI NO: 22329813 NR Description: squamosa-promoter binding protein 2 -related
  misc_feature (1)..(104): Homolog of NCBI NO: 9802546 NR Description: F17L21.15 [Arabidopsis thaliana]
  misc_feature (1)..(152): Homolog of NCBI NO: 28411864 NR Description: putative SBP-domain protein 5
  misc_feature (1)..(38): Homolog of NCBI NO: 15239820 NR Description: squamosa promoter binding protein-related 2
  misc_feature (1)..(120): Homolog of NCBI NO: 25403307 NR Description: protein F17L21.14 [imported] - Arabidopsis
  misc_feature (1)..(120): Homolog of NCBI NO: 18396302 NR Description: squamosa-promoter binding protein 2 -related
  misc_feature (1)..(104): Homolog of NCBI NO: 25456646 NR Description: squamosa promoter binding protein 2
MFDDRRQISFVWNKDPLSHGRPFPCSPWDSPSDFKLPQVKEIREVSINGQVHFDKSHLPNAVPALSHDIPELLPMKGPDASVTASKLGGAPDLQRALSLLSASSCGLPDPVQQASCLVQFTGASQNSRGPSPHGGSPPSVSCAEGQPMAPSPQFVRFTMDGASSGYESTFFGVNRMN

SEQ ID NO: 62550 - DNA, 1219 bp, Triticum aestivum
  misc_feature (1)..(1219): Ceres Seq. ID no. 15175441
aaggcagcagcccatagcccaagctcacgacacgcagcgacgcagcgctcagcagcggagcagccgccaccgggcaccgtcacaacagccgccgtccgccgcggtgccggccaccggccaccggcacgcgcatcagccgccacccacacagcagcgcggcgactcggcgagtcgtccaaagccgacccacgacggcacgaccctagcggcacacagcagcggcgagccagcgacccagatcccgcagcatcttcgcataactgcagttcggcggtgccgcttggggattctgttgcccggcgatgtcggcgacgccgctccccccaccgccgccggccgacggcccggcggcactcccgcccccgccggggacggacatgacggggatctgcttccgcgaccagctgtggctcaacacctacccgctggaccgcaacctcgtcttcgactacttcgccctctcccccttctacgacatcacctgcaacaacgagtccctccgctcgcgccaaatccaccccctcgacatgtcccagctcacgaagatgaccgggttggagtacgtgctgagcgaagtgatggagccgcacctgttcgtgatgcgcaagcagaagaggacgaactccgagaagtctgaccccctgctcgcctactacatcctcgacggttccatctaccaggcgccgctgcttggcagcgttttcgcctcccgcataagtagggctatgcatcacatatcaaaagcattttcaacggcatgctcaaaattggagaagattggtaatgcggaaacagaggctgatgcggcagcttctgaatcaaaggcccagaaggaaacaattgacttgaaggagttgaaacgagtggatcacatcctcatgtctttgcaacggaagctgcctcctgctcctccccctccaccctttccggatggttatgtcccatcagaacaagagaaagggccagatgatctgttggcctcggaggcattgcctcctgcaattgaccccatcattgatcaagggccagcaaaaagaccaagatttcaatgagattgtgccgttgatcaagtaaaattaccgccacactaatgttatgttgtattgcaaatcataagtagaaatttgtaattcctgagctgtgaaggtgcagaccgttttctgaatgtacacttcgactgatccttgatagctctgtaaggcccagtttgtggttttct

SEQ ID NO: 62551 - protein, 249 aa, Triticum aestivum
  peptide (1)..(249): Ceres Seq. ID no. 15175442
  misc_feature (29)..(154): Homolog of NCBI NO: 31235097 NR Description: ENSANGP00000011842 [Anopheles gambiae]
  misc_feature (42)..(205): Homolog of NCBI NO: 28573123 NR Description: CG9473-PB [Drosophila melanogaster]
  misc_feature (25)..(154): Homolog of NCBI NO: 26354242 NR Description: unnamed protein product [Mus musculus]
  misc_feature (25)..(154): Homolog of NCBI NO: 4885481 NR Description: mediator of RNA polymerase II transcription,
  misc_feature (26)..(249): Homolog of NCBI NO: 5360103 NR Description: NY-REN-28 antigen [Homo sapiens]
  misc_feature (25)..(249): Homolog of NCBI NO: 34867365 NR Description: similar to RNA polymerase II transcriptional
  misc_feature (25)..(249): Homolog of NCBI NO: 30583885 NR Description: Homo sapiens mediator of RNA polymerase II
  misc_feature (25)..(249): Homolog of NCBI NO: 29840782 NR Description: RNA polymerase transcriptional regulation subunit 6 homolog (Activator-recruited cofactor 33 kDa component)
  misc_feature (25)..(249): Homolog of NCBI NO: 3329506 NR Description: RNA polymerase transcriptional regulation
  misc_feature (13)..(248): Homolog of NCBI NO: 22331241 NR Description: expressed protein [Arabidopsis thaliana]
MSATPLPPPPPADGPAALPPPPGTDMTGICFRDQLWLNTYPLDRNLVFDYFALSPFYDITCNNESLRSRQIHPLDMSQLTKMTGLEYVLSEVMEPHLFVMRKQKRTNSEKSDPLLAYYILDGSIYQAPLLGSVFASRISRAMHHISKAFSTACSKLEKIGNAETEADAAASESKAQKETIDLKELKRVDHILMSLQRKLPPAPPPPPFPDGYVPSEQEKGPDDLLASEALPPAIDPIIDQGPAKRPRFQ

SEQ ID NO: 62552 - protein, 224 aa, Triticum aestivum
  peptide (1)..(224): Ceres Seq. ID no. 15175443
  misc_feature (4)..(129): Homolog of NCBI NO: 31235097 NR Description: ENSANGP00000011842 [Anopheles gambiae]
  misc_feature (17)..(180): Homolog of NCBI NO: 28573123 NR Description: CG9473-PB [Drosophila melanogaster]
  misc_feature (1)..(129): Homolog of NCBI NO: 26354242 NR Description: unnamed protein product [Mus musculus]
  misc_feature (1)..(129): Homolog of NCBI NO: 4885481 NR Description: mediator of RNA polymerase II transcription,
  misc_feature (1)..(224): Homolog of NCBI NO: 5360103 NR Description: NY-REN-28 antigen [Homo sapiens]
  misc_feature (1)..(224): Homolog of NCBI NO: 34867365 NR Description: similar to RNA polymerase II transcriptional
  misc_feature (1)..(224): Homolog of NCBI NO: 30583885 NR Description: Homo sapiens mediator of RNA polymerase II
  misc_feature (1)..(224): Homolog of NCBI NO: 29840782 NR Description: RNA polymerase transcriptional regulation subunit 6 homolog (Activator-recruited cofactor 33 kDa component)
  misc_feature (1)..(224): Homolog of NCBI NO: 3329506 NR Description: RNA polymerase transcriptional regulation
  misc_feature (1)..(223): Homolog of NCBI NO: 22331241 NR Description: expressed protein [Arabidopsis thaliana]
MTGICFRDQLWLNTYPLDRNLVFDYFALSPFYDITCNNESLRSRQIHPLDMSQLTKMTGLEYVLSEVMEPHLFVMRKQKRTNSEKSDPLLAYYILDGSIYQAPLLGSVFASRISRAMHHISKAFSTACSKLEKIGNAETEADAAASESKAQKETIDLKELKRVDHILMSLQRKLPPAPPPPPFPDGYVPSEQEKGPDDLLASEALPPAIDPIIDQGPAKRPRFQ

SEQ ID NO: 62553 - protein, 211 aa, Triticum aestivum
  peptide (1)..(211): Ceres Seq. ID no. 15175444
RQQPIAQAHDTQRRSAQQRSSRHRAPSQQPPSAAVPATGHRHAHQPPPTQQRGDSASRPKPTHDGTTLAAHSSGEPATQIPQHLRITAVRRCRLGILLPGDVGDAAPPTAAGRRPGGTPAPAGDGHDGDLLPRPAVAQHLPAGPQPRLRLLRPLPLLRHHLQQRVPPLAPNPPPRHVPAHEDDRVGVRAERSDGAAPVRDAQAEEDELREV

SEQ ID NO: 62554 - DNA, 956 bp, Triticum aestivum
  misc_feature (1)..(956): Ceres Seq. ID no. 13654885
cctaaccaaaaagtcactggctagcttattcacatctcttttcttgagacattctcttgatccacatatttacctacctctctagctagaaacaaagcttgctcggcaacaatggctgcaggtggagcttctcttattgctgctgctgttttctccgtgctgatcatgtcttccctgggggatctgatgcctttatgcagcgattgcgagacgctgtgccgtaccaactgcaccgcggaggctgaagccaattgcgccaattactgcaacgacacccaagcaacagcagggtactgcgaaggttgcatgggcgcctacttcgaccagcactgcaatcccgagtgtctcaaaaattgcagcaaccgctgcaagaagaaggtgcttccgaggcctttatgcagcgactgcgacacggtatgcagtaccaagtgcgctgaggagcttgaaaccacctgcagccaagactgcgaccccaggcgcagcggtcaggcggcctgccagcgtcagctcttcaagcggtgcaacgcagagggtacctgctgcagtagcgacggcacatgcacttgtgactgcgagaccgaagctcgaaagcagtgcgtgggcgtcagcgacaactccaataattgcgaagtttgcaagcgcagccagttcgaccaggactgtcatcccacctgtaacaccgattgcaatggcaactgcaagaagaagaaagggtgccgcgggcacgcatagggaaaacatgtaactgggggccctgcattgcgtaggaaataacatggctccttgtagtcgtgcgtagatttcgatttctgtaaacgccacgacctggttttgtgggatggcacaggaggagtatgggtggtggcgcatcacccccagcttttggccgaggatttatattctgtatttctatttatgttttctgaacaatgaatcacaatgtgaaattatggttg

SEQ ID NO: 62555 - protein, 206 aa, Triticum aestivum
  peptide (1)..(206): Ceres Seq. ID no. 13654886
  misc_feature (74)..(196): Pfam Name: Keratin, high sulfur B2 protein Pfam Description: Keratin, high sulfur B2 protein
  misc_feature (28)..(196): Homolog of NCBI NO: 17535157 NR Description: Cysteine rich repeat containing protein
  misc_feature (29)..(197): Homolog of NCBI NO: 39589133 NR Description: Hypothetical protein CBG00905 [Caenorhabditis
  misc_feature (1)..(192): Homolog of NCBI NO: 39593357 NR Description: Hypothetical protein CBG09623 [Caenorhabditis
MAAGGASLIAAAVFSVLIMSSLGDLMPLCSDCETLCRTNCTAEAEANCANYCNDTQATAGYCEGCMGAYFDQHCNPECLKNCSNRCKKKVLPRPLCSDCDTVCSTKCAEELETTCSQDCDPRRSGQAACQRQLFKRCNAEGTCCSSDGTCTCDCETEARKQCVGVSDNSNNCEVCKRSQFDQDCHPTCNTDCNGNCKKKKGCRGHA

SEQ ID NO: 62556 - protein, 188 aa, Triticum aestivum
  peptide (1)..(188): Ceres Seq. ID no. 13654887
  misc_feature (56)..(178): Pfam Name: Keratin, high sulfur B2 protein Pfam Description: Keratin, high sulfur B2 protein
  misc_feature (10)..(178): Homolog of NCBI NO: 17535157 NR Description: Cysteine rich repeat containing protein
  misc_feature (11)..(179): Homolog of NCBI NO: 39589133 NR Description: Hypothetical protein CBG00905 [Caenorhabditis
  misc_feature (1)..(174): Homolog of NCBI NO: 39593357 NR Description: Hypothetical protein CBG09623 [Caenorhabditis
MSSLGDLMPLCSDCETLCRTNCTAEAEANCANYCNDTQATAGYCEGCMGAYFDQHCNPECLKNCSNRCKKKVLPRPLCSDCDTVCSTKCAEELETTCSQDCDPRRSGQAACQRQLFKRCNAEGTCCSSDGTCTCDCETEARKQCVGVSDNSNNCEVCKRSQFDQDCHPTCNTDCNGNCKKKKGCRGHA

SEQ ID NO: 62557 - protein, 181 aa, Triticum aestivum
  peptide (1)..(181): Ceres Seq. ID no. 13654888
  misc_feature (49)..(171): Pfam Name: Keratin, high sulfur B2 protein Pfam Description: Keratin, high sulfur B2 protein
  misc_feature (3)..(171): Homolog of NCBI NO: 17535157 NR Description: Cysteine rich repeat containing protein
  misc_feature (4)..(172): Homolog of NCBI NO: 39589133 NR Description: Hypothetical protein CBG00905 [Caenorhabditis
  misc_feature (1)..(167): Homolog of NCBI NO: 39593357 NR Description: Hypothetical protein CBG09623 [Caenorhabditis
MPLCSDCETLCRTNCTAEAEANCANYCNDTQATAGYCEGCMGAYFDQHCNPECLKNCSNRCKKKVLPRPLCSDCDTVCSTKCAEELETTCSQDCDPRRSGQAACQRQLFKRCNAEGTCCSSDGTCTCDCETEARKQCVGVSDNSNNCEVCKRSQFDQDCHPTCNTDCNGNCKKKKGCRGHA

SEQ ID NO: 62558 - DNA, 987 bp, Triticum aestivum
  misc_feature (1)..(987): Ceres Seq. ID no. 15174990
atcctcttccactccgccgcaaccccttccttcctcaacacccgcaacatccttgctcgtcgtttcctccgcctctctctcctctcctcacgcgctctcccctcccctctgaagccgcgactcttctgaaccctaaaccgtagatccccgcgcagcaggagcgagatttactcccgcaagcatgagtcgccacccgagcactaagtgggcgcagaggctggacaaggtttacttgacgattgagctgcccgacgcaaaggatgtcaagctcaacctgaggcctgatggccatttcaacttctcagcaaaggcccctgctgatgacatgcagtatgagcttgaccttgagctctttgatgctgtcagtgttgaggagagccaagcggctgttgccccgagggctatatgctaccttgtcaagaaagctgagggcaagtggtggcctaggctgctcaagaaggaaggtaggccgcctgtgttcctgaaggttgactgggataaatggcaagatgaggatgatgaagatgccggatttggtgactttggtgatatggacttctcgaagctggacatgggaggtggtgatgacgatgatgatgagattgaggaggaggatgaagacaatgtggttgacagtgctaacaaaggtgatgtagatgctgagagagagccggggagcaagggaggggaagctccatcagctgctggtgaagaagcaaagccataagattggaggcgatggcatcggtcgttacaacttatgatgatcatgagatctgtttctagacgcgaggtagaattttggtgtgcccctgaagttgggtagtagaggtggtgttggtagcttttggcttggggctatctgtagtgttcaacgttattctgcaccttttgtttactagtaaattttatgtgctttgcacgtcacttaaatatataaaagcatgggaaaatacatttgaatatgtatttcctttcctagaatct

SEQ ID NO: 62559 - protein, 181 aa, Triticum aestivum
  peptide (1)..(181): Ceres Seq. ID no. 15174991
  misc_feature (1)..(168): Homolog of NCBI NO: 39586555 NR Description: Hypothetical protein CBG21192 [Caenorhabditis
  misc_feature (1)..(171): Homolog of NCBI NO: 17556837 NR Description: butyrate-induced transcript 1 like (19.4 kD)
  misc_feature (1)..(137): Homolog of NCBI NO: 22330824 NR Description: p23 {Brassica napus} -related [Arabidopsis
  misc_feature (3)..(133): Homolog of NCBI NO: 7487014 NR Description: hypothetical protein T14P8.5 - Arabidopsis
  misc_feature (1)..(133): Homolog of NCBI NO: 30679149 NR Description: glycine-rich protein [Arabidopsis thaliana]
  misc_feature (1)..(133): Homolog of NCBI NO: 11229591 NR Description: p23 co-chaperone [Arabidopsis thaliana]
  misc_feature (1)..(133): Homolog of NCBI NO: 38637531 NR Description: putative p23 co-chaperone
  misc_feature (1)..(174): Homolog of NCBI NO: 11934654 NR Description: p23 [Brassica napus]
  misc_feature (1)..(167): Homolog of NCBI NO: 12231292 NR Description: ripening regulated protein DDTFR8 [Lycopersicon
  misc_feature (1)..(181): Homolog of NCBI NO: 40882701 NR Description: putative ripening regulated protein
MSRHPSTKWAQRLDKVYLTIELPDAKDVKLNLRPDGHFNFSAKAPADDMQYELDLELFDAVSVEESQAAVAPRAICYLVKKAEGKWWPRLLKKEGRPPVFLKVDWDKWQDEDDEDAGFGDFGDMDFSKLDMGGGDDDDDEIEEEDEDNVVDSANKGDVDAEREPGSKGGEAPSAAGEEAKP

SEQ ID NO: 62560 - protein, 133 aa, Triticum aestivum
  peptide (1)..(133): Ceres Seq. ID no. 15174992
  misc_feature (1)..(120): Homolog of NCBI NO: 39586555 NR Description: Hypothetical protein CBG21192 [Caenorhabditis
  misc_feature (1)..(123): Homolog of NCBI NO: 17556837 NR Description: butyrate-induced transcript 1 like (19.4 kD)
  misc_feature (1)..(89): Homolog of NCBI NO: 22330824 NR Description: p23 {Brassica napus} -related [Arabidopsis
  misc_feature (1)..(85): Homolog of NCBI NO: 7487014 NR Description: hypothetical protein T14P8.5 - Arabidopsis
  misc_feature (1)..(85): Homolog of NCBI NO: 30679149 NR Description: glycine-rich protein [Arabidopsis thaliana]
  misc_feature (1)..(85): Homolog of NCBI NO: 11229591 NR Description: p23 co-chaperone [Arabidopsis thaliana]
  misc_feature (1)..(85): Homolog of NCBI NO: 38637531 NR Description: putative p23 co-chaperone
  misc_feature (1)..(126): Homolog of NCBI NO: 11934654 NR Description: p23 [Brassica napus]
  misc_feature (1)..(119): Homolog of NCBI NO: 12231292 NR Description: ripening regulated protein DDTFR8 [Lycopersicon
  misc_feature (1)..(133): Homolog of NCBI NO: 40882701 NR Description: putative ripening regulated protein
MQYELDLELFDAVSVEESQAAVAPRAICYLVKKAEGKWWPRLLKKEGRPPVFLKVDWDKWQDEDDEDAGFGDFGDMDFSKLDMGGGDDDDDEIEEEDEDNVVDSANKGDVDAEREPGSKGGEAPSAAGEEAKP

SEQ ID NO: 62561 - DNA, 1060 bp, Triticum aestivum
  misc_feature (1)..(1060): Ceres Seq. ID no. 12615329
agcagcaaggaatcgagatccaatcacctcccctcccctccactcctcccccgcggcaagagagatccagccagatccgtccagttccatggcgaccgccggcaacgccccccgctcccgcaagcgcgtcgaggccaccgtcctcaagcgcgcgcgcgacggaagcgccttcacccgctgcgaggcgtgcaacaaggacgtagccatcgtcctcatcgacctgcacagctgcagcctcgactccaagatacgcctcagcctcgagtcgcaggtggtggagaaggccgtcgagatccaggagaagaagaggaagacgccctccgctgccgccggaggcaaggggaagaagaagagcaaggcagacggagatggtgccaagaagccaaaggcaaagcgcccaccaactgccttcttcctcttcatgaaggacttcagggttgagttcaaggcctctcaccctgacgagaagggtgttgccgccgttggcaaggcagcaggggagaagtggaaatccatgaccgaagaggagaagaagccctacaatgaccaggccaaggagctcaaggcccagtttgccaatggcgagggcagcgcggagaacaatgtgggagatgaggagaaggcagatgcggatgcagaggaggtggaggatgcggagcaggaggtggataagccagaagatgccccagaggacgaagaggaggaagaggagaagaacgagctggatgatgacatctagacggagctgaagaagggtgctcgttttcccgttttgtaaatggcaggtgttctatctgtcctgggcaacctgaatctcggcctaaactctaggagcagcagtagtgaatgttgtggctggttgcagtctgtttatcattgttatggaatggaaggaaagcagggttgatgtggtggtcgatgaatgactgaatctttctgtcactgcattgcatctgcaatatgtttgaaactagaattttgttaagatccagaagacaatataatctgctccaatactaggatattgatgttgttctacacaaaataaagatggatcaag

SEQ ID NO: 62562 - protein, 245 aa, Triticum aestivum
  peptide (1)..(245): Ceres Seq. ID no. 12615330
  misc_feature (131)..(197): Pfam Name: HMG (high mobility group) box Pfam Description: HMG (high mobility group) box
  misc_feature (104)..(244): Homolog of NCBI NO: 123378 NR Description: DNA-BINDING PROTEIN MNB1B (HMG1-LIKE PROTEIN)
  misc_feature (108)..(238): Homolog of NCBI NO: 7446227 NR Description: high mobility group protein HMGc2 - maize
  misc_feature (102)..(244): Homolog of NCBI NO: 15231065 NR Description: high mobility group protein 2-like
  misc_feature (99)..(244): Homolog of NCBI NO: 3885888 NR Description: high mobility group protein [Oryza sativa]
  misc_feature (88)..(244): Homolog of NCBI NO: 541968 NR Description: high mobility group protein HMG-1 - garden pea
  misc_feature (101)..(238): Homolog of NCBI NO: 18700443 NR Description: high mobility group box protein 2
  misc_feature (31)..(244): Homolog of NCBI NO: 9759080 NR Description: gene_id:K19M13.4~unknown protein [Arabidopsis
  misc_feature (85)..(245): Homolog of NCBI NO: 17017396 NR Description: HMG type nucleosome/chromatin assembly factor D
  misc_feature (31)..(244): Homolog of NCBI NO: 18420676 NR Description: expressed protein
  misc_feature (33)..(245): Homolog of NCBI NO: 38637289 NR Description: putative HMG type nucleosome/chromatin assembly
AARNRDPITSPPLHSSPAAREIQPDPSSSMATAGNAPRSRKRVEATVLKRARDGSAFTRCEACNKDVAIVLIDLHSCSLDSKIRLSLESQVVEKAVEIQEKKRKTPSAAAGGKGKKKSKADGDGAKKPKAKRPPTAFFLFMKDFRVEFKASHPDEKGVAAVGKAAGEKWKSMTEEEKKPYNDQAKELKAQFANGEGSAENNVGDEEKADADAEEVEDAEQEVDKPEDAPEDEEEEEEKNELDDDI

SEQ ID NO: 62563 - protein, 216 aa, Triticum aestivum
  peptide (1)..(216): Ceres Seq. ID no. 12615331
  misc_feature (102)..(168): Pfam Name: HMG (high mobility group) box Pfam Description: HMG (high mobility group) box
  misc_feature (75)..(215): Homolog of NCBI NO: 123378 NR Description: DNA-BINDING PROTEIN MNB1B (HMG1-LIKE PROTEIN)
  misc_feature (79)..(209): Homolog of NCBI NO: 7446227 NR Description: high mobility group protein HMGc2 - maize
  misc_feature (73)..(215): Homolog of NCBI NO: 15231065 NR Description: high mobility group protein 2-like
  misc_feature (70)..(215): Homolog of NCBI NO: 3885888 NR Description: high mobility group protein [Oryza sativa]
  misc_feature (59)..(215): Homolog of NCBI NO: 541968 NR Description: high mobility group protein HMG-1 - garden pea
  misc_feature (72)..(209): Homolog of NCBI NO: 18700443 NR Description: high mobility group box protein 2
  misc_feature (2)..(215): Homolog of NCBI NO: 9759080 NR Description: gene_id:K19M13.4~unknown protein [Arabidopsis
  misc_feature (56)..(216): Homolog of NCBI NO: 17017396 NR Description: HMG type nucleosome/chromatin assembly factor D
  misc_feature (2)..(215): Homolog of NCBI NO: 18420676 NR Description: expressed protein
  misc_feature (4)..(216): Homolog of NCBI NO: 38637289 NR Description: putative HMG type nucleosome/chromatin assembly
MATAGNAPRSRKRVEATVLKRARDGSAFTRCEACNKDVAIVLIDLHSCSLDSKIRLSLESQVVEKAVEIQEKKRKTPSAAAGGKGKKKSKADGDGAKKPKAKRPPTAFFLFMKDFRVEFKASHPDEKGVAAVGKAAGEKWKSMTEEEKKPYNDQAKELKAQFANGEGSAENNVGDEEKADADAEEVEDAEQEVDKPEDAPEDEEEEEEKNELDDDI

SEQ ID NO: 62564 - protein, 146 aa, Triticum aestivum
  peptide (1)..(146): Ceres Seq. ID no. 12615332
SSKESRSNHLPSPPLLPRGKRDPARSVQFHGDRRQRPPLPQARRGHRPQARARRKRLHPLRGVQQGRSHRPHRPAQLQPRLQDTPQPRVAGGGEGRRDPGEEEEDALRCRRRQGEEEEQGRRRWCQEAKGKAPTNCLLPLHEGLQG

SEQ ID NO: 62565 - DNA, 1129 bp, Triticum aestivum
  misc_feature (1)..(1129): Ceres Seq. ID no. 13596643
atcaaccattcatctattcatgtccaagctagaagaggcaatccatcggtgtgcgctgtaaagatctggggtgttggggtttggccacagactcatccagatggccttcgcagtctcggacgagctactgggcacgttcgtgcccatcgcggtgtactggctctactcggggctgtacatcgtgctggacgcgctggggacggccgactgctaccgcctccaccccaaggaggacgaggagacgaggaacataccctccaagcgcaccgtcctcaagggcgtcctcctccaacaggccgtccaggtcgccgtctccctcatcgtcttcaagatcaccggcgatggaagccacgacacgagggagcagcctccggcaccggtgatagcgctgcagttcgtcgtggcgatgttcgccatggacacgtggcaatacttcgtgcacaggtatctccacaccaacaagttcctgtacaagcacgtccacgcgcagcaccacaccatcctggtgccctacgccttcggggcgctctacagccacccgcttgagggcctgctcatggacacggccagcggcgccgtcggcttcctcgcgtccgggatgaccccccggaccgccatcttcttcatctcgttcggcgccatcaagaccgtcgacgaccactgtggcctctggctgcccggcaacgtcttccacgctgtcttcgccaacaacagcgccttccacaacatccaccaccagctctacggcaacaagcacaacttctcgcagcccttcttcgtcgtgtgggacaagatcctcggaacgtacatgcccttcacgctccagagccgtgagggtggaggggtagaggcgcgcccggttaagcacgcccttgcggcgcacgagcagcacaagtccgattgagcagctggtttggtttcccctgatatatatgcatgttcacttggcaagatatatagaacttcactacagccgtacgtgctcatgttctcgcactaataatgtggtttctcactatttatatgttgtgctcccttatgaatattatatcttgtgctccctataaaaaaaaaaaaaaaaaagcttatcgatatgtttaaacacaataaagttggaacgggagggggg

SEQ ID NO: 62566 - protein, 267 aa, Triticum aestivum
  peptide (1)..(267): Ceres Seq. ID no. 13596644
  misc_feature (5)..(75): Homolog of NCBI NO: 40746027 NR Description: hypothetical protein AN0640.2 [Aspergillus
  misc_feature (96)..(235): Homolog of NCBI NO: 40746027 NR Description: hypothetical protein AN0640.2 [Aspergillus
  misc_feature (38)..(202): Homolog of NCBI NO: 5360721 NR Description: acid phosphatase [Lupinus albus]
  misc_feature (1)..(96): Homolog of NCBI NO: 34911990 NR Description: P0694A04.28 [Oryza sativa (japonica
  misc_feature (95)..(258): Homolog of NCBI NO: 34911990 NR Description: P0694A04.28 [Oryza sativa (japonica
  misc_feature (10)..(255): Homolog of NCBI NO: 34913184 NR Description: similar to acid phosphatase
  misc_feature (1)..(255): Homolog of NCBI NO: 25511716 NR Description: F14L17.5 protein - Arabidopsis thaliana
  misc_feature (1)..(255): Homolog of NCBI NO: 18394095 NR Description: sterol desaturase domain-containing protein
  misc_feature (1)..(255): Homolog of NCBI NO: 25404823 NR Description: probable sterol desaturase T6C23.16
  misc_feature (1)..(255): Homolog of NCBI NO: 22330531 NR Description: acid phosphatase, putative [Arabidopsis thaliana]
MAFAVSDELLGTFVPIAVYWLYSGLYIVLDALGTADCYRLHPKEDEETRNIPSKRTVLKGVLLQQAVQVAVSLIVFKITGDGSHDTREQPPAPVIALQFVVAMFAMDTWQYFVHRYLHTNKFLYKHVHAQHHTILVPYAFGALYSHPLEGLLMDTASGAVGFLASGMTPRTAIFFISFGAIKTVDDHCGLWLPGNVFHAVFANNSAFHNIHHQLYGNKHNFSQPFFVVWDKILGTYMPFTLQSREGGGVEARPVKHALAAHEQHKSD

SEQ ID NO: 62567 - protein, 181 aa, Triticum aestivum
  peptide (1)..(181): Ceres Seq. ID no. 13596645
INHSSIHVQARRGNPSVCAVKIWGVGVWPQTHPDGLRSLGRATGHVRAHRGVLALLGAVHRAGRAGDGRLLPPPPQGGRGDEEHTLQAHRPQGRPPPTGRPGRRLPHRLQDHRRWKPRHEGAASGTGDSAAVRRGDVRHGHVAILRAQVSPHQQVPVQARPRAAPHHPGALRLRGALQPPA

SEQ ID NO: 62568 - protein, 165 aa, Triticum aestivum
  peptide (1)..(165): Ceres Seq. ID no. 13596646
  misc_feature (1)..(133): Homolog of NCBI NO: 37722567 NR Description: sphinganine hydroxylase [Pichia ciferrii]
  misc_feature (1)..(136): Homolog of NCBI NO: 19113281 NR Description: hypothetical integral membrane protein, putative
  misc_feature (1)..(133): Homolog of NCBI NO: 40746027 NR Description: hypothetical protein AN0640.2 [Aspergillus
  misc_feature (1)..(100): Homolog of NCBI NO: 5360721 NR Description: acid phosphatase [Lupinus albus]
  misc_feature (1)..(156): Homolog of NCBI NO: 34911990 NR Description: P0694A04.28 [Oryza sativa (japonica
  misc_feature (1)..(153): Homolog of NCBI NO: 34913184 NR Description: similar to acid phosphatase
  misc_feature (1)..(153): Homolog of NCBI NO: 25511716 NR Description: F14L17.5 protein - Arabidopsis thaliana
  misc_feature (1)..(153): Homolog of NCBI NO: 18394095 NR Description: sterol desaturase domain-containing protein
  misc_feature (1)..(153): Homolog of NCBI NO: 25404823 NR Description: probable sterol desaturase T6C23.16
  misc_feature (1)..(153): Homolog of NCBI NO: 22330531 NR Description: acid phosphatase, putative [Arabidopsis thaliana]
MFAMDTWQYFVHRYLHTNKFLYKHVHAQHHTILVPYAFGALYSHPLEGLLMDTASGAVGFLASGMTPRTAIFFISFGAIKTVDDHCGLWLPGNVFHAVFANNSAFHNIHHQLYGNKHNFSQPFFVVWDKILGTYMPFTLQSREGGGVEARPVKHALAAHEQHKSD

SEQ ID NO: 62569 - DNA, 530 bp, Triticum aestivum
  misc_feature (1)..(530): Ceres Seq. ID no. 13583396
aaaaaatcaacctcccagcacgaaccaacccaatccctgctacatagtcagtcagtctttgcaaccatgaggccacaggtgctgctcgccgcgctggccgtcgtcctcctcctcgcagcagctctgcccttcgcccacagccaaggtgcgaccccaagcgcgtcgctgtgctgcaacaactgcggcacctgcactaggtccatcccgcccaggtgtacgtgcatggatgcgtcgcccagcggctgcaacccgtcctgcaagacctgcgacaagaccaccgtcgccggccgtgacagcttccagtgcaaggaccgcgtcgcaaacttctgccagcgcagctgcactaagcccgcgtgactcgacctgttgtcgccagaataatgccgattagcttgttcttttcctttgtttttgcagtatttaagagttccctctgcatcttgctctggtagatgcagagaagaaatgagagttggatgcatgctcgttgttccttcttgtgtctgaaataaagagcatattctttgccc

SEQ ID NO: 62570 - protein, 118 aa, Triticum aestivum
  peptide (1)..(118): Ceres Seq. ID no. 13583397
  misc_feature (57)..(83): Pfam Name: Bowman-Birk serine protease inhibitor family Pfam Description: Bowman-Birk serine protease inhibitor family
  misc_feature (47)..(114): Homolog of NCBI NO: 124034 NR Description: BOWMAN-BIRK TYPE PROTEINASE INHIBITOR DE-4
  misc_feature (47)..(114): Homolog of NCBI NO: 28569584 NR Description: trypsin inhibitor [Vigna unguiculata subsp.
  misc_feature (47)..(114): Homolog of NCBI NO: 28569588 NR Description: trypsin inhibitor [Vigna unguiculata subsp.
  misc_feature (47)..(114): Homolog of NCBI NO: 28569586 NR Description: trypsin inhibitor [Vigna unguiculata subsp.
  misc_feature (47)..(114): Homolog of NCBI NO: 16555417 NR Description: trypsin proteinase inhibitor [Phaseolus vulgaris]
  misc_feature (47)..(114): Homolog of NCBI NO: 28569590 NR Description: trypsin inhibitor [Vigna unguiculata subsp.
  misc_feature (47)..(114): Homolog of NCBI NO: 100120 NR Description: proteinase inhibitor - cowpea
  misc_feature (46)..(114): Homolog of NCBI NO: 100119 NR Description: proteinase inhibitor - cowpea (fragments)
  misc_feature (47)..(118): Homolog of NCBI NO: 34897400 NR Description: putative Bowman-Birk serine protease inhibitor
  misc_feature (50)..(118): Homolog of NCBI NO: 14285484 NR Description: BOWMAN-BIRK TYPE TRYPSIN INHIBITOR (WTI)
KKSTSQHEPTQSLLHSQSVFATMRPQVLLAALAVVLLLAAALPFAHSQGATPSASLCCNNCGTCTRSIPPRCTCMDASPSGCNPSCKTCDKTTVAGRDSFQCKDRVANFCQRSCTKPA

SEQ ID NO: 62571 - protein, 96 aa, Triticum aestivum
  peptide (1)..(96): Ceres Seq. ID no. 13583398
  misc_feature (35)..(61): Pfam Name: Bowman-Birk serine protease inhibitor family Pfam Description: Bowman-Birk serine protease inhibitor family
  misc_feature (25)..(92): Homolog of NCBI NO: 124034 NR Description: BOWMAN-BIRK TYPE PROTEINASE INHIBITOR DE-4
  misc_feature (25)..(92): Homolog of NCBI NO: 28569584 NR Description: trypsin inhibitor [Vigna unguiculata subsp.
  misc_feature (25)..(92): Homolog of NCBI NO: 28569588 NR Description: trypsin inhibitor [Vigna unguiculata subsp.
  misc_feature (25)..(92): Homolog of NCBI NO: 28569586 NR Description: trypsin inhibitor [Vigna unguiculata subsp.
  misc_feature (25)..(92): Homolog of NCBI NO: 16555417 NR Description: trypsin proteinase inhibitor [Phaseolus vulgaris]
  misc_feature (25)..(92): Homolog of NCBI NO: 28569590 NR Description: trypsin inhibitor [Vigna unguiculata subsp.
  misc_feature (25)..(92): Homolog of NCBI NO: 100120 NR Description: proteinase inhibitor - cowpea
  misc_feature (24)..(92): Homolog of NCBI NO: 100119 NR Description: proteinase inhibitor - cowpea (fragments)
  misc_feature (25)..(96): Homolog of NCBI NO: 34897400 NR Description: putative Bowman-Birk serine protease inhibitor
  misc_feature (28)..(96): Homolog of NCBI NO: 14285484 NR Description: BOWMAN-BIRK TYPE TRYPSIN INHIBITOR (WTI)
MRPQVLLAALAVVLLLAAALPFAHSQGATPSASLCCNNCGTCTRSIPPRCTCMDASPSGCNPSCKTCDKTTVAGRDSFQCKDRVANFCQRSCTKPA

SEQ ID NO: 62572 - DNA, 1406 bp, Triticum aestivum
  misc_feature (1)..(1406): Ceres Seq. ID no. 13596519
actcctcacttcactcgcctcccgcgtcgcccgccgatcgagtgcacccacccaccacagtgccctgtgcccgaggccattccgtacgcactggagatggcgcgcaggagcggagtcttgtcgcgcttggccgtcgtcgtcgtcgcggcctactgcctcgccgcggcgacgcccggtgctgccgactggatgaggggctcggccacgttctacggagggagcaacgccgccggcaccatgggcggcgcttgcgggtacggcaacctgtactcgacggggtacgggacggacacggcggcgctgagcacgtccctcttcaacgacggggcggcgtgcggggagtgctaccaggtgcagtgcgaccagggcagctccccgaactgcaagccgggggtgacggtcaccatcaccgccaccaacctctgcccgacggactactccaagcccaacgacaacggcggctggtgcaacccgccgcgcaagcacctggacatggcgcagcccgcgtgggagcgcatcggcgtctaccgcgccggcatcgtgcccatcctgttccagcgggtgtcctgctccaggagcggcggcgtgcggttcaccatcaacggcaacagctacttcgagctggtgctcatcaccaacgtcggcgggccggggtcggtcagggcggtgcagatcaaggggtcccgcaccgggtggaccaccatgtcccggaactggggcgcgaactggcagtccaacagctacctcaacgggcagtccatctccttcgccgtcaccgccaccaacggccagaaggtggtcttccaggacgtggcgcccagcaactgggggttcggccagaccttcaccaactccggccagttctactagcgattcccgcgcgccgccgtgcgtgcgtgcgcgccggcgccggagcggtcgcctttcctttccgtttacgccttttcgatttcgcatttgggaagttaagtaagatttgcctcattctcatggatgggaagtggtaggtagtaggtagctaggtgccgcgcgtagggcggtttgcatggctgaggtgcctgatcgatcaattacccgccgtgcctgccgccttgcttgcgatgaccggctgatgtgctagctgaaatggcgccccgatcctcgctgcaaggcgcggactgtttactgttgaccaccgatccattgatgattttaatttatatagaatgtgatggccaaaatggggtggacatcgaagtgtgtggtctgaagtaaacgattaattggatcactacgttattacatgtgcgtaaagtgtccttagtcggagaatcaatgtactccctcactctatgaataagtgtacttccaccctttttttactaaaagaaaaaaaaaaaaaaaaaagcttatcgataccgtcgacc

SEQ ID NO: 62573 - protein, 334 aa, Triticum aestivum
  peptide (1)..(334): Ceres Seq. ID no. 13596520
SSLHSPPASPADRVHPPTTVPCARGHSVRTGDGAQERSLVALGRRRRRGLLPRRGDARCCRLDEGLGHVLRREQRRRHHGRRLRVRQPVLDGVRDGHGGAEHVPLQRRGGVRGVLPGAVRPGQLPELQAGGDGHHHRHQPLPDGLLQAQRQRRLVQPAAQAPGHGAARVGAHRRLPRRHRAHPVPAGVLLQERRRAVHHQRQQLLRAGAHHQRRRAGVGQGGADQGVPHRVDHHVPELGRELAVQQLPQRAVHLLRRHRHQRPEGGLPGRGAQQLGVRPDLHQLRPVLLAIPARRRACVRAGAGAVAFPFRLRLFDFAFGKLSKICLILMDGKW

SEQ ID NO: 62574 - protein, 289 aa, Triticum aestivum
  peptide (1)..(289): Ceres Seq. ID no. 13596521
  misc_feature (196)..(273): Pfam Name: Pollen allergen Pfam Description: Pollen allergen
  misc_feature (43)..(288): Homolog of NCBI NO: 4027891 NR Description: alpha-expansin precursor [Nicotiana tabacum]
  misc_feature (33)..(288): Homolog of NCBI NO: 7489469 NR Description: expansin - rice
  misc_feature (60)..(288): Homolog of NCBI NO: 4027895 NR Description: alpha-expansin precursor [Nicotiana tabacum]
  misc_feature (31)..(288): Homolog of NCBI NO: 14193755 NR Description: alpha-expansin 3 [Zea mays]
  misc_feature (45)..(289): Homolog of NCBI NO: 16517035 NR Description: alpha-expansin [Oryza sativa]
  misc_feature (36)..(289): Homolog of NCBI NO: 9967922 NR Description: expansin [Festuca pratensis]
TPHFTRLPRRPPIECTHPPQCPVPEAIPYALEMARRSGVLSRLAVVVVAAYCLAAATPGAADWMRGSATFYGGSNAAGTMGGACGYGNLYSTGYGTDTAALSTSLFNDGAACGECYQVQCDQGSSPNCKPGVTVTITATNLCPTDYSKPNDNGGWCNPPRKHLDMAQPAWERIGVYRAGIVPILFQRVSCSRSGGVRFTINGNSYFELVLITNVGGPGSVRAVQIKGSRTGWTTMSRNWGANWQSNSYLNGQSISFAVTATNGQKVVFQDVAPSNWGFGQTFTNSGQFY

SEQ ID NO: 62575 - protein, 257 aa, Triticum aestivum
  peptide (1)..(257): Ceres Seq. ID no. 13596522
  misc_feature (164)..(241): Pfam Name: Pollen allergen Pfam Description: Pollen allergen
  misc_feature (11)..(256): Homolog of NCBI NO: 4027891 NR Description: alpha-expansin precursor [Nicotiana tabacum]
  misc_feature (1)..(256): Homolog of NCBI NO: 7489469 NR Description: expansin - rice
  misc_feature (28)..(256): Homolog of NCBI NO: 4027895 NR Description: alpha-expansin precursor [Nicotiana tabacum]
  misc_feature (1)..(256): Homolog of NCBI NO: 14193755 NR Description: alpha-expansin 3 [Zea mays]
  misc_feature (13)..(257): Homolog of NCBI NO: 16517035 NR Description: alpha-expansin [Oryza sativa]
  misc_feature (4)..(257): Homolog of NCBI NO: 9967922 NR Description: expansin [Festuca pratensis]
MARRSGVLSRLAVVVVAAYCLAAATPGAADWMRGSATFYGGSNAAGTMGGACGYGNLYSTGYGTDTAALSTSLFNDGAACGECYQVQCDQGSSPNCKPGVTVTITATNLCPTDYSKPNDNGGWCNPPRKHLDMAQPAWERIGVYRAGIVPILFQRVSCSRSGGVRFTINGNSYFELVLITNVGGPGSVRAVQIKGSRTGWTTMSRNWGANWQSNSYLNGQSISFAVTATNGQKVVFQDVAPSNWGFGQTFTNSGQFY

SEQ ID NO: 62576 - DNA, 736 bp, Triticum aestivum
  misc_feature (1)..(736): Ceres Seq. ID no. 13598417
aaaggacaagagcgcaaaaccccaccacggaccctcgccgtcgctgtctccgtctcccatctcgccggcgctagctagggcaccggtcgccctccccctccgacgatgtcgacgccctctgatccagcggcgtccgcccagcccccctccaccgcggccacctccagcagcggcctcaccttcaagctccaccccctcgtcatcgtgaacgtctccgaccactacacccgcgtcaaggcccaggcctccttccccgccgaggccccgtcgccgggcaaggcgcaggcctcctgctccgccgaaggctccccgccccccgcggagccgccgagagtcttcgggtgcgtgatcggggtgcagcgcggccggacggtcgagatcttcaacagcttcgagctcgtcctcgaccccgtcaccggcacgctcgagcgcgccttcctggagaagaagctcgagctctataagaaggtgttccctgagttctatgtgttgggctggtactctactgggagcgatgtgcaggatactgacatcctaatccacaaggctctgatggacattaatgaaagccctgtttatcttctcttggatcctgcaatcaaccactcccagaaggatctacctgtgacaatttatgagagtgagttgcatgttatcgatgggggcccccagctcatctttgtcaaatcaaattacacaattgagactgtagaagcagagaggatatctgtagatc

SEQ ID NO: 62577 - protein, 210 aa, Triticum aestivum
  peptide (1)..(210): Ceres Seq. ID no. 13598418
  misc_feature (21)..(155): Pfam Name: Mov34/MPN/PAD-1 family Pfam Description: Mov34/MPN/PAD-1 family
  misc_feature (11)..(52): Homolog of NCBI NO: 27663420 NR Description: similar to COP9 complex subunit 6
  misc_feature (74)..(209): Homolog of NCBI NO: 27663420 NR Description: similar to COP9 complex subunit 6
  misc_feature (114)..(209): Homolog of NCBI NO: 19347926 NR Description: unknown protein [Arabidopsis thaliana]
  misc_feature (114)..(209): Homolog of NCBI NO: 28393281 NR Description: putative COP9 complex subunit 6 CSN6 [Arabidopsis
  misc_feature (17)..(209): Homolog of NCBI NO: 18416749 NR Description: COP9 signalosome subunit 6 (CSN6B), CSN complex
  misc_feature (17)..(209): Homolog of NCBI NO: 17940314 NR Description: COP9 signalosome subunit 6 [Arabidopsis thaliana]
  misc_feature (17)..(209): Homolog of NCBI NO: 7486780 NR Description: hypothetical protein M3E9.140 - Arabidopsis
  misc_feature (17)..(209): Homolog of NCBI NO: 18056665 NR Description: CSN complex subunit 6A [Arabidopsis thaliana]
  misc_feature (17)..(209): Homolog of NCBI NO: 18423847 NR Description: COP9 complex subunit 6 CSN6, putative
  misc_feature (17)..(209): Homolog of NCBI NO: 9758401 NR Description: transcription factor-like
MSTPSDPAASAQPPSTAATSSSGLTFKLHPLVIVNVSDHYTRVKAQASFPAEAPSPGKAQASCSAEGSPPPAEPPRVFGCVIGVQRGRTVEIFNSFELVLDPVTGTLERAFLEKKLELYKKVFPEFYVLGWYSTGSDVQDTDILIHKALMDINESPVYLLLDPAINHSQKDLPVTIYESELHVIDGGPQLIFVKSNYTIETVEAERISVD

SEQ ID NO: 62578 - DNA, 1444 bp, Triticum aestivum
  misc_feature (1)..(1444): Ceres Seq. ID no. 13596523
acaacaccacaattcactcctcttgctccgctcctctcctctcccgccggcgaccatggcgaaggccgcaacagcagcagcagcggcgcctctccacagcggcctcccggacgagatcgccatctgggagatcctcgtccgcctgccccccaaatcgctcctccgctgtcgcgccgtctgccgcgcctggcgcagcgccacctccgcccgcgacttcctcctcgcccaccacgcccgccagcccgccctccccctcgcctgcggcctggaagacgacggtggcagctgctactacctggcggcccagcaccagcccgtcgcccggcttgccaaggccttctatctgtgcgcctcctgcgacggcctcctcctcctctccaagcgcaaccagctctccatctgcaacccggccactcgtcagtatgctcccctgccggcgagttctgccttcattccgttgggaatgtaccggcaccgccccacaggcgagtaccgaatactgctgtacaaggaaattggtcttccagcgaccgacgggcaagatgcctgccacatcttcgcattgggctctgtccagccgccgaggagcatcgggtcgctgcaggaggcggagcaactgaggttcagcggggtacctgtcccgttccgcggtaacctgcattggcacctgaataagcattggtacctacaaaagtattggtacttgcccgagaatcatgagagcagaagcaacattataattgtattcgacaccacagccgagaggtttcgtgagatgtgtgctccggttgttcctgaccaccataaactgtttgagatggatggcatgctcggcatgtccagctttaacaatacatggccaatcattgatgtctggatgatgcaggagcaggactatgaaagtgaggtctggaccttgaaataccgagttgaattgtccaatgcagatcttctccttgtgcagtttggtcagtttgtcgattattggaatgtggtggtcgcctcttgtgatggcgctgtgcttgtgctggtcaagtttggcaagtctatacttcagtttgatattgatggcaagttggtcagttttcatcacaaagacctcttagttactcaacatcggctcaagcaaactcttgttccacataccttctttccgagactagatggtcattccgtgaatgcttggcctttcatctgagtggtgttgagtgagttggtccttcttagaggccaacctgtctttatccttgaagcctgcaatatgtatgaatttgatccaccatgagccctagcttctttatcgatgtaatgcaaagttatgatcaagaacctcctactgtaatatgattgcatgaaattcatatttctttggatatggttttgggctgaagtggctaacggacaagctgatgctaaaattaccaactctttaggttagtgtttg

SEQ ID NO: 62579 - protein, 398 aa, Triticum aestivum
  peptide (1)..(398): Ceres Seq. ID no. 13596524
  misc_feature (34)..(77): Pfam Name: F-box domain Pfam Description: F-box domain
  misc_feature (11)..(377): Homolog of NCBI NO: 33146635 NR Description: unknown protein [Oryza sativa (japonica
  misc_feature (153)..(398): Homolog of NCBI NO: 38346044 NR Description: OSJNBa0059D20.16 [Oryza sativa (japonica
  misc_feature (19)..(88): Homolog of NCBI NO: 38344215 NR Description: OSJNBb0026E15.3 [Oryza sativa (japonica
  misc_feature (108)..(300): Homolog of NCBI NO: 38344215 NR Description: OSJNBb0026E15.3 [Oryza sativa (japonica
  misc_feature (10)..(384): Homolog of NCBI NO: 37530720 NR Description: unknown protein [Oryza sativa (japonica
  misc_feature (34)..(384): Homolog of NCBI NO: 37533944 NR Description: hypothetical protein [Oryza sativa (japonica
  misc_feature (100)..(398): Homolog of NCBI NO: 38346045 NR Description: OSJNBa0059D20.17 [Oryza sativa (japonica
  misc_feature (19)..(361): Homolog of NCBI NO: 38346045 NR Description: OSJNBa0059D20.17 [Oryza sativa (japonica
  misc_feature (1)..(398): Homolog of NCBI NO: 38346527 NR Description: OSJNBa0040D17.2 [Oryza sativa (japonica
  misc_feature (23)..(398): Homolog of NCBI NO: 38346536 NR Description: OSJNBa0040D17.11 [Oryza sativa (japonica
QHHNSLLLLRSSPLPPATMAKAATAAAAAPLHSGLPDEIAIWEILVRLPPKSLLRCRAVCRAWRSATSARDFLLAHHARQPALPLACGLEDDGGSCYYLAAQHQPVARLAKAFYLCASCDGLLLLSKRNQLSICNPATRQYAPLPASSAFIPLGMYRHRPTGEYRILLYKEIGLPATDGQDACHIFALGSVQPPRSIGSLQEAEQLRFSGVPVPFRGNLHWHLNKHWYLQKYWYLPENHESRSNIIIVFDTTAERFREMCAPVVPDHHKLFEMDGMLGMSSFNNTWPIIDVWMMQEQDYESEVWTLKYRVELSNADLLLVQFGQFVDYWNVVVASCDGAVLVLVKFGKSILQFDIDGKLVSFHHKDLLVTQHRLKQTLVPHTFFPRLDGHSVNAWPFI

SEQ ID NO: 62580 - protein, 380 aa, Triticum aestivum
  peptide (1)..(380): Ceres Seq. ID no. 13596525
  misc_feature (16)..(59): Pfam Name: F-box domain Pfam Description: F-box domain
  misc_feature (1)..(359): Homolog of NCBI NO: 33146635 NR Description: unknown protein [Oryza sativa (japonica
  misc_feature (135)..(380): Homolog of NCBI NO: 38346044 NR Description: OSJNBa0059D20.16 [Oryza sativa (japonica
  misc_feature (1)..(70): Homolog of NCBI NO: 38344215 NR Description: OSJNBb0026E15.3 [Oryza sativa (japonica
  misc_feature (90)..(282): Homolog of NCBI NO: 38344215 NR Description: OSJNBb0026E15.3 [Oryza sativa (japonica
  misc_feature (1)..(366): Homolog of NCBI NO: 37530720 NR Description: unknown protein [Oryza sativa (japonica
  misc_feature (16)..(366): Homolog of NCBI NO: 37533944 NR Description: hypothetical protein [Oryza sativa (japonica
  misc_feature (82)..(380): Homolog of NCBI NO: 38346045 NR Description: OSJNBa0059D20.17 [Oryza sativa (japonica
  misc_feature (1)..(343): Homolog of NCBI NO: 38346045 NR Description: OSJNBa0059D20.17 [Oryza sativa (japonica
  misc_feature (1)..(380): Homolog of NCBI NO: 38346527 NR Description: OSJNBa0040D17.2 [Oryza sativa (japonica
  misc_feature (5)..(380): Homolog of NCBI NO: 38346536 NR Description: OSJNBa0040D17.11 [Oryza sativa (japonica
MAKAATAAAAAPLHSGLPDEIAIWEILVRLPPKSLLRCRAVCRAWRSATSARDFLLAHHARQPALPLACGLEDDGGSCYYLAAQHQPVARLAKAFYLCASCDGLLLLSKRNQLSICNPATRQYAPLPASSAFIPLGMYRHRPTGEYRILLYKEIGLPATDGQDACHIFALGSVQPPRSIGSLQEAEQLRFSGVPVPFRGNLHWHLNKHWYLQKYWYLPENHESRSNIIIVFDTTAERFREMCAPVVPDHHKLFEMDGMLGMSSFNNTWPIIDVWMMQEQDYESEVWTLKYRVELSNADLLLVQFGQFVDYWNVVVASCDGAVLVLVKFGKSILQFDIDGKLVSFHHKDLLVTQHRLKQTLVPHTFFPRLDGHSVNAWPFI

SEQ ID NO: 62581 - protein, 244 aa, Triticum aestivum
  peptide (1)..(244): Ceres Seq. ID no. 13596526
  misc_feature (1)..(168): Homolog of NCBI NO: 34900696 NR Description: hypothetical protein~predicted by FGENESH etc.
  misc_feature (1)..(223): Homolog of NCBI NO: 33146635 NR Description: unknown protein [Oryza sativa (japonica
  misc_feature (1)..(244): Homolog of NCBI NO: 38346044 NR Description: OSJNBa0059D20.16 [Oryza sativa (japonica
  misc_feature (1)..(146): Homolog of NCBI NO: 38344215 NR Description: OSJNBb0026E15.3 [Oryza sativa (japonica
  misc_feature (1)..(230): Homolog of NCBI NO: 37530720 NR Description: unknown protein [Oryza sativa (japonica
  misc_feature (1)..(230): Homolog of NCBI NO: 37533944 NR Description: hypothetical protein [Oryza sativa (japonica
  misc_feature (1)..(244): Homolog of NCBI NO: 38346045 NR Description: OSJNBa0059D20.17 [Oryza sativa (japonica
  misc_feature (1)..(207): Homolog of NCBI NO: 38346045 NR Description: OSJNBa0059D20.17 [Oryza sativa (japonica
  misc_feature (1)..(244): Homolog of NCBI NO: 38346527 NR Description: OSJNBa0040D17.2 [Oryza sativa (japonica
  misc_feature (1)..(244): Homolog of NCBI NO: 38346536 NR Description: OSJNBa0040D17.11 [Oryza sativa (japonica
MYRHRPTGEYRILLYKEIGLPATDGQDACHIFALGSVQPPRSIGSLQEAEQLRFSGVPVPFRGNLHWHLNKHWYLQKYWYLPENHESRSNIIIVFDTTAERFREMCAPVVPDHHKLFEMDGMLGMSSFNNTWPIIDVWMMQEQDYESEVWTLKYRVELSNADLLLVQFGQFVDYWNVVVASCDGAVLVLVKFGKSILQFDIDGKLVSFHHKDLLVTQHRLKQTLVPHTFFPRLDGHSVNAWPFI

SEQ ID NO: 62582 - DNA, 594 bp, Triticum aestivum
  misc_feature (1)..(594): Ceres Seq. ID no. 13596527
atcaacccatccatccaccgagcgatcggcactcccactctaagagctccgagccagccaacaatggcgtcctctccgctgctcgtggcgcttgtgatggtctcggcgtgcttcctggccgtgtccggccagaagttcaacgccatctacagcttcggcgactccatgtcggacaccggcaacctctgcgtcaacgggccccccgccggcctcaccctcacccagcccccctacggcgagaccttctttggccgtgccacctgccgctgctccgacggccgcctcgtcgtcgacttcctcgccgagaagttcgggctgccgctgctgaagccgtcgaagcagggcggcgcggacttcaagcagggcgccaacatggccatcatcggcgccaccgccatgggctccagcttcttccagtcgctcggcgtcggcgacaagatctggaacaacgggcccctcgacacccagatccagtggttccagaacctcctcccctccgtctgcggctcatcgtgcaagacgtacctgtccaagtccctgttcgtgctgggcgagctgggcgggaacgactacaacgcgcagctcttcggcggc

SEQ ID NO: 62583 - protein, 198 aa, Triticum aestivum
  peptide (1)..(198): Ceres Seq. ID no. 13596528
  misc_feature (49)..(197): Pfam Name: GDSL-like Lipase/Acylhydrolase Pfam Description: GDSL-like Lipase/Acylhydrolase
  misc_feature (27)..(197): Homolog of NCBI NO: 34911800 NR Description: lipase-like protein [Oryza sativa (japonica
  misc_feature (27)..(197): Homolog of NCBI NO: 34903962 NR Description: OSJNBa0038J17.26 [Oryza sativa (japonica
  misc_feature (27)..(191): Homolog of NCBI NO: 34903986 NR Description: unnamed protein product [Oryza sativa (japonica
  misc_feature (43)..(197): Homolog of NCBI NO: 34912612 NR Description: P0046B10.23 [Oryza sativa (japonica
  misc_feature (45)..(195): Homolog of NCBI NO: 21553708 NR Description: GDSL-motif lipase/hydrolase-like protein
  misc_feature (45)..(195): Homolog of NCBI NO: 15242538 NR Description: GDSL-motif lipase/hydrolase protein [Arabidopsis
  misc_feature (44)..(171): Homolog of NCBI NO: 34898072 NR Description: Similar to putative lipase (AC006232)
  misc_feature (30)..(197): Homolog of NCBI NO: 34903978 NR Description: unnamed protein product [Oryza sativa (japonica
  misc_feature (21)..(196): Homolog of NCBI NO: 34903958 NR Description: OSJNBa0038J17.24 [Oryza sativa (japonica
  misc_feature (27)..(197): Homolog of NCBI NO: 34903956 NR Description: OSJNBa0038J17.23 [Oryza sativa (japonica
INPSIHRAIGTPTLRAPSQPTMASSPLLVALVMVSACFLAVSGQKFNAIYSFGDSMSDTGNLCVNGPPAGLTLTQPPYGETFFGRATCRCSDGRLVVDFLAEKFGLPLLKPSKQGGADFKQGANMAIIGATAMGSSFFQSLGVGDKIWNNGPLDTQIQWFQNLLPSVCGSSCKTYLSKSLFVLGELGGNDYNAQLFGG

SEQ ID NO: 62584 - protein, 197 aa, Triticum aestivum
  peptide (1)..(197): Ceres Seq. ID no. 13596529
QPIHPPSDRHSHSKSSEPANNGVLSAARGACDGLGVLPGRVRPEVQRHLQLRRLHVGHRQPLRQRAPRRPHPHPAPLRRDLLWPCHLPLLRRPPRRRLPRREVRAAAAEAVEAGRRGLQAGRQHGHHRRHRHGLQLLPVARRRRQDLEQRAPRHPDPVVPEPPPLRLRLIVQDVPVQVPVRAGRAGRERLQRAALRR

SEQ ID NO: 62585 - protein, 177 aa, Triticum aestivum
  peptide (1)..(177): Ceres Seq. ID no. 13596530
  misc_feature (28)..(176): Pfam Name: GDSL-like Lipase/Acylhydrolase Pfam Description: GDSL-like Lipase/Acylhydrolase
  misc_feature (6)..(176): Homolog of NCBI NO: 34911800 NR Description: lipase-like protein [Oryza sativa (japonica
  misc_feature (6)..(176): Homolog of NCBI NO: 34903962 NR Description: OSJNBa0038J17.26 [Oryza sativa (japonica
  misc_feature (6)..(170): Homolog of NCBI NO: 34903986 NR Description: unnamed protein product [Oryza sativa (japonica
  misc_feature (22)..(176): Homolog of NCBI NO: 34912612 NR Description: P0046B10.23 [Oryza sativa (japonica
  misc_feature (24)..(174): Homolog of NCBI NO: 21553708 NR Description: GDSL-motif lipase/hydrolase-like protein
  misc_feature (24)..(174): Homolog of NCBI NO: 15242538 NR Description: GDSL-motif lipase/hydrolase protein [Arabidopsis
  misc_feature (23)..(150): Homolog of NCBI NO: 34898072 NR Description: Similar to putative lipase (AC006232)
  misc_feature (9)..(176): Homolog of NCBI NO: 34903978 NR Description: unnamed protein product [Oryza sativa (japonica
  misc_feature (1)..(175): Homolog of NCBI NO: 34903958 NR Description: OSJNBa0038J17.24 [Oryza sativa (japonica
  misc_feature (6)..(176): Homolog of NCBI NO: 34903956 NR Description: OSJNBa0038J17.23 [Oryza sativa (japonica
MASSPLLVALVMVSACFLAVSGQKFNAIYSFGDSMSDTGNLCVNGPPAGLTLTQPPYGETFFGRATCRCSDGRLVVDFLAEKFGLPLLKPSKQGGADFKQGANMAIIGATAMGSSFFQSLGVGDKIWNNGPLDTQIQWFQNLLPSVCGSSCKTYLSKSLFVLGELGGNDYNAQLFGG

SEQ ID NO: 62586 - DNA, 648 bp, Triticum aestivum
  misc_feature (1)..(648): Ceres Seq. ID no. 13662489
gtccacgtgtacacaaacgggactgtgtgtgatctcacagatataccacggtacacagaggttaggtttgtttgttccgagcccactgtactgatcagttcgataaaggagatatcttcctgcaagtatgttttaactgtccaaagcccaatgctctgcaagaacccgttgtttcagcaggaaaagcgcaccttcttcatccactgcaacgagtcgcttgcggaagcagaagctgaggccgccgaggacgacgactctctcccaaaagaagctcagatgtccatcgttccaaaccccgacgaattgcataactacgcagcttacgctacctgattgcccgccaatcacggtgccctcagctgatgaaagatgccgttattttggaagtacaacagcaagttggcaacatagtataactatcccctggcttgttctgtctgacgccaactagtggttacagggtactctttgagcagatatccattactgaaacagcttgagattaccttagaggaagattaagggcaaagagtgtcctgctgtactgtagtggtatataatttagtaaagggggtatttgagattcagtggcaggctttagacacatcaccaacaattttcctcttgaaatgttcataaaaacagtgc

SEQ ID NO: 62587 - protein, 110 aa, Triticum aestivum
  peptide (1)..(110): Ceres Seq. ID no. 13662490
  misc_feature (4)..(71): Homolog of NCBI NO: 28850402 NR Description: similar to Arabidopsis thaliana (Mouse-ear
  misc_feature (2)..(56): Homolog of NCBI NO: 7487985 NR Description: hypothetical protein F7N22.4 - Arabidopsis
  misc_feature (2)..(93): Homolog of NCBI NO: 21592392 NR Description: unknown [Arabidopsis thaliana]
  misc_feature (2)..(93): Homolog of NCBI NO: 18421420 NR Description: expressed protein [Arabidopsis thaliana]
VHVYTNGTVCDLTDIPRYTEVRFVCSEPTVLISSIKEISSCKYVLTVQSPMLCKNPLFQQEKRTFFIHCNESLAEAEAEAAEDDDSLPKEAQMSIVPNPDELHNYAAYAT

SEQ ID NO: 62588 - protein, 60 aa, Triticum aestivum
  peptide (1)..(60): Ceres Seq. ID no. 13662491
  misc_feature (1)..(21): Homolog of NCBI NO: 28850402 NR Description: similar to Arabidopsis thaliana (Mouse-ear
  misc_feature (1)..(43): Homolog of NCBI NO: 21592392 NR Description: unknown [Arabidopsis thaliana]
  misc_feature (1)..(43): Homolog of NCBI NO: 18421420 NR Description: expressed protein [Arabidopsis thaliana]
MLCKNPLFQQEKRTFFIHCNESLAEAEAEAAEDDDSLPKEAQMSIVPNPDELHNYAAYAT

SEQ ID NO: 62589 - DNA, 781 bp, Triticum aestivum
  misc_feature (1)..(781): Ceres Seq. ID no. 12584717
aacaactaagagtcgcatcttaatcttagataccttaatctcttagctccagcaatggcttcacatgcatccgcttttaggacaaacatcctactcgccgccgttttagccgtgttcgtcctgccatccttagcttgtcggaaggctcgagctccggccccggctccggctctgtctccggccccggctctgtctccggctctggctccggccccgggtccggcgcccatgatactgtgccaggattgtgactcgcggtgtcagtcggcttcgatgtgcgacgcctacgttgccgcggcgggatgcggaaatgcctgcagcggcgcgacaccggactgcgaaccctgcatgtccgagatccaccagtcctgcccggccgcctgcaacgagggctgcaccaggaactgcgttggccagtgcgactgcgccggctcatgcagccaagcctgcgccgaaggcgcccggcgtacatgtcagtacaagtgtgtctactcctactacgcggtcaaatcatgccacgaatgccaggacagtgcacgcacgcggtgcaccgatgcctgcaacaccgactgcaaggccaactgtgtcagcggctgatccataatcctagtaggcccaacttatgttgtactccaactatgtatatgaataagatatcagagtatgcagcggtatatggtcattgcgcacgtatgcctgctgtttttgtacatctatagatgtattactatctgtatacttccatggatggcatatggtcaatgcaggtgtacctgctgct

SEQ ID NO: 62590 - protein, 180 aa, Triticum aestivum
  peptide (1)..(180): Ceres Seq. ID no. 12584718
  misc_feature (56)..(179): Pfam Name: Keratin, high sulfur B2 protein Pfam Description: Keratin, high sulfur B2 protein
  misc_feature (24)..(85): Homolog of NCBI NO: 39589927 NR Description: Hypothetical protein CBG04647 [Caenorhabditis
  misc_feature (1)..(58): Homolog of NCBI NO: 10945166 NR Description: TapA protein [Acidithiobacillus ferrooxidans]
MASHASAFRTNILLAAVLAVFVLPSLACRKARAPAPAPALSPAPALSPALAPAPGPAPMILCQDCDSRCQSASMCDAYVAAAGCGNACSGATPDCEPCMSEIHQSCPAACNEGCTRNCVGQCDCAGSCSQACAEGARRTCQYKCVYSYYAVKSCHECQDSARTRCTDACNTDCKANCVSG

SEQ ID NO: 62591 - protein, 138 aa, Triticum aestivum
  peptide (1)..(138): Ceres Seq. ID no. 12584719
MRKCLQRRDTGLRTLHVRDPPVLPGRLQRGLHQELRWPVRLRRLMQPSLRRRRPAYMSVQVCLLLLRGQIMPRMPGQCTHAVHRCLQHRLQGQLCQRLIHNPSRPNLCCTPTMYMNKISEYAAVYGHCARMPAVFVHL

SEQ ID NO: 62592 - protein, 122 aa, Triticum aestivum
  peptide (1)..(122): Ceres Seq. ID no. 12584720
  misc_feature (1)..(121): Pfam Name: Keratin, high sulfur B2 protein Pfam Description: Keratin, high sulfur B2 protein
  misc_feature (1)..(27): Homolog of NCBI NO: 39589927 NR Description: Hypothetical protein CBG04647 [Caenorhabditis
MILCQDCDSRCQSASMCDAYVAAAGCGNACSGATPDCEPCMSEIHQSCPAACNEGCTRNCVGQCDCAGSCSQACAEGARRTCQYKCVYSYYAVKSCHECQDSARTRCTDACNTDCKANCVSG

SEQ ID NO: 62593 - DNA, 1237 bp, Triticum aestivum
  misc_feature (1)..(1237): Ceres Seq. ID no. 12615444
acccctattccccatccctacgcccgcctcctcctcctcctccgcatcccattctcccccaaatcggccgagtaaaccctagctaaaccccgacctccgccgccggcgagcgagatgaacttcaagggcgcgcggatgccgagcgcgccggcgggcgcgggcgcgctggtcaagctcgggctgctcggcggcgccgcgctctacctcggcaacaagaccctctacaacgtcgagggaggccaccgggccatcgtcttcaaccgcctcgaggggatcaaggacaaggtctaccccgaggggactcacatcgtcatcccgtggttcgagaggcccatcatctacgacgtccgcgcgcgacccaacctcgtcgagagcacctccgggagccgggatctccagatggtgagaattggtcttcgtgttcttacacgacccatgccagagagactaccaactatgtacaggaccctgggggagaactacaatgagagagtgttgccttcgatcattcatgaaacactcaaagctgtggttgcccaatacaatgccagtcagctaatcacacagagagaggctgtgagcagggagatcaggaagattctgacagagagggcgaagaacttcaacatcgctctggatgatgtgtccattaccagtctaagctttggtaaagagttcactcatgccattgaagccaaacaggttgctgctcaggaagctgagcgtgccaagttcattgttgagaaggctgagcaagacaagaaaagtgcaattatcagggcacagggagaggcaaagagtgcagagctgattggcaatgccatcgccaacaaccctgctttcgtggcgctcaggcagattgaagccgccagggagatcgcccacaccattgcagcctccaacaacaaggtgttccttgactcgggtgacctgctgcttgggctccagtcgctcaagatgttgaacaacaacaacaagaaatgagaccgtctctgtcacgcatgttgtggttgccgccagtcttgtctacattggaagaagagtacttttgagaggaacgaacgcttagtttctagcattcccgacccgaaaacaagaaagacgcccttgctactgtgaattatttgtgcacttttcaagtgaacctgtcagctgctaccgctgtgcgtagcttataacgtctgggcggttatgtggtgattatattggccttttcatgttcatcttggcttgttcc

SEQ ID NO: 62594 - protein, 289 aa, Triticum aestivum
  peptide (1)..(289): Ceres Seq. ID no. 12615445
  misc_feature (1)..(282): Homolog of NCBI NO: 15225374 NR Description: putative prohibitin
  misc_feature (1)..(282): Homolog of NCBI NO: 15219569 NR Description: putative prohibitin 2
  misc_feature (7)..(282): Homolog of NCBI NO: 21593626 NR Description: prohibitin-like protein [Arabidopsis thaliana]
  misc_feature (7)..(282): Homolog of NCBI NO: 15235317 NR Description: prohibitin-like protein
  misc_feature (1)..(289): Homolog of NCBI NO: 12751303 NR Description: prohibitin 1-like protein [Brassica napus]
  misc_feature (1)..(288): Homolog of NCBI NO: 7716456 NR Description: prohibitin [Zea mays]
  misc_feature (2)..(288): Homolog of NCBI NO: 7716462 NR Description: prohibitin [Zea mays]
  misc_feature (1)..(58): Homolog of NCBI NO: 34901014 NR Description: putative prohibitin [Oryza sativa (japonica
  misc_feature (57)..(288): Homolog of NCBI NO: 34901014 NR Description: putative prohibitin [Oryza sativa (japonica
  misc_feature (1)..(288): Homolog of NCBI NO: 34394832 NR Description: putative prohibitin [Oryza sativa (japonica
MNFKGARMPSAPAGAGALVKLGLLGGAALYLGNKTLYNVEGGHRAIVFNRLEGIKDKVYPEGTHIVIPWFERPIIYDVRARPNLVESTSGSRDLQMVRIGLRVLTRPMPERLPTMYRTLGENYNERVLPSIIHETLKAVVAQYNASQLITQREAVSREIRKILTERAKNFNIALDDVSITSLSFGKEFTHAIEAKQVAAQEAERAKFIVEKAEQDKKSAIIRAQGEAKSAELIGNAIANNPAFVALRQIEAAREIAHTIAASNNKVFLDSGDLLLGLQSLKMLNNNNKK

SEQ ID NO: 62595 - protein, 282 aa, Triticum aestivum
  peptide (1)..(282): Ceres Seq. ID no. 12615446
  misc_feature (1)..(275): Homolog of NCBI NO: 15225374 NR Description: putative prohibitin
  misc_feature (1)..(275): Homolog of NCBI NO: 15219569 NR Description: putative prohibitin 2
  misc_feature (1)..(275): Homolog of NCBI NO: 21593626 NR Description: prohibitin-like protein [Arabidopsis thaliana]
  misc_feature (1)..(275): Homolog of NCBI NO: 15235317 NR Description: prohibitin-like protein
  misc_feature (1)..(282): Homolog of NCBI NO: 12751303 NR Description: prohibitin 1-like protein [Brassica napus]
  misc_feature (1)..(281): Homolog of NCBI NO: 7716456 NR Description: prohibitin [Zea mays]
  misc_feature (1)..(281): Homolog of NCBI NO: 7716462 NR Description: prohibitin [Zea mays]
  misc_feature (1)..(51): Homolog of NCBI NO: 34901014 NR Description: putative prohibitin [Oryza sativa (japonica
  misc_feature (50)..(281): Homolog of NCBI NO: 34901014 NR Description: putative prohibitin [Oryza sativa (japonica
  misc_feature (1)..(281): Homolog of NCBI NO: 34394832 NR Description: putative prohibitin [Oryza sativa (japonica
MPSAPAGAGALVKLGLLGGAALYLGNKTLYNVEGGHRAIVFNRLEGIKDKVYPEGTHIVIPWFERPIIYDVRARPNLVESTSGSRDLQMVRIGLRVLTRPMPERLPTMYRTLGENYNERVLPSIIHETLKAVVAQYNASQLITQREAVSREIRKILTERAKNFNIALDDVSITSLSFGKEFTHAIEAKQVAAQEAERAKFIVEKAEQDKKSAIIRAQGEAKSAELIGNAIANNPAFVALRQIEAAREIAHTIAASNNKVFLDSGDLLLGLQSLKMLNNNNKK

SEQ ID NO: 62596 - protein, 194 aa, Triticum aestivum
  peptide (1)..(194): Ceres Seq. ID no. 12615447
  misc_feature (1)..(183): Homolog of NCBI NO: 15241424 NR Description: prohibitin; protein id: At5g44140.1 [Arabidopsis
  misc_feature (1)..(187): Homolog of NCBI NO: 15225374 NR Description: putative prohibitin
  misc_feature (1)..(187): Homolog of NCBI NO: 15219569 NR Description: putative prohibitin 2
  misc_feature (1)..(187): Homolog of NCBI NO: 21593626 NR Description: prohibitin-like protein [Arabidopsis thaliana]
  misc_feature (1)..(187): Homolog of NCBI NO: 15235317 NR Description: prohibitin-like protein
  misc_feature (1)..(194): Homolog of NCBI NO: 12751303 NR Description: prohibitin 1-like protein [Brassica napus]
  misc_feature (1)..(193): Homolog of NCBI NO: 7716456 NR Description: prohibitin [Zea mays]
  misc_feature (1)..(193): Homolog of NCBI NO: 7716462 NR Description: prohibitin [Zea mays]
  misc_feature (1)..(193): Homolog of NCBI NO: 34901014 NR Description: putative prohibitin [Oryza sativa (japonica
  misc_feature (1)..(193): Homolog of NCBI NO: 34394832 NR Description: putative prohibitin [Oryza sativa (japonica
MVRIGLRVLTRPMPERLPTMYRTLGENYNERVLPSIIHETLKAVVAQYNASQLITQREAVSREIRKILTERAKNFNIALDDVSITSLSFGKEFTHAIEAKQVAAQEAERAKFIVEKAEQDKKSAIIRAQGEAKSAELIGNAIANNPAFVALRQIEAAREIAHTIAASNNKVFLDSGDLLLGLQSLKMLNNNNKK

SEQ ID NO: 62597 - DNA, 1296 bp, Triticum aestivum
  misc_feature (1)..(1296): Ceres Seq. ID no. 12624901
accagtcaccacaccacactcccccagatcggcttccgttgcgagacggaccgccccccgctttatttccgccaccaccgacgccgcgccggcgaaggagcccctcgccagatcggatccctccgccgcgacgcaacatggcggctctgctgatgcgcaggctcgccgggacctaccgcggccgcgcgccgctggccgccgccgccgttggcggggccgcgttcttctacgcctcgtcgaaccccaccgtcgcgcacatggaggagaagggggaggacgccgctgccaaagttgctcttaaccctgagaaatggttagaattcaagctccaggagaaggcaacagttagtcatgattcagagctattcagattttcgtttgacccatctactaagctgggcctggatgttgcctcatgtctcgtaacaagggcccccataggtcaggaagtggagggaaaaagaaaatacgttattcgcccgtacacacctatctctgacccagattctaaaggatatttcgacctattaatcaaggtttatcccgaagggaaaatgtctcagcattttgctaatttgaagccaggagatgttctcgaagtcaaagggcccattgaaaagctcagatatagcccaaatatgaaaagacaaattggcatggttgctggtggtactggcataacgccaatgctgcaagttgttagggccatcctgaaaaaccccgatgacaacactcaggtttccttgatctacgccaatgtgtcaccagatgatatcttgctgaaaaaggagttagatagacttgccagcagctatcctaatttcaaggtattttatacagtcgataaaccatcaagtgactggaggggtggtgctggctacatatcaaaggacatggttttgaaaggtttgccaggcccaggggaggattctcttattcttgtttgtggtcctcctggaatgatgaatcacatatctggagataaggcaaaggattattcacagggcgaggtcacgggccttctcaaagatttaggatacacggcagatatggtatacaaattttgagtcgatcacggaaacgtaggggaccctgacatgcccgctgcctgccatggcagtaaaataaaccgcagctgaacctttttttcttgtcgcgccacggcaattagtgccaaactcagaacagtatggtgcatcattttgtaagaatttcggttcggttccgttttgtcatctgtgcgcgctgcatggacacctgaataacctgacgccgcctggttggcggtgttgtttt

SEQ ID NO: 62598 - protein, 354 aa, Triticum aestivum
  peptide (1)..(354): Ceres Seq. ID no. 12624902
  misc_feature (214)..(316): Pfam Name: Oxidoreductase NAD-binding domain Pfam Description: Oxidoreductase NAD-binding domain
  misc_feature (337)..(354): Homolog of NCBI NO: 34910260 NR Description: putative cytochrome b5 reductase
  misc_feature (46)..(316): Homolog of NCBI NO: 34910260 NR Description: putative cytochrome b5 reductase
  misc_feature (55)..(354): Homolog of NCBI NO: 18420117 NR Description: cytochrome-b5 reductase - like protein
QSPHHTPPDRLPLRDGPPPALFPPPPTPRRRRSPSPDRIPPPRRNMAALLMRRLAGTYRGRAPLAAAAVGGAAFFYASSNPTVAHMEEKGEDAAAKVALNPEKWLEFKLQEKATVSHDSELFRFSFDPSTKLGLDVASCLVTRAPIGQEVEGKRKYVIRPYTPISDPDSKGYFDLLIKVYPEGKMSQHFANLKPGDVLEVKGPIEKLRYSPNMKRQIGMVAGGTGITPMLQVVRAILKNPDDNTQVSLIYANVSPDDILLKKELDRLASSYPNFKVFYTVDKPSSDWRGGAGYISKDMVLKGLPGPGEDSLILVCGPPGMMNHISGDKAKDYSQGEVTGLLKDLGYTADMVYKF

SEQ ID NO: 62599 - protein, 309 aa, Triticum aestivum
  peptide (1)..(309): Ceres Seq. ID no. 12624903
  misc_feature (169)..(271): Pfam Name: Oxidoreductase NAD-binding domain Pfam Description: Oxidoreductase NAD-binding domain
  misc_feature (292)..(309): Homolog of NCBI NO: 34910260 NR Description: putative cytochrome b5 reductase
  misc_feature (1)..(271): Homolog of NCBI NO: 34910260 NR Description: putative cytochrome b5 reductase
  misc_feature (10)..(309): Homolog of NCBI NO: 18420117 NR Description: cytochrome-b5 reductase - like protein
MAALLMRRLAGTYRGRAPLAAAAVGGAAFFYASSNPTVAHMEEKGEDAAAKVALNPEKWLEFKLQEKATVSHDSELFRFSFDPSTKLGLDVASCLVTRAPIGQEVEGKRKYVIRPYTPISDPDSKGYFDLLIKVYPEGKMSQHFANLKPGDVLEVKGPIEKLRYSPNMKRQIGMVAGGTGITPMLQVVRAILKNPDDNTQVSLIYANVSPDDILLKKELDRLASSYPNFKVFYTVDKPSSDWRGGAGYISKDMVLKGLPGPGEDSLILVCGPPGMMNHISGDKAKDYSQGEVTGLLKDLGYTADMVYKF

SEQ ID NO: 62600 - protein, 304 aa, Triticum aestivum
  peptide (1)..(304): Ceres Seq. ID no. 12624904
  misc_feature (164)..(266): Pfam Name: Oxidoreductase NAD-binding domain Pfam Description: Oxidoreductase NAD-binding domain
  misc_feature (287)..(304): Homolog of NCBI NO: 34910260 NR Description: putative cytochrome b5 reductase
  misc_feature (1)..(266): Homolog of NCBI NO: 34910260 NR Description: putative cytochrome b5 reductase
  misc_feature (5)..(304): Homolog of NCBI NO: 18420117 NR Description: cytochrome-b5 reductase - like protein
MRRLAGTYRGRAPLAAAAVGGAAFFYASSNPTVAHMEEKGEDAAAKVALNPEKWLEFKLQEKATVSHDSELFRFSFDPSTKLGLDVASCLVTRAPIGQEVEGKRKYVIRPYTPISDPDSKGYFDLLIKVYPEGKMSQHFANLKPGDVLEVKGPIEKLRYSPNMKRQIGMVAGGTGITPMLQVVRAILKNPDDNTQVSLIYANVSPDDILLKKELDRLASSYPNFKVFYTVDKPSSDWRGGAGYISKDMVLKGLPGPGEDSLILVCGPPGMMNHISGDKAKDYSQGEVTGLLKDLGYTADMVYKF

SEQ ID NO: 62601 - DNA, 1632 bp, Triticum aestivum
  misc_feature (1)..(1632): Ceres Seq. ID no. 14308041
atcgatccaagctgccatggccgcggttctcccgatctgcctgcttctcgtgcttctcctcgccatcccgctcatcctcttcaagtccaggcgcccggcgcctcatcgtggccccggtggcagggccgtgcggctcccgccagggccatgggcgctcccggtcatcggtcacctgcaccatctcgccggcgcccttccgcaccgtgctctgcgcgacctcgcgcggcgccacggcccgctcatgatgctccgcctcggcgagctcgacgccgtggtcgcgtcgtcccctgacgccgcgcgcgagatcatgaagacccacgacgcttccttcgcgtccaggcctctgacgtcgatgcagcagatggcgtacggcgacgccgagggcctcatcttcgcgccctacggcgacgcatggcggcagcttcgcaagatatgcactgtcgagatcttcagctcccgccgcgtccagtccttccgccccgcccgcgaggaggagctcggtcacctcctccgctccgtcgcggcggcttctgcctcgtcttcgccggtgaacctgagcgagcgcatatcggcgtacgtcgcggattctacggtgcgcgccatcgtcggcagccggttcaagcagagggacacgtacctggagatgctgcaagagggactcaaaatcgtgcccgggatgacccttcccgacattttcccctcctcgcgtctcgtgcggctccttagcagcgtccccggcaggatacagcgccatagccaagacatgaagctgttcatggacaccatcatccaagagcaccaggtgaacagcggccccgactgcgacggcgacaaagaagaagacttgctcgacgtgctcctgagactccaaaaggaaggggactcgcagtatccactcaccactgacaacatcaagaccgtcatgctggacatgtttggcgccggcagcgagacgtcggcgacgacgctgcagtgggcgatggcggagctgatacggaacccgcgggttatgcggaaggcgcaagacgaggtccggcagcaactcgccgggcacgacaaggtgagggaggccgacctggcagatctgcgataccttgggtttgtcatcaaggagacgctgaggatgcacccgccggcgccattgctgctgccgcgtaggtgcgggagcccgtgtcaggttctgggcctggacgtgccggagggggtcatggtgatcgtgaacgcgtgggcgatcggcatggacccggcgcactgggaggcacccgaggagttcgcaccggagcggttcgagcagaacgggagggacttcaagggggcggacttcgagttcgtgccgttcggcggcgggaggaggatatgccccggcatggctttcgggctggcgcacgtggagctcgcgctcgcggcgctgctgttccacttcgactgggagctgccaggcggggcggcggccgaggatctggacatgaccgaggagtttggcgtcacggcacggctccggtctgaccttgtcgtggtcgccgtggccacggagtaaacgcacttttggtgatgtgcatcctatatttgtttttttgaggtgacctatatttgttgatcctgtgcaagttgattagcccatcaccgtggcgt

SEQ ID NO: 62602 - protein, 511 aa, Triticum aestivum
  peptide (1)..(511): Ceres Seq. ID no. 14308042
  misc_feature (46)..(504): Pfam Name: Cytochrome P450 Pfam Description: Cytochrome P450
  misc_feature (5)..(511): Homolog of NCBI NO: 13516750 NR Description: cytochrome P450 [Asparagus officinalis]
  misc_feature (12)..(511): Homolog of NCBI NO: 13516744 NR Description: cytochrome P450 [Triticum aestivum]
  misc_feature (44)..(507): Homolog of NCBI NO: 5915836 NR Description: Cytochrome P450 71D7
  misc_feature (15)..(507): Homolog of NCBI NO: 34905744 NR Description: putative cytochrome P450 [Oryza sativa (japonica
  misc_feature (36)..(511): Homolog of NCBI NO: 12331298 NR Description: cytochrome P450 [Solanum tuberosum]
  misc_feature (310)..(507): Homolog of NCBI NO: 37531530 NR Description: putative cytochrome P450 [Oryza sativa (japonica
  misc_feature (18)..(346): Homolog of NCBI NO: 37531530 NR Description: putative cytochrome P450 [Oryza sativa (japonica
  misc_feature (6)..(507): Homolog of NCBI NO: 34896754 NR Description: putative cytochrome P450 [Oryza sativa (japonica
  misc_feature (6)..(507): Homolog of NCBI NO: 34897000 NR Description: putative cytochrome P450 [Oryza sativa (japonica
  misc_feature (8)..(506): Homolog of NCBI NO: 34914838 NR Description: putative cytochrome P450 [Oryza sativa (japonica
SIQAAMAAVLPICLLLVLLLAIPLILFKSRRPAPHRGPGGRAVRLPPGPWALPVIGHLHHLAGALPHRALRDLARRHGPLMMLRLGELDAVVASSPDAAREIMKTHDASFASRPLTSMQQMAYGDAEGLIFAPYGDAWRQLRKICTVEIFSSRRVQSFRPAREEELGHLLRSVAAASASSSPVNLSERISAYVADSTVRAIVGSRFKQRDTYLEMLQEGLKIVPGMTLPDIFPSSRLVRLLSSVPGRIQRHSQDMKLFMDTIIQEHQVNSGPDCDGDKEEDLLDVLLRLQKEGDSQYPLTTDNIKTVMLDMFGAGSETSATTLQWAMAELIRNPRVMRKAQDEVRQQLAGHDKVREADLADLRYLGFVIKETLRMHPPAPLLLPRRCGSPCQVLGLDVPEGVMVIVNAWAIGMDPAHWEAPEEFAPERFEQNGRDFKGADFEFVPFGGGRRICPGMAFGLAHVELALAALLFHFDWELPGGAAAEDLDMTEEFGVTARLRSDLVVVAVATE

SEQ ID NO: 62603 - protein, 506 aa, Triticum aestivum
  peptide (1)..(506): Ceres Seq. ID no. 14308043
  misc_feature (41)..(499): Pfam Name: Cytochrome P450 Pfam Description: Cytochrome P450
  misc_feature (1)..(506): Homolog of NCBI NO: 13516750 NR Description: cytochrome P450 [Asparagus officinalis]
  misc_feature (7)..(506): Homolog of NCBI NO: 13516744 NR Description: cytochrome P450 [Triticum aestivum]
  misc_feature (39)..(502): Homolog of NCBI NO: 5915836 NR Description: Cytochrome P450 71D7
  misc_feature (10)..(502): Homolog of NCBI NO: 34905744 NR Description: putative cytochrome P450 [Oryza sativa (japonica
  misc_feature (31)..(506): Homolog of NCBI NO: 12331298 NR Description: cytochrome P450 [Solanum tuberosum]
  misc_feature (305)..(502): Homolog of NCBI NO: 37531530 NR Description: putative cytochrome P450 [Oryza sativa (japonica
  misc_feature (13)..(341): Homolog of NCBI NO: 37531530 NR Description: putative cytochrome P450 [Oryza sativa (japonica
  misc_feature (1)..(502): Homolog of NCBI NO: 34896754 NR Description: putative cytochrome P450 [Oryza sativa (japonica
  misc_feature (1)..(502): Homolog of NCBI NO: 34897000 NR Description: putative cytochrome P450 [Oryza sativa (japonica
  misc_feature (3)..(501): Homolog of NCBI NO: 34914838 NR Description: putative cytochrome P450 [Oryza sativa (japonica
MAAVLPICLLLVLLLAIPLILFKSRRPAPHRGPGGRAVRLPPGPWALPVIGHLHHLAGALPHRALRDLARRHGPLMMLRLGELDAVVASSPDAAREIMKTHDASFASRPLTSMQQMAYGDAEGLIFAPYGDAWRQLRKICTVEIFSSRRVQSFRPAREEELGHLLRSVAAASASSSPVNLSERISAYVADSTVRAIVGSRFKQRDTYLEMLQEGLKIVPGMTLPDIFPSSRLVRLLSSVPGRIQRHSQDMKLFMDTIIQEHQVNSGPDCDGDKEEDLLDVLLRLQKEGDSQYPLTTDNIKTVMLDMFGAGSETSATTLQWAMAELIRNPRVMRKAQDEVRQQLAGHDKVREADLADLRYLGFVIKETLRMHPPAPLLLPRRCGSPCQVLGLDVPEGVMVIVNAWAIGMDPAHWEAPEEFAPERFEQNGRDFKGADFEFVPFGGGRRICPGMAFGLAHVELALAALLFHFDWELPGGAAAEDLDMTEEFGVTARLRSDLVVVAVATE

SEQ ID NO: 62604 - protein, 431 aa, Triticum aestivum
  peptide (1)..(431): Ceres Seq. ID no. 14308044
  misc_feature (1)..(424): Pfam Name: Cytochrome P450 Pfam Description: Cytochrome P450
  misc_feature (1)..(431): Homolog of NCBI NO: 13516750 NR Description: cytochrome P450 [Asparagus officinalis]
  misc_feature (1)..(431): Homolog of NCBI NO: 13516744 NR Description: cytochrome P450 [Triticum aestivum]
  misc_feature (1)..(427): Homolog of NCBI NO: 5915836 NR Description: Cytochrome P450 71D7
  misc_feature (1)..(427): Homolog of NCBI NO: 34905744 NR Description: putative cytochrome P450 [Oryza sativa (japonica
  misc_feature (1)..(431): Homolog of NCBI NO: 12331298 NR Description: cytochrome P450 [Solanum tuberosum]
  misc_feature (230)..(427): Homolog of NCBI NO: 37531530 NR Description: putative cytochrome P450 [Oryza sativa (japonica
  misc_feature (1)..(266): Homolog of NCBI NO: 37531530 NR Description: putative cytochrome P450 [Oryza sativa (japonica
  misc_feature (1)..(427): Homolog of NCBI NO: 34896754 NR Description: putative cytochrome P450 [Oryza sativa (japonica
  misc_feature (1)..(427): Homolog of NCBI NO: 34897000 NR Description: putative cytochrome P450 [Oryza sativa (japonica
  misc_feature (1)..(426): Homolog of NCBI NO: 34914838 NR Description: putative cytochrome P450 [Oryza sativa (japonica
MMLRLGELDAVVASSPDAAREIMKTHDASFASRPLTSMQQMAYGDAEGLIFAPYGDAWRQLRKICTVEIFSSRRVQSFRPAREEELGHLLRSVAAASASSSPVNLSERISAYVADSTVRAIVGSRFKQRDTYLEMLQEGLKIVPGMTLPDIFPSSRLVRLLSSVPGRIQRHSQDMKLFMDTIIQEHQVNSGPDCDGDKEEDLLDVLLRLQKEGDSQYPLTTDNIKTVMLDMFGAGSETSATTLQWAMAELIRNPRVMRKAQDEVRQQLAGHDKVREADLADLRYLGFVIKETLRMHPPAPLLLPRRCGSPCQVLGLDVPEGVMVIVNAWAIGMDPAHWEAPEEFAPERFEQNGRDFKGADFEFVPFGGGRRICPGMAFGLAHVELALAALLFHFDWELPGGAAAEDLDMTEEFGVTARLRSDLVVVAVATE

SEQ ID NO: 62605 - DNA, 1104 bp, Triticum aestivum
  misc_feature (1)..(1104): Ceres Seq. ID no. 12615890
agaccagtgagcgcagcacacagatcagcactcaacaacaagccttgcgttgcaaaccatcgaccgaaggaaccgactgagctaagaggaggttcgccgagaagctagccgtgcgtagcaatggtgaagactgcggcagctgggagcactggcgatggcgccgtggcagcgaagcagcagcagcttggcggcaagatgaggacgtacaagggcgtgcggatgaggagctggggcgcgtgggtgtcggagatccgggcgcccgggcagaagacgcggatatggctcggctcccactccaccgccgaggccgccgcgcgcgcctacgacgccgcgctgctctgcctcaagggcgcctccgccgccgccgacctcaacttccccgtgcgcttccccttcgacctccccgccgccgccatgtcgcccaaagtccatccagcgcgtcgccgcagccgccgccgccggggccagcgctaatgtgttcgacttcgccgctgccgacgacagtgccagcgctaatgcccgtcgacttcgccggtgccgacgacagcgccagcgcggtcacccccgagtactgcagctcctccagcaatgcctcgccggtgagctctccggagacggcaagcagtggcggcgccgacctcgacggcgtagacctcctgggttacggttacagccagtgctcgctcgcggaaatcgaggccttcttccagtcgcccaagtgcatggagtacgccatgatggacccgtgcagcaccttcttcgctccggcgccgatagcaatggaggacgagtgcagctgggaggaaggaggcgacattgcgctctggagctactgaaccggagtccgggaagccggagaaccgaagaaactgacaaatcgttactcaagcgaaggccagaactggccatgcatggtgataactatccttaatttcatatatgtggtaaattaattcgattcattgtacacaacaacaataaggtagttgagcgttgtgggggggagctctcatggagctacatgttttaaggcagcttccatggagttaacctcccttcaattgcttgttacatccgtgtaaaaaagctgcttgcaatgcaagc

SEQ ID NO: 62606 - protein, 185 aa, Triticum aestivum
  peptide (1)..(185): Ceres Seq. ID no. 12615891
MARLPLHRRGRRARLRRRAALPQGRLRRRRPQLPRALPLRPPRRRHVAQSPSSASPQPPPPGPALMCSTSPLPTTVPALMPVDFAGADDSASAVTPEYCSSSSNASPVSSPETASSGGADLDGVDLLGYGYSQCSLAEIEAFFQSPKCMEYAMMDPCSTFFAPAPIAMEDECSWEEGGDIALWSY

SEQ ID NO: 62607 - protein, 120 aa, Triticum aestivum
  peptide (1)..(120): Ceres Seq. ID no. 12615892
MCSTSPLPTTVPALMPVDFAGADDSASAVTPEYCSSSSNASPVSSPETASSGGADLDGVDLLGYGYSQCSLAEIEAFFQSPKCMEYAMMDPCSTFFAPAPIAMEDECSWEEGGDIALWSY

SEQ ID NO: 62608 - protein, 117 aa, Triticum aestivum
  peptide (1)..(117): Ceres Seq. ID no. 12615893
  misc_feature (26)..(87): Pfam Name: AP2 domain Pfam Description: AP2 domain
  misc_feature (2)..(102): Homolog of NCBI NO: 38605845 NR Description: OSJNBb0034G17.3 [Oryza sativa (japonica
  misc_feature (1)..(102): Homolog of NCBI NO: 38605848 NR Description: OSJNBb0034G17.6 [Oryza sativa (japonica
  misc_feature (8)..(102): Homolog of NCBI NO: 25990951 NR Description: DREB-like protein [Zea mays]
  misc_feature (8)..(102): Homolog of NCBI NO: 21908034 NR Description: DRE binding factor 2 [Zea mays]
  misc_feature (1)..(102): Homolog of NCBI NO: 14140163 NR Description: putative AP2 domain containing protein [Oryza
  misc_feature (5)..(87): Homolog of NCBI NO: 34902130 NR Description: hypothetical protein [Oryza sativa (japonica
  misc_feature (25)..(87): Homolog of NCBI NO: 15219452 NR Description: transcription factor, putative; protein id:
  misc_feature (4)..(87): Homolog of NCBI NO: 21554056 NR Description: TINY-like protein [Arabidopsis thaliana]
  misc_feature (6)..(87): Homolog of NCBI NO: 15224024 NR Description: hypothetical protein; protein id: At1g77640.1
  misc_feature (1)..(87): Homolog of NCBI NO: 15219139 NR Description: TINY-like protein
MVKTAAAGSTGDGAVAAKQQQLGGKMRTYKGVRMRSWGAWVSEIRAPGQKTRIWLGSHSTAEAAARAYDAALLCLKGASAAADLNFPVRFPFDLPAAAMSPKVHPARRRSRRRRGQR

SEQ ID NO: 62609 - DNA, 1257 bp, Triticum aestivum
  misc_feature (1)..(1257): Ceres Seq. ID no. 12584727
gcgattaaacgttcgttggagacttggacgttcgctcagccccagccatggcagagaaggtatccacgttgatcattgaagccaacctcgaatgcgagaaatgctacaagaagattcagaaagtgctaggcaaactccaagagaaggagaagatcaggaccatcattttcgacacgaagaagaacacggtgactatctctggcccattcgacacggcgaagctgtccaagaagccgcgatgcaaggcctgcaaggcgatcaaggatatcaagatcgttgaagagaagaagcccgatgccaagaagccggaggagaagaagccagaggagaagaagcccgaggagaagaagccggccgccgatggctgcaagtgttgctgcaagaaaccggacgagaagaagccggatgagaagaagaagcccgacgagaagaagcccggaggaaaagaagaaacccgacgagaagaagccagatgataagaagcccggaggagaagcccaaatccaaggaggagaccaaaccggccgcgccggtcgacgactgtgacccttgcagttcacgcagatctgtaacctctgctacccggtggccgtgcagcgacccgaagccactggggggaggcgagcaccagtacccgcagccccagcagccgcagtggccgtgcgagccgccgcagatgcgggggtaccccngccccccaccaccctcagcacccgattcctcagcacccgccctcggcggcgccggcgaccccgaagaggcagccgtgcggaggctcggcgtactgcggaggagggtgcggctcgtgtggcggcggaggcggcggcgcgtacggggcgtggccgccggcgatgccgacgccgctgcagatgatgcagcccccgccgatgggctgcggcgggccggcgtcgtcgtgcagagggtgcaagggctgccggatcgtgcaggaggggaggttcatctacgaggagtacccgcccagtgcgtgcaccgtcatgtgattctcaggccagcgaccgttcgtgcatgcatgcatgcgctgttcgacctctctgcacgttgtttttcgtgttttagatgttccatatttgccctgtatgtttcgtgcacagtactgtatttgtttatgtctatccgcagcaaagaaggtgtagctgccacgtacattctcagtgtgaaaatatatgttctccgaacaattgatgtagctttgtatagataatttcaatttttggggcactaaaagttcgaaaatgc

SEQ ID NO: 62610 - protein, 249 aa, Triticum aestivum
  peptide (1)..(249): Ceres Seq. ID no. 12584728
  misc_feature (1)..(117): Homolog of NCBI NO: 30424862 NR Description: RIKEN cDNA 5033413A03 [Mus musculus]
  misc_feature (74)..(74): Xaa is any aa, unknown or other
MIRSPEEKPKSKEETKPAAPVDDCDPCSSRRSVTSATRWPCSDPKPLGGGEHQYPQPQQPQWPCEPPQMRGYPXPPPPSAPDSSAPALGGAGDPEEAAVRRLGVLRRRVRLVWRRRRRRVRGVAAGDADAAADDAAPADGLRRAGVVVQRVQGLPDRAGGEVHLRGVPAQCVHRHVILRPATVRACMHALFDLSARCFSCFRCSIFALYVSCTVLYLFMSIRSKEGVAATYILSVKIYVLRTIDVALYR

SEQ ID NO: 62611 - protein, 181 aa, Triticum aestivum
  peptide (1)..(181): Ceres Seq. ID no. 12584729
  misc_feature (1)..(49): Homolog of NCBI NO: 30424862 NR Description: RIKEN cDNA 5033413A03 [Mus musculus]
  misc_feature (6)..(6): Xaa is any aa, unknown or other
MRGYPXPPPPSAPDSSAPALGGAGDPEEAAVRRLGVLRRRVRLVWRRRRRRVRGVAAGDADAAADDAAPADGLRRAGVVVQRVQGLPDRAGGEVHLRGVPAQCVHRHVILRPATVRACMHALFDLSARCFSCFRCSIFALYVSCTVLYLFMSIRSKEGVAATYILSVKIYVLRTIDVALYR

SEQ ID NO: 62612 - protein, 142 aa, Triticum aestivum
  peptide (1)..(142): Ceres Seq. ID no. 12584730
  misc_feature (7)..(135): Homolog of NCBI NO: 40538989 NR Description: expressed protein [Oryza sativa (japonica
  misc_feature (7)..(135): Homolog of NCBI NO: 21070928 NR Description: unknown protein [Oryza sativa (japonica
  misc_feature (85)..(142): Homolog of NCBI NO: 33146673 NR Description: unknown protein [Oryza sativa (japonica
  misc_feature (1)..(141): Homolog of NCBI NO: 33146673 NR Description: unknown protein [Oryza sativa (japonica
MAEKVSTLIIEANLECEKCYKKIQKVLGKLQEKEKIRTIIFDTKKNTVTISGPFDTAKLSKKPRCKACKAIKDIKIVEEKKPDAKKPEEKKPEEKKPEEKKPAADGCKCCCKKPDEKKPDEKKKPDEKKPGGKEETRREEAR

SEQ ID NO: 62613 - DNA, 1060 bp, Triticum aestivum
  misc_feature (1)..(1060): Ceres Seq. ID no. 13654738
gcttttaccttttaggacagaggagtaagcaagtgcagtggcagtggttggccgcagacagcagcagctcgcctccttccttccttcctcctcactcccccctatatacccgccaccctacccgtcggagggtgcgcgcagcggtggagctcggtggattgtcggggcaaatggattccagttccagggccgccctcttctgcttcctggccgtcgcctcctccctcctgcaccccgccagatctgacggggaggacaaccagctcctcaaggggatcaacagctacagagcttcactcaaggtcccggcgctcaccgagaacagcaatgccgactgcctggccgagcagctagcgaagaagttcaagggccaggagtgcaccaacaccaccggagccaacactgtccccggcaccgagccgcagttccccgactacccccagttcctcgaccgctgccacctcaacgcgtcggtaaccgaggacgggcaggtgatgccggcatgcgtgcccggactcgtggccgacgttgtgctgaccaactacaccaagtcccagtacaaccggttcctcaacgacaccaagtactccggcgtcgggatcgccaacgagggggactgggtggtcgtcgtcctcagcaccagcaccgactccggcgactactcccctgctcccccgggctccaactgggctccttcggtccagccgttcagctggatgattgtttcgctggtagggttcgtaattttgctgatgaagtgagaagataaatgttgtgttgctcatctcgcgtgctacaccgctgcaaatgagcgtgttgatcttatgcccgtgtcagtcgtttctgtatctttcagattgtcatttctactcggtccagttgacaccacagtacagtagcatatgcatgccacgaggttcgggatcaaaactttttttcttcagtattctcctttgaccacaattggcaacggctttatggatattgtggtcaggtgatgtgcattattgaaccacatctttcatctttgaacatttagctaaagccagaacttcaactt

SEQ ID NO: 62614 - protein, 252 aa, Triticum aestivum
  peptide (1)..(252): Ceres Seq. ID no. 13654739
  misc_feature (65)..(162): Homolog of NCBI NO: 24417290 NR Description: unknown [Arabidopsis thaliana]
  misc_feature (61)..(221): Homolog of NCBI NO: 15239685 NR Description: expressed protein [Arabidopsis thaliana]
  misc_feature (61)..(221): Homolog of NCBI NO: 24417436 NR Description: unknown [Arabidopsis thaliana]
  misc_feature (61)..(221): Homolog of NCBI NO: 15239686 NR Description: expressed protein [Arabidopsis thaliana]
  misc_feature (61)..(221): Homolog of NCBI NO: 34395876 NR Description: Putative GPI-anchored protein At5g19240 precursor
  misc_feature (81)..(234): Homolog of NCBI NO: 18405086 NR Description: expressed protein [Arabidopsis thaliana]
  misc_feature (61)..(223): Homolog of NCBI NO: 15239687 NR Description: expressed protein [Arabidopsis thaliana]
  misc_feature (65)..(251): Homolog of NCBI NO: 21594024 NR Description: unknown [Arabidopsis thaliana]
  misc_feature (65)..(251): Homolog of NCBI NO: 18397452 NR Description: expressed protein [Arabidopsis thaliana]
  misc_feature (61)..(251): Homolog of NCBI NO: 34904816 NR Description: contains ESTs
FYLLGQRSKQVQWQWLAADSSSSPPSFLPPHSPLYTRHPTRRRVRAAVELGGLSGQMDSSSRAALFCFLAVASSLLHPARSDGEDNQLLKGINSYRASLKVPALTENSNADCLAEQLAKKFKGQECTNTTGANTVPGTEPQFPDYPQFLDRCHLNASVTEDGQVMPACVPGLVADVVLTNYTKSQYNRFLNDTKYSGVGIANEGDWVVVVLSTSTDSGDYSPAPPGSNWAPSVQPFSWMIVSLVGFVILLMK

SEQ ID NO: 62615 - protein, 196 aa, Triticum aestivum
  peptide (1)..(196): Ceres Seq. ID no. 13654740
  misc_feature (9)..(106): Homolog of NCBI NO: 24417290 NR Description: unknown [Arabidopsis thaliana]
  misc_feature (5)..(165): Homolog of NCBI NO: 15239685 NR Description: expressed protein [Arabidopsis thaliana]
  misc_feature (5)..(165): Homolog of NCBI NO: 24417436 NR Description: unknown [Arabidopsis thaliana]
  misc_feature (5)..(165): Homolog of NCBI NO: 15239686 NR Description: expressed protein [Arabidopsis thaliana]
  misc_feature (5)..(165): Homolog of NCBI NO: 34395876 NR Description: Putative GPI-anchored protein At5g19240 precursor
  misc_feature (25)..(178): Homolog of NCBI NO: 18405086 NR Description: expressed protein [Arabidopsis thaliana]
  misc_feature (5)..(167): Homolog of NCBI NO: 15239687 NR Description: expressed protein [Arabidopsis thaliana]
  misc_feature (9)..(195): Homolog of NCBI NO: 21594024 NR Description: unknown [Arabidopsis thaliana]
  misc_feature (9)..(195): Homolog of NCBI NO: 18397452 NR Description: expressed protein [Arabidopsis thaliana]
  misc_feature (5)..(195): Homolog of NCBI NO: 34904816 NR Description: contains ESTs
MDSSSRAALFCFLAVASSLLHPARSDGEDNQLLKGINSYRASLKVPALTENSNADCLAEQLAKKFKGQECTNTTGANTVPGTEPQFPDYPQFLDRCHLNASVTEDGQVMPACVPGLVADVVLTNYTKSQYNRFLNDTKYSGVGIANEGDWVVVVLSTSTDSGDYSPAPPGSNWAPSVQPFSWMIVSLVGFVILLMK

SEQ ID NO: 62616 - DNA, 1093 bp, Triticum aestivum
  misc_feature (1)..(1093): Ceres Seq. ID no. 13583408
aaggctcttcccaaaccctccccgaccgccgccccccgttcgcctccgccgccgcctagccaccacgcgccaggagaaccccgcgccgccggccatggcggaggaggagggcacgcagcagctgccgttcgtgcgggagacggtcctcaagaagaggaaggacaacgaggagtgggccaccaagaaccgggagcgcaaggcggccaagaggcagcgccgctgccacgacgccaagggcgccatcaagcgccccgaggacttcgtcaaggagttccgcaacaaggagctcgacttcctgcggatgcgcacgcgcctcaaggtccggaacctgcgccccgccgaggccatcgacgccaagctgctcttcgccgtccgcatcccaggcaccgccgacttgcacccgcaaatcaggaagatcttggccaggctgcggctcacgcaggtcctcaccggcgtgttcctcaaggccaccgaggcaaacctcaagaggcttgcagctgtcggaccgttcgtcacctatgggttccccaatttgaagaatgtgaaggagcttatttacaagaagggtcgcggttatttcgacaaggagcctttcccccttaccagcaatgatctaatcgagaaggcacttggagaacacggtgtcatatgcttggaagacgtggtgcacgaaatctccacggtcgggccacacttcagagaaacggcgagctttctcatgcccttcaagctcaagtgtccggagaggaggctgcggatgaagaagaagcccttcaaggatggtggcgactcgggcaaccgtggggacaagatcaacgagctactcgagaagctgaactgaggcagtctccaacctgcgtccgcaaacaagcgatggatccgttattaccttgtcggttttgtaatagcatagctgaatgtacctttgttttggaaaccctgcctgagtgtttgggatcaaatcacgaaatactgttcttcgcccctcgctctgtccttcatgatcgatctgccgtgctttgcttgcgctgacagacttagtgaggttggatgatattgcaacaaaacatcaggttctcaaaaaaattttttt

SEQ ID NO: 62617 - protein, 279 aa, Triticum aestivum
  peptide (1)..(279): Ceres Seq. ID no. 13583409
  misc_feature (120)..(171): Pfam Name: Ribosomal protein L30p/L7e Pfam Description: Ribosomal protein L30p/L7e
  misc_feature (19)..(278): Homolog of NCBI NO: 18253049 NR Description: ribosomal protein L7 [Spodoptera frugiperda]
  misc_feature (44)..(279): Homolog of NCBI NO: 30689617 NR Description: 60S ribosomal protein L7 (RPL7C) [Arabidopsis
  misc_feature (44)..(279): Homolog of NCBI NO: 30689623 NR Description: 60S ribosomal protein L7 (RPL7C) [Arabidopsis
  misc_feature (44)..(279): Homolog of NCBI NO: 27311547 NR Description: Unknown protein [Arabidopsis thaliana]
  misc_feature (32)..(279): Homolog of NCBI NO: 15231288 NR Description: 60S ribosomal protein L7 (RPL7D) [Arabidopsis
  misc_feature (44)..(279): Homolog of NCBI NO: 38637548 NR Description: putative 60S ribosomal protein L7
  misc_feature (44)..(279): Homolog of NCBI NO: 445613 NR Description: ribosomal protein L7
  misc_feature (44)..(279): Homolog of NCBI NO: 15226212 NR Description: 60S ribosomal protein L7 (RPL7B) [Arabidopsis
  misc_feature (32)..(279): Homolog of NCBI NO: 15220825 NR Description: 60S ribosomal protein L7 (RPL7A) [Arabidopsis
  misc_feature (32)..(279): Homolog of NCBI NO: 38636688 NR Description: putative 60S ribosomal protein L7 (RPL7A)
RLFPNPPRPPPPVRLRRRLATTRQENPAPPAMAEEEGTQQLPFVRETVLKKRKDNEEWATKNRERKAAKRQRRCHDAKGAIKRPEDFVKEFRNKELDFLRMRTRLKVRNLRPAEAIDAKLLFAVRIPGTADLHPQIRKILARLRLTQVLTGVFLKATEANLKRLAAVGPFVTYGFPNLKNVKELIYKKGRGYFDKEPFPLTSNDLIEKALGEHGVICLEDVVHEISTVGPHFRETASFLMPFKLKCPERRLRMKKKPFKDGGDSGNRGDKINELLEKLN

SEQ ID NO: 62618 - protein, 248 aa, Triticum aestivum
  peptide (1)..(248): Ceres Seq. ID no. 13583410
  misc_feature (89)..(140): Pfam Name: Ribosomal protein L30p/L7e Pfam Description: Ribosomal protein L30p/L7e
  misc_feature (1)..(247): Homolog of NCBI NO: 18253049 NR Description: ribosomal protein L7 [Spodoptera frugiperda]
  misc_feature (13)..(248): Homolog of NCBI NO: 30689617 NR Description: 60S ribosomal protein L7 (RPL7C) [Arabidopsis
  misc_feature (13)..(248): Homolog of NCBI NO: 30689623 NR Description: 60S ribosomal protein L7 (RPL7C) [Arabidopsis
  misc_feature (13)..(248): Homolog of NCBI NO: 27311547 NR Description: Unknown protein [Arabidopsis thaliana]
  misc_feature (1)..(248): Homolog of NCBI NO: 15231288 NR Description: 60S ribosomal protein L7 (RPL7D) [Arabidopsis
  misc_feature (13)..(248): Homolog of NCBI NO: 38637548 NR Description: putative 60S ribosomal protein L7
  misc_feature (13)..(248): Homolog of NCBI NO: 445613 NR Description: ribosomal protein L7
  misc_feature (13)..(248): Homolog of NCBI NO: 15226212 NR Description: 60S ribosomal protein L7 (RPL7B) [Arabidopsis
  misc_feature (1)..(248): Homolog of NCBI NO: 15220825 NR Description: 60S ribosomal protein L7 (RPL7A) [Arabidopsis
  misc_feature (1)..(248): Homolog of NCBI NO: 38636688 NR Description: putative 60S ribosomal protein L7 (RPL7A)
MAEEEGTQQLPFVRETVLKKRKDNEEWATKNRERKAAKRQRRCHDAKGAIKRPEDFVKEFRNKELDFLRMRTRLKVRNLRPAEAIDAKLLFAVRIPGTADLHPQIRKILARLRLTQVLTGVFLKATEANLKRLAAVGPFVTYGFPNLKNVKELIYKKGRGYFDKEPFPLTSNDLIEKALGEHGVICLEDVVHEISTVGPHFRETASFLMPFKLKCPERRLRMKKKPFKDGGDSGNRGDKINELLEKLN

SEQ ID NO: 62619 - protein, 203 aa, Triticum aestivum
  peptide (1)..(203): Ceres Seq. ID no. 13583411
  misc_feature (1)..(53): Pfam Name: TT viral ORF2 Pfam Description: TT viral ORF2
KALPKPSPTAAPRSPPPPPSHHAPGEPRAAGHGGGGGHAAAAVRAGDGPQEEEGQRGVGHQEPGAQGGQEAAPLPRRQGRHQAPRGLRQGVPQQGARLPADAHAPQGPEPAPRRGHRRQAALRRPHPRHRRLAPANQEDLGQAAAHAGPHRRVPQGHRGKPQEACSCRTVRHLWVPQFEECEGAYLQEGSRLFRQGAFPPYQQ

SEQ ID NO: 62620 - DNA, 915 bp, Triticum aestivum
  misc_feature (1)..(915): Ceres Seq. ID no. 15173873
ataaatgagcgaccaaaaccctagtccattcttccccaccgccgccttgccccctctcgccggattgccgctccgcgtccaccgaagaatcaccaatggctccgacgtcgaagatggcgctcggcataaagcgggcgtcgagatcgcacacctaccaccgccgcgggctttgggccatcaaggccaagcacggcggcgccttgcccaaggccgagaagccggccgccatcgccgagcccaagttctatcccgctgatgatgtcaagccacgcaccgtgagcacacgcaagccccatcccaccaagctcagatcgaccatcacaccgggcacggtgctgatcctgctcgcggggaggtacatgggaaagcgcgtggtgttcctcaagcagctccagtccggccttctcctcatcactggacctttcaagatcaatggcgtgccaatccgcagagtgaaccaggcttacgtcattgccacatccacaaaggtcgacatctctaaggttaatgtgcagaagtttgatgacaagtacttcgctagggagaagaagactagggcaaagaagactgagggcgagctatttgagtcggataaggaggcaaccaagaatttgccagacttcaagaaggatgaccagaaggtcattgacgctgagttgatcaaggctatcgatgctgtcccagaccttaaaaattatcttggtgcccggttctccctcagggatggcgacaagccgcatgagatgaccttctaagttacctggtacaagtttcaagatctgtggaagtcttttttgtctagtgtgtgttctggttctgtacttctgatttcttttgcctggttggtgaatatttgatttccactgaagtctgcctgtcaaatattttgagaagataactaggaagtaccatcct

SEQ ID NO: 62621 - protein, 219 aa, Triticum aestivum
  peptide (1)..(219): Ceres Seq. ID no. 15173874
  misc_feature (112)..(219): Pfam Name: Ribosomal protein L6e Pfam Description: Ribosomal protein L6e
  misc_feature (48)..(219): Homolog of NCBI NO: 16758864 NR Description: ribosomal protein L6 [Rattus norvegicus]
  misc_feature (48)..(219): Homolog of NCBI NO: 6323481 NR Description: Homology to rat and human L6
  misc_feature (48)..(219): Homolog of NCBI NO: 6012952 NR Description: 60S ribosomal protein L6 (YL 16 like) [Cyanophora
  misc_feature (10)..(219): Homolog of NCBI NO: 15221127 NR Description: 60S ribosomal protein L6 (RPL6B) [Arabidopsis
  misc_feature (1)..(219): Homolog of NCBI NO: 7208784 NR Description: 60S ribosomal protein L6 [Cicer arietinum]
  misc_feature (10)..(219): Homolog of NCBI NO: 15221126 NR Description: 60S ribosomal protein L6 (RPL6C) [Arabidopsis
  misc_feature (10)..(219): Homolog of NCBI NO: 21593910 NR Description: 60S ribosomal protein L6, putative [Arabidopsis
  misc_feature (10)..(219): Homolog of NCBI NO: 15221798 NR Description: 60S ribosomal protein L6 (RPL6A) [Arabidopsis
  misc_feature (1)..(219): Homolog of NCBI NO: 464621 NR Description: 60S RIBOSOMAL PROTEIN L6 (YL16-LIKE)
  misc_feature (1)..(219): Homolog of NCBI NO: 38344818 NR Description: OSJNBb0022F23.11 [Oryza sativa (japonica
MAPTSKMALGIKRASRSHTYHRRGLWAIKAKHGGALPKAEKPAAIAEPKFYPADDVKPRTVSTRKPHPTKLRSTITPGTVLILLAGRYMGKRVVFLKQLQSGLLLITGPFKINGVPIRRVNQAYVIATSTKVDISKVNVQKFDDKYFAREKKTRAKKTEGELFESDKEATKNLPDFKKDDQKVIDAELIKAIDAVPDLKNYLGARFSLRDGDKPHEMTF

SEQ ID NO: 62622 - protein, 213 aa, Triticum aestivum
  peptide (1)..(213): Ceres Seq. ID no. 15173875
  misc_feature (106)..(213): Pfam Name: Ribosomal protein L6e Pfam Description: Ribosomal protein L6e
  misc_feature (42)..(213): Homolog of NCBI NO: 16758864 NR Description: ribosomal protein L6 [Rattus norvegicus]
  misc_feature (42)..(213): Homolog of NCBI NO: 6323481 NR Description: Homology to rat and human L6
  misc_feature (42)..(213): Homolog of NCBI NO: 6012952 NR Description: 60S ribosomal protein L6 (YL 16 like) [Cyanophora
  misc_feature (4)..(213): Homolog of NCBI NO: 15221127 NR Description: 60S ribosomal protein L6 (RPL6B) [Arabidopsis
  misc_feature (1)..(213): Homolog of NCBI NO: 7208784 NR Description: 60S ribosomal protein L6 [Cicer arietinum]
  misc_feature (4)..(213): Homolog of NCBI NO: 15221126 NR Description: 60S ribosomal protein L6 (RPL6C) [Arabidopsis
  misc_feature (4)..(213): Homolog of NCBI NO: 21593910 NR Description: 60S ribosomal protein L6, putative [Arabidopsis
  misc_feature (4)..(213): Homolog of NCBI NO: 15221798 NR Description: 60S ribosomal protein L6 (RPL6A) [Arabidopsis
  misc_feature (1)..(213): Homolog of NCBI NO: 464621 NR Description: 60S RIBOSOMAL PROTEIN L6 (YL16-LIKE)
  misc_feature (1)..(213): Homolog of NCBI NO: 38344818 NR Description: OSJNBb0022F23.11 [Oryza sativa (japonica
MALGIKRASRSHTYHRRGLWAIKAKHGGALPKAEKPAAIAEPKFYPADDVKPRTVSTRKPHPTKLRSTITPGTVLILLAGRYMGKRVVFLKQLQSGLLLITGPFKINGVPIRRVNQAYVIATSTKVDISKVNVQKFDDKYFAREKKTRAKKTEGELFESDKEATKNLPDFKKDDQKVIDAELIKAIDAVPDLKNYLGARFSLRDGDKPHEMTF

SEQ ID NO: 62623 - protein, 131 aa, Triticum aestivum
  peptide (1)..(131): Ceres Seq. ID no. 15173876
  misc_feature (24)..(131): Pfam Name: Ribosomal protein L6e Pfam Description: Ribosomal protein L6e
  misc_feature (1)..(131): Homolog of NCBI NO: 16758864 NR Description: ribosomal protein L6 [Rattus norvegicus]
  misc_feature (1)..(131): Homolog of NCBI NO: 6323481 NR Description: Homology to rat and human L6
  misc_feature (1)..(131): Homolog of NCBI NO: 6012952 NR Description: 60S ribosomal protein L6 (YL 16 like) [Cyanophora
  misc_feature (1)..(131): Homolog of NCBI NO: 15221127 NR Description: 60S ribosomal protein L6 (RPL6B) [Arabidopsis
  misc_feature (1)..(131): Homolog of NCBI NO: 7208784 NR Description: 60S ribosomal protein L6 [Cicer arietinum]
  misc_feature (1)..(131): Homolog of NCBI NO: 15221126 NR Description: 60S ribosomal protein L6 (RPL6C) [Arabidopsis
  misc_feature (1)..(131): Homolog of NCBI NO: 21593910 NR Description: 60S ribosomal protein L6, putative [Arabidopsis
  misc_feature (1)..(131): Homolog of NCBI NO: 15221798 NR Description: 60S ribosomal protein L6 (RPL6A) [Arabidopsis
  misc_feature (1)..(131): Homolog of NCBI NO: 464621 NR Description: 60S RIBOSOMAL PROTEIN L6 (YL16-LIKE)
  misc_feature (1)..(131): Homolog of NCBI NO: 38344818 NR Description: OSJNBb0022F23.11 [Oryza sativa (japonica
MGKRVVFLKQLQSGLLLITGPFKINGVPIRRVNQAYVIATSTKVDISKVNVQKFDDKYFAREKKTRAKKTEGELFESDKEATKNLPDFKKDDQKVIDAELIKAIDAVPDLKNYLGARFSLRDGDKPHEMTF

SEQ ID NO: 62624 - DNA, 824 bp, Triticum aestivum
  misc_feature (1)..(824): Ceres Seq. ID no. 13583412
gcatctgaagacaccaagctcgatcgcgctccgacccgtcagccatggctcggctcgccgccctcctcctcgccttcgccgtcgccgtctccgccgccgcgctggcgcatggccgcgatctcccgacccagatcaagctgaccaagggcggtggcgcggtgggcggcgacagccaggagtgcgtgtacacggtgtacgtgcgcacggggtcgatctggaaggccgggacggacgccaacatcacgctggagctctacacggcgggcaacgccgacggcgtggcgatcgcggacctgccgtcgtggggcgggctcatgtgggggggccactcctacttcgagcgcggcaacctggacatcttcagcgggcgcgggccgtgcatggccggcgcgccctgccgcatgagggtgtcctccgacggcaccggcgcgcaccacggctggtactgcaactacgtggaggtcaccgtcaccggcccgcaccgcggctgcgcccagcagctcttcaccgtcgagcagtggctcgccaccgacgccgcgccctacaagctcgaggccgtcgtcgaccgctgccccgccgatggcaccgccgccgaggagtaagatcgagtaagctgtacgccggcctcttcgtcatcgtgtgtggttggtagcaataagctgcggggccgttcgtgccggccccgtgatccgcgtgcgccgcgccggacgcggagatgtactactagatgagttcgtgctgctggtggtggcgaaataatcgggacctgatttgtactgtgtgccattagtgagagttgtgattagttgcggtggctgttttgt

SEQ ID NO: 62625 - protein, 216 aa, Triticum aestivum
  peptide (1)..(216): Ceres Seq. ID no. 13583413
HLKTPSSIALRPVSHGSARRPPPRLRRRRLRRRAGAWPRSPDPDQADQGRWRGGRRQPGVRVHGVRAHGVDLEGRDGRQHHAGALHGGQRRRRGDRGPAVVGRAHVGGPLLLRARQPGHLQRARAVHGRRALPHEGVLRRHRRAPRLVLQLRGGHRHRPAPRLRPAALHRRAVARHRRRALQARGRRRPLPRRWHRRRGVRSSKLYAGLFVIVCGW

SEQ ID NO: 62626 - protein, 185 aa, Triticum aestivum
  peptide (1)..(185): Ceres Seq. ID no. 13583414
  misc_feature (46)..(171): Pfam Name: PLAT/LH2 domain Pfam Description: PLAT/LH2 domain
  misc_feature (26)..(144): Homolog of NCBI NO: 15982879 NR Description: AT4g39730/T19P19_120 [Arabidopsis thaliana]
  misc_feature (38)..(176): Homolog of NCBI NO: 10241929 NR Description: elicitor inducible protein [Nicotiana tabacum]
  misc_feature (38)..(177): Homolog of NCBI NO: 18399899 NR Description: expressed protein [Arabidopsis thaliana]
  misc_feature (28)..(176): Homolog of NCBI NO: 7542598 NR Description: TMV-induced protein I [Capsicum annuum]
  misc_feature (38)..(177): Homolog of NCBI NO: 21553555 NR Description: dehydration stress-induced protein [Arabidopsis
  misc_feature (42)..(176): Homolog of NCBI NO: 28628595 NR Description: TMV induced protein 1-2 [Capsicum annuum]
  misc_feature (24)..(177): Homolog of NCBI NO: 12667247 NR Description: dehydration stress-induced protein [Brassica
  misc_feature (26)..(177): Homolog of NCBI NO: 15236014 NR Description: expressed protein [Arabidopsis thaliana]
  misc_feature (1)..(185): Homolog of NCBI NO: 32492139 NR Description: OSJNBa0036B21.2 [Oryza sativa (japonica
  misc_feature (1)..(185): Homolog of NCBI NO: 32492140 NR Description: OSJNBa0036B21.4 [Oryza sativa (japonica
MARLAALLLAFAVAVSAAALAHGRDLPTQIKLTKGGGAVGGDSQECVYTVYVRTGSIWKAGTDANITLELYTAGNADGVAIADLPSWGGLMWGGHSYFERGNLDIFSGRGPCMAGAPCRMRVSSDGTGAHHGWYCNYVEVTVTGPHRGCAQQLFTVEQWLATDAAPYKLEAVVDRCPADGTAAEE

SEQ ID NO: 62627 - DNA, 797 bp, Triticum aestivum
  misc_feature (1)..(797): Ceres Seq. ID no. 15224286
gaaaaggcgagaaggaaggaagcaacgaagcgaggggattccgcggagttggtggaggcgagggtttgtgcggccatggagaacctggcgatgctgtgggggatcatcgggccgggcgtcgccggcgcgctcttcggcgccggctggtggttctgggtcgacgccgtcgtctgcagcgccgtccaggtctccttcatccactacctgcccgggatcttcgcgtcgctggccgcgctcatgttcaattgcgtcgacaaggatgccatcgggaacgactactactcgtcctacggggatgattccgagtggagggtgaagctttggctttttgtcgcctacgtcgtttcattcgtctgccttgcgggatcagtgggtttgttggtgcaagacgccctgacagacaagggcccttctgtgtggactggtgttgccggggttctgcaatgcgtttttgtgttgataagcgggttgacatactggacgtgccacaccgaggattaagggtcaaatatcaaatctcgcgaagacgtttagtctatacccgtgtgtggtcctgtgtaaaaaaaatatgttcattccagggcgggattacttggtgtccgtgtgtgcatagctgaccgcttcctgaaatggatccgtagcatcagtactacgtacgtacgtgtttattatcctaatttgttgtgagattgtggtgcttggtggcttgagaggttagcattgagattggatcacgagctgcctgcagcaagtcgttattactgtcaaacctccataagaaaattcagttgactccg

SEQ ID NO: 62628 - protein, 166 aa, Triticum aestivum
  peptide (1)..(166): Ceres Seq. ID no. 15224287
  misc_feature (28)..(164): Pfam Name: Uncharacterised protein family (UPF0220) Pfam Description: Uncharacterised protein family (UPF0220)
  misc_feature (41)..(159): Homolog of NCBI NO: 33150604 NR Description: IFNRC [Homo sapiens]
  misc_feature (37)..(160): Homolog of NCBI NO: 38103526 NR Description: hypothetical protein MG03971.4 [Magnaporthe
  misc_feature (37)..(160): Homolog of NCBI NO: 40738694 NR Description: hypothetical protein AN6544.2 [Aspergillus
  misc_feature (41)..(166): Homolog of NCBI NO: 27732805 NR Description: similar to Small membrane protein 1 [Rattus
  misc_feature (31)..(166): Homolog of NCBI NO: 34610239 NR Description: small membrane protein 1 [Mus musculus]
  misc_feature (33)..(166): Homolog of NCBI NO: 33417077 NR Description: MGC68857 protein [Xenopus laevis]
  misc_feature (41)..(166): Homolog of NCBI NO: 7657595 NR Description: small membrane protein 1 [Homo sapiens]
  misc_feature (40)..(159): Homolog of NCBI NO: 24657484 NR Description: CG15012-PB [Drosophila melanogaster]
  misc_feature (28)..(110): Homolog of NCBI NO: 25373092 NR Description: protein T32E20.29 [imported] - Arabidopsis
  misc_feature (28)..(165): Homolog of NCBI NO: 18400231 NR Description: expressed protein [Arabidopsis thaliana]
EKARRKEATKRGDSAELVEARVCAAMENLAMLWGIIGPGVAGALFGAGWWFWVDAVVCSAVQVSFIHYLPGIFASLAALMFNCVDKDAIGNDYYSSYGDDSEWRVKLWLFVAYVVSFVCLAGSVGLLVQDALTDKGPSVWTGVAGVLQCVFVLISGLTYWTCHTED

SEQ ID NO: 62629 - protein, 141 aa, Triticum aestivum
  peptide (1)..(141): Ceres Seq. ID no. 15224288
  misc_feature (3)..(139): Pfam Name: Uncharacterised protein family (UPF0220) Pfam Description: Uncharacterised protein family (UPF0220)
  misc_feature (16)..(134): Homolog of NCBI NO: 33150604 NR Description: IFNRC [Homo sapiens]
  misc_feature (12)..(135): Homolog of NCBI NO: 38103526 NR Description: hypothetical protein MG03971.4 [Magnaporthe
  misc_feature (12)..(135): Homolog of NCBI NO: 40738694 NR Description: hypothetical protein AN6544.2 [Aspergillus
  misc_feature (16)..(141): Homolog of NCBI NO: 27732805 NR Description: similar to Small membrane protein 1 [Rattus
  misc_feature (6)..(141): Homolog of NCBI NO: 34610239 NR Description: small membrane protein 1 [Mus musculus]
  misc_feature (8)..(141): Homolog of NCBI NO: 33417077 NR Description: MGC68857 protein [Xenopus laevis]
  misc_feature (16)..(141): Homolog of NCBI NO: 7657595 NR Description: small membrane protein 1 [Homo sapiens]
  misc_feature (15)..(134): Homolog of NCBI NO: 24657484 NR Description: CG15012-PB [Drosophila melanogaster]
  misc_feature (3)..(85): Homolog of NCBI NO: 25373092 NR Description: protein T32E20.29 [imported] - Arabidopsis
  misc_feature (3)..(140): Homolog of NCBI NO: 18400231 NR Description: expressed protein [Arabidopsis thaliana]
MENLAMLWGIIGPGVAGALFGAGWWFWVDAVVCSAVQVSFIHYLPGIFASLAALMFNCVDKDAIGNDYYSSYGDDSEWRVKLWLFVAYVVSFVCLAGSVGLLVQDALTDKGPSVWTGVAGVLQCVFVLISGLTYWTCHTED

SEQ ID NO: 62630 - protein, 136 aa, Triticum aestivum
  peptide (1)..(136): Ceres Seq. ID no. 15224289
  misc_feature (1)..(134): Pfam Name: Uncharacterised protein family (UPF0220) Pfam Description: Uncharacterised protein family (UPF0220)
  misc_feature (11)..(129): Homolog of NCBI NO: 33150604 NR Description: IFNRC [Homo sapiens]
  misc_feature (7)..(130): Homolog of NCBI NO: 38103526 NR Description: hypothetical protein MG03971.4 [Magnaporthe
  misc_feature (7)..(130): Homolog of NCBI NO: 40738694 NR Description: hypothetical protein AN6544.2 [Aspergillus
  misc_feature (11)..(136): Homolog of NCBI NO: 27732805 NR Description: similar to Small membrane protein 1 [Rattus
  misc_feature (1)..(136): Homolog of NCBI NO: 34610239 NR Description: small membrane protein 1 [Mus musculus]
  misc_feature (3)..(136): Homolog of NCBI NO: 33417077 NR Description: MGC68857 protein [Xenopus laevis]
  misc_feature (11)..(136): Homolog of NCBI NO: 7657595 NR Description: small membrane protein 1 [Homo sapiens]
  misc_feature (10)..(129): Homolog of NCBI NO: 24657484 NR Description: CG15012-PB [Drosophila melanogaster]
  misc_feature (1)..(80): Homolog of NCBI NO: 25373092 NR Description: protein T32E20.29 [imported] - Arabidopsis
  misc_feature (1)..(135): Homolog of NCBI NO: 18400231 NR Description: expressed protein [Arabidopsis thaliana]
MLWGIIGPGVAGALFGAGWWFWVDAVVCSAVQVSFIHYLPGIFASLAALMFNCVDKDAIGNDYYSSYGDDSEWRVKLWLFVAYVVSFVCLAGSVGLLVQDALTDKGPSVWTGVAGVLQCVFVLISGLTYWTCHTED

SEQ ID NO: 62631 - DNA, 751 bp, Triticum aestivum
  misc_feature (1)..(751): Ceres Seq. ID no. 13598378
acaaaacggcccggactcgcctcctcctcctccccctcacaactcgccaacgccaaatccgcctccgccaccggccagccagagagcgagcgagcgattcgccgccgccgtcaagcctgcagggagcgagcccctctcgcctccaaacagcctcaccctcgcggcccccgtcccctcaaagtccccgcgtctcccgcgagaatcgcgcccgcccgcctagggtttccgccgccgccggagaggaggggagtgggaggaggggacgagatggccggacggctcctcgggcagctcctcgtcatgggcggcgccgtcgtcggcagggccgtggtccaggcctaccgccaggccatcgtcaatgcacagagaaccggagctgcccaggaagctgtgaatggtattcgaagggctagcaaggctatgaccgaacaagaagcccggcaaatattaggtatcagtgaaaagacgagttgggaagagattgtcaagaagtatgatacgatgtttgagaagaatgccaagagcggaagcttctatctccagtcgaaagtacaccgggccaaagaatgtctggagtccatataccatgataagcccgacataatgaactgaactgagatgggcagcgtttcgtctaatcgatcgattttgtcagtcgatgttctgtctgagctatgctgggctgctgcatcaggtcaaatttggttgtaacaggatgtttgttctgcttgactcgaataatatattcaac

SEQ ID NO: 62632 - protein, 203 aa, Triticum aestivum
  peptide (1)..(203): Ceres Seq. ID no. 13598379
  misc_feature (91)..(201): Pfam Name: Uncharacterised protein family (UPF0108) Pfam Description: Uncharacterised protein family (UPF0108)
  misc_feature (89)..(192): Homolog of NCBI NO: 24640407 NR Description: CG1409-PA [Drosophila melanogaster]
  misc_feature (89)..(192): Homolog of NCBI NO: 21064209 NR Description: AT29287p [Drosophila melanogaster]
  misc_feature (93)..(193): Homolog of NCBI NO: 19112141 NR Description: conserved hypothetical protein; similar to S.
  misc_feature (101)..(195): Homolog of NCBI NO: 10176880 NR Description: gene_id:MAC9.20~unknown protein [Arabidopsis
  misc_feature (90)..(195): Homolog of NCBI NO: 18424521 NR Description: auxin-regulated protein [Arabidopsis thaliana]
  misc_feature (101)..(200): Homolog of NCBI NO: 37535410 NR Description: putative pol polyprotein [Oryza sativa (japonica
  misc_feature (91)..(198): Homolog of NCBI NO: 11357639 NR Description: hypothetical protein F25L23.140 - Arabidopsis
  misc_feature (90)..(198): Homolog of NCBI NO: 18411133 NR Description: expressed protein [Arabidopsis thaliana]
  misc_feature (91)..(201): Homolog of NCBI NO: 34905796 NR Description: P0401G10.24 [Oryza sativa (japonica
TKRPGLASSSSPSQLANAKSASATGQPESERAIRRRRQACRERAPLASKQPHPRGPRPLKVPASPARIAPARLGFPPPPERRGVGGGDEMAGRLLGQLLVMGGAVVGRAVVQAYRQAIVNAQRTGAAQEAVNGIRRASKAMTEQEARQILGISEKTSWEEIVKKYDTMFEKNAKSGSFYLQSKVHRAKECLESIYHDKPDIMN

SEQ ID NO: 62633 - protein, 136 aa, Triticum aestivum
  peptide (1)..(136): Ceres Seq. ID no. 13598380
KTARTRLLLLPLTTRQRQIRLRHRPARERASDSPPPSSLQGASPSRLQTASPSRPPSPQSPRVSRENRARPPRVSAAAGEEGSGRRGRDGRTAPRAAPRHGRRRRRQGRGPGLPPGHRQCTENRSCPGSCEWYSKG

SEQ ID NO: 62634 - protein, 114 aa, Triticum aestivum; identical to SEQ ID NO: 56143
  peptide (1)..(114): Ceres Seq. ID no. 13598381
  misc_feature (2)..(112): Pfam Name: Uncharacterised protein family (UPF0108) Pfam Description: Uncharacterised protein family (UPF0108)
  misc_feature (1)..(103): Homolog of NCBI NO: 24640407 NR Description: CG1409-PA [Drosophila melanogaster]
  misc_feature (1)..(103): Homolog of NCBI NO: 21064209 NR Description: AT29287p [Drosophila melanogaster]
  misc_feature (4)..(104): Homolog of NCBI NO: 19112141 NR Description: conserved hypothetical protein; similar to S.
  misc_feature (12)..(106): Homolog of NCBI NO: 10176880 NR Description: gene_id:MAC9.20~unknown protein [Arabidopsis
  misc_feature (1)..(106): Homolog of NCBI NO: 18424521 NR Description: auxin-regulated protein [Arabidopsis thaliana]
  misc_feature (12)..(111): Homolog of NCBI NO: 37535410 NR Description: putative pol polyprotein [Oryza sativa (japonica
  misc_feature (2)..(109): Homolog of NCBI NO: 11357639 NR Description: hypothetical protein F25L23.140 - Arabidopsis
  misc_feature (1)..(109): Homolog of NCBI NO: 18411133 NR Description: expressed protein [Arabidopsis thaliana]
  misc_feature (2)..(112): Homolog of NCBI NO: 34905796 NR Description: P0401G10.24 [Oryza sativa (japonica

SEQ ID NO: 62635 - DNA, 779 bp, Triticum aestivum
  misc_feature (1)..(779): Ceres Seq. ID no. 12587336
gaagcccctccctcccctgtgctccgtcttctatctcacctcccgtgatctctgccgtcccacctcccccgattcatcttcagatcgaggcttccggaggctgcatcgagagtagcaccgccacgcccaactccgctcccttccggcgctaatccatgctcagcagatctagtcgcgaaaaggacggcgccccgccgcccctgctggatccgccgagccagcggccggatctatcgagatgcgccgggatcccgagcctttctcctccccaccttctcctccgtcgacagtaggcagcagagcaaggcgcgggcgactgctccggccagaggagggcgtgaggtacaacgcgacctcactggggcgcgactccgtcagccagcaccggcgcccaactaggatccaccgaacccaggcgcggcctacggcaggcgtgcggttttgagttcaacaggagagctcgcgcgagattgagcgctcctcccatcttccagcgaacccaaaagagagcagaggaggagatgaccaagggcgttggtccgtcgatcggcatcgacctcgggatgacctactcctgcgttggcgtgtggcagcatgtcgacatcatgggcaacgaccaggccaccatggcaactgcaccacgccctcctacgtctccaccaccagcgacgccgccaggaaccaggtcgcaacgaactccaccaacaccgtcttctgtacgtgcatcaatatagaatttcttctagtacgcatcgtccaactctttttcatatgcacac

SEQ ID NO: 62636 - protein, 70 aa, Triticum aestivum
  peptide (1)..(70): Ceres Seq. ID no. 12587337
  misc_feature (1)..(38): Homolog of NCBI NO: 283043 NR Description: dnaK-type molecular chaperone (clone pMON9508) -
  misc_feature (1)..(38): Homolog of NCBI NO: 22341 NR Description: put. heat shock protein hsp70 (aa 1-70) (291 is
  misc_feature (3)..(38): Homolog of NCBI NO: 100440 NR Description: dnaK-type molecular chaperone hsp70 (clones D3
  misc_feature (3)..(38): Homolog of NCBI NO: 3986691 NR Description: heat shock protein [Cichorium intybus]
  misc_feature (3)..(38): Homolog of NCBI NO: 450881 NR Description: heat shock cognate 70-2 [Arabidopsis thaliana]
  misc_feature (3)..(38): Homolog of NCBI NO: 166765 NR Description: heat shock protein HSP70-1
  misc_feature (3)..(38): Homolog of NCBI NO: 99707 NR Description: dnaK-type molecular chaperone hsc70-2 -
  misc_feature (3)..(38): Homolog of NCBI NO: 21479 NR Description: 70-Kd heat shock protein [Solanum tuberosum]
  misc_feature (7)..(65): Homolog of NCBI NO: 8105 NR Description: reading frame ? [Drosophila melanogaster]
MTKGVGPSIGIDLGMTYSCVGVWQHVDIMGNDQATMATAPRPPTSPPPATPPGTRSQRTPPTPSSVRASI

SEQ ID NO: 62637 - protein, 68 aa, Triticum aestivum
  peptide (1)..(68): Ceres Seq. ID no. 12587338
MRRDPEPFSSPPSPPSTVGSRARRGRLLRPEEGVRYNATSLGRDSVSQHRRPTRIHRTQARPTAGVRF

SEQ ID NO: 62638 - protein, 61 aa, Triticum aestivum
  peptide (1)..(61): Ceres Seq. ID no. 12587339
MSTSWATTRPPWQLHHALLRLHHQRRRQEPGRNELHQHRLLYVHQYRISSSTHRPTLFHMH

SEQ ID NO: 62639 - DNA, 861 bp, Triticum aestivum
  misc_feature (1)..(861): Ceres Seq. ID no. 13655072
ccgattcccatccagcgtacagactaggcgacccccgcttcccgtcccctctctcctccacacgcctctctccctctcccctcgtccgccgccgccgccgccgccaccatgggcaggggcaagttcaagggcaagccaaccggccgccgcaacttctccaccccggaggagatcgcttctggaacttctgggcgtccacgctcgtttaagaagaatgtagctgaagcagaagaggaagaggaagaagtagaagaatctgaggaggaagaatccgaagacgacggtgaagagaagaaacataaaggaactgaaggtgttattcaaatcgaaaatccaaacctggtgaaagcaaagaatataaaagccaaagaagctgatcttggaaagacaactgaactctcgaggcgtgagagagaggagattgagaaacaaaaatctcatgagcgctatatgaagcttcaggagcaagggaaaacagaacaggcgaagaaagatttggaacgtcttgctttaataaggcagcaaagagcagatgctgcaaagaaacgcgaagaggagaaagctgctaaagaacagaggaagaccgaagcgcgcaaataactgccaaggtggtggaggcatgagctaagctgagctgtgttggctggatatttatttctatgcatcttagtatatttaaaccctggtctctattccatcatctacatttccataaaaaccgtgcattgacaagtgtaaagtagtcctgtcggcgtggcttgctgtaaacttgagcttggcagggtacacatttagtgagatcagcttatgtgagatttgctttcactcaaaaattggtatggaaaataactgttgaaattt

SEQ ID NO: 62640 - protein, 163 aa, Triticum aestivum; identical to SEQ ID NO: 51870
  peptide (1)..(163): Ceres Seq. ID no. 13655073
  misc_feature (35)..(163): Pfam Name: Caldesmon Pfam Description: Caldesmon
  misc_feature (54)..(162): Homolog of NCBI NO: 37779032 NR Description: kinase substrate HASPP28 [Pagrus major]
  misc_feature (3)..(155): Homolog of NCBI NO: 1518855 NR Description: HASPP28
  misc_feature (1)..(163): Homolog of NCBI NO: 1136586 NR Description: PDGF associated protein
  misc_feature (1)..(163): Homolog of NCBI NO: 30584165 NR Description: Homo sapiens PDGFA associated protein 1
  misc_feature (1)..(163): Homolog of NCBI NO: 7657441 NR Description: PDGFA associated protein 1; PDGF associated
  misc_feature (1)..(163): Homolog of NCBI NO: 12018258 NR Description: kinase substrate HASPP28 [Rattus norvegicus]
  misc_feature (1)..(161): Homolog of NCBI NO: 28278503 NR Description: Similar to PDGFA associated protein 1 [Danio
  misc_feature (1)..(163): Homolog of NCBI NO: 31418215 NR Description: Unknown (protein for MGC:56344) [Danio rerio]
  misc_feature (1)..(163): Homolog of NCBI NO: 18422620 NR Description: expressed protein [Arabidopsis thaliana]
  misc_feature (1)..(152): Homolog of NCBI NO: 34909600 NR Description: P0435B05.20 [Oryza sativa (japonica

SEQ ID NO: 62641 - DNA, 913 bp, Triticum aestivum
  misc_feature (1)..(913): Ceres Seq. ID no. 13580026
ccgagagccaggtttgccctagccccttgccgcgcaccggatcgccacctcttccgacttccgcggccgcataaactgtcgaaaccacaactccacaaatttgcctcccctctttccccaggttaaacaacccatccggagccggagaacgycagaagaatccagaggcaccyccgagtttgttggcgatgttgcgcgcgggaggaagccggctcgtcgcccccggactccggcgkctcctcggcccggrsgccggsgagagggctgcgccggggctggcggcggcgggggcgggggcgagggcgtaccacgagcgggtggtggaccactacaacaacccgcggaacgtcgggtcyttcgacaaggacgaccccnacgtcggcaccgggctsgtcggcgcgccggcctgcggcgacgtcatgaagctkcagatccgtgtcgacgaaggcaccgggaagatmgtcgacgcctgcttcaagaccttcggctgcggctcygcaatcgcgtcgtcctccgtccgctactgaatgggtgaagggaaagcaaatggaggaagtagtgagtatcaagaacactgagattgcaawgcacttgtcacttccaccagtaaagctccattgcagtatgcttgctgaagatgcaattaaagctgccgtgaaagattatgaatcaaagaaggcgaagctgggagacagccctgcagagaaggctgccgaagcatgaacatgatatatgcttctgttctatgagggtgagaaatggtgtgcaatgttgacaaactccagtgttgtagcatgtatcataaggatgaacacgaacaacttgaaataaatgtgatgtcatgttaggagaagttgtgcatgtatagcagctgctaagaaaatttgtgcatgtatagcaactgctggaagtc

SEQ ID NO: 62642 - protein, 112 aa, Triticum aestivum
  peptide (1)..(112): Ceres Seq. ID no. 15222711
  misc_feature (39)..(112): Pfam Name: NifU-like N terminal domain Pfam Description: NifU-like N terminal domain
  misc_feature (27)..(112): Homolog of NCBI NO: 11545707 NR Description: ISCU2 [Homo sapiens]
  misc_feature (27)..(112): Homolog of NCBI NO: 21313484 NR Description: nitrogen fixation cluster-like [Mus musculus]
  misc_feature (27)..(112): Homolog of NCBI NO: 20381021 NR Description: Nifu-pending protein [Mus musculus]
  misc_feature (27)..(112): Homolog of NCBI NO: 27666566 NR Description: similar to RIKEN cDNA 2310020H20 gene
  misc_feature (37)..(112): Homolog of NCBI NO: 15233385 NR Description: NifU-related metallocluster assembly factor
  misc_feature (25)..(110): Homolog of NCBI NO: 15232028 NR Description: hypothetical protein [Arabidopsis thaliana]
  misc_feature (17)..(112): Homolog of NCBI NO: 16798388 NR Description: iron-sulfur cluster assembly protein IscU
  misc_feature (38)..(112): Homolog of NCBI NO: 21595581 NR Description: nifU-like protein [Arabidopsis thaliana]
  misc_feature (38)..(112): Homolog of NCBI NO: 15235569 NR Description: iron-sulfur cluster assembly complex protein,
  misc_feature (1)..(112): Homolog of NCBI NO: 34912076 NR Description: putative nifU-like protein
  misc_feature (16)..(16): Xaa is any aa, unknown or other
  misc_feature (21)..(21): Xaa is any aa, unknown or other
  misc_feature (23)..(23): Xaa is any aa, unknown or other
  misc_feature (56)..(56): Xaa is any aa, unknown or other
  misc_feature (63)..(63): Xaa is any aa, unknown or other
  misc_feature (68)..(68): Xaa is any aa, unknown or other
  misc_feature (80)..(80): Xaa is any aa, unknown or other
  misc_feature (91)..(91): Xaa is any aa, unknown or other
  misc_feature (103)..(103): Xaa is any aa, unknown or other
MLRAGGSRLVAPGLRXLLGPXAXERAAPGLAAAGAGARAYHERVVDHYNNPRNVGXFDKDDPXVGTGXVGAPACGDVMKXQIRVDEGTGKXVDACFKTFGCGXAIASSSVRY

SEQ ID NO: 62643 - protein, 58 aa, Triticum aestivum
  peptide (1)..(58): Ceres Seq. ID no. 15222712
  misc_feature (1)..(54): Homolog of NCBI NO: 11545707 NR Description: ISCU2 [Homo sapiens]
  misc_feature (1)..(54): Homolog of NCBI NO: 21313484 NR Description: nitrogen fixation cluster-like [Mus musculus]
  misc_feature (1)..(54): Homolog of NCBI NO: 20381021 NR Description: Nifu-pending protein [Mus musculus]
  misc_feature (1)..(54): Homolog of NCBI NO: 27666566 NR Description: similar to RIKEN cDNA 2310020H20 gene
  misc_feature (1)..(53): Homolog of NCBI NO: 15233385 NR Description: NifU-related metallocluster assembly factor
  misc_feature (1)..(58): Homolog of NCBI NO: 15232028 NR Description: hypothetical protein [Arabidopsis thaliana]
  misc_feature (1)..(52): Homolog of NCBI NO: 16798388 NR Description: iron-sulfur cluster assembly protein IscU
  misc_feature (1)..(58): Homolog of NCBI NO: 21595581 NR Description: nifU-like protein [Arabidopsis thaliana]
  misc_feature (1)..(58): Homolog of NCBI NO: 15235569 NR Description: iron-sulfur cluster assembly complex protein,
  misc_feature (1)..(58): Homolog of NCBI NO: 34912076 NR Description: putative nifU-like protein
  misc_feature (14)..(14): Xaa is any aa, unknown or other
MEEVVSIKNTEIAXHLSLPPVKLHCSMLAEDAIKAAVKDYESKKAKLGDSPAEKAAEA

SEQ ID NO: 62644 - DNA, 1092 bp, Triticum aestivum
  misc_feature (1)..(1092): Ceres Seq. ID no. 13598386
aaaaatagcatctcaccccacccatggacaccgacctcgacctggacgccctcctcgcctccttcgccggcgagtccgccgcagtctccgagctcctcgccccgcctccgctcgatgcggcggaggcggggtcgccggagtcggtgacctcccggtccagccacgccggcgaggaggtgctgtcggagatcgagaggtttctgatgcaggaggacgaggcggcgggggcggagccggtggacgggatcagcgtggatgagttcttcgacgcgctgttcgatggtggggaggaggggggcgagaaggggaacgggagtgaggctgaggctgggggcagcaccgatggggactctaggagggaggaagaaggggtggaggtggtgacgccggagacagaggcggaggtggtgacgcccgaaacggaggtcgatggcgatgatcccatcagcaagaagaagaggaggcaaatgaggaatagggattctgccatgaaatcaagggrgaggaagaagtcatatgtgaaggrcttggagacgaagagcaagtatcttgaggcggagtgtcgccgcctcagctacgcacttcagtgctgcgcagctgagaacatggcactgcgccagaacatgttgaaggataggcctattggtgctcacacagccatgcaggagtctgccgtactttcggaaaccctgccgctggtttccctgctttggctagtgagcatcgtgtgcctattcctaacgcccggtctacccaaccgaagcctggcggctccaaggagagccgaaagaggtctcgcaatggtagccggaaagccaagcagtgatcaaccagagaccttggagcttctaccccatggaaggcgctggaggggcacaagggagaggatcaagctagatgctccgccattgcgtgcagctgccgcttgctagactagtgccagcttattcgcaagtttccagtatgtagtgtagttagcaatgaatgtctaaatatgtgttctcttgctgccaccgtggctttatccatgactatcttctgctctctctgttcgcgtkgttttgatgatcttctaatcagatgctagttttg

SEQ ID NO: 62645 - protein, 302 aa, Triticum aestivum
  peptide (1)..(302): Ceres Seq. ID no. 15222334
  misc_feature (139)..(203): Pfam Name: bZIP transcription factor Pfam Description: bZIP transcription factor
  misc_feature (64)..(201): Homolog of NCBI NO: 34904784 NR Description: transcription factor-like protein
  misc_feature (53)..(298): Homolog of NCBI NO: 15217559 NR Description: bZIP family transcription factor [Arabidopsis
  misc_feature (160)..(160): Xaa is any aa, unknown or other
  misc_feature (168)..(168): Xaa is any aa, unknown or other
MDTDLDLDALLASFAGESAAVSELLAPPPLDAAEAGSPESVTSRSSHAGEEVLSEIERFLMQEDEAAGAEPVDGISVDEFFDALFDGGEEGGEKGNGSEAEAGGSTDGDSRREEEGVEVVTPETEAEVVTPETEVDGDDPISKKKRRQMRNRDSAMKSRXRKKSYVKXLETKSKYLEAECRRLSYALQCCAAENMALRQNMLKDRPIGAHTAMQESAVLSETLPLVSLLWLVSIVCLFLTPGLPNRSLAAPRRAERGLAMVAGKPSSDQPETLELLPHGRRWRGTRERIKLDAPPLRAAAAC

SEQ ID NO: 62646 - protein, 242 aa, Triticum aestivum
  peptide (1)..(242): Ceres Seq. ID no. 15222335
  misc_feature (79)..(143): Pfam Name: bZIP transcription factor Pfam Description: bZIP transcription factor
  misc_feature (4)..(141): Homolog of NCBI NO: 34904784 NR Description: transcription factor-like protein
  misc_feature (1)..(238): Homolog of NCBI NO: 15217559 NR Description: bZIP family transcription factor [Arabidopsis
  misc_feature (100)..(100): Xaa is any aa, unknown or other
  misc_feature (108)..(108): Xaa is any aa, unknown or other
MQEDEAAGAEPVDGISVDEFFDALFDGGEEGGEKGNGSEAEAGGSTDGDSRREEEGVEVVTPETEAEVVTPETEVDGDDPISKKKRRQMRNRDSAMKSRXRKKSYVKXLETKSKYLEAECRRLSYALQCCAAENMALRQNMLKDRPIGAHTAMQESAVLSETLPLVSLLWLVSIVCLFLTPGLPNRSLAAPRRAERGLAMVAGKPSSDQPETLELLPHGRRWRGTRERIKLDAPPLRAAAAC

SEQ ID NO: 62647 - protein, 154 aa, Triticum aestivum
  peptide (1)..(154): Ceres Seq. ID no. 15222336
  misc_feature (1)..(55): Pfam Name: bZIP transcription factor Pfam Description: bZIP transcription factor
  misc_feature (1)..(53): Homolog of NCBI NO: 34904784 NR Description: transcription factor-like protein
  misc_feature (1)..(150): Homolog of NCBI NO: 15217559 NR Description: bZIP family transcription factor [Arabidopsis
  misc_feature (12)..(12): Xaa is any aa, unknown or other
  misc_feature (20)..(20): Xaa is any aa, unknown or other
MRNRDSAMKSRXRKKSYVKXLETKSKYLEAECRRLSYALQCCAAENMALRQNMLKDRPIGAHTAMQESAVLSETLPLVSLLWLVSIVCLFLTPGLPNRSLAAPRRAERGLAMVAGKPSSDQPETLELLPHGRRWRGTRERIKLDAPPLRAAAAC

SEQ ID NO: 62648 - DNA, 777 bp, Triticum aestivum
  misc_feature (1)..(777): Ceres Seq. ID no. 12584790
acatcctaatcgaaaaagttccgtcccattattggttcttgcgaggaggggggcggagaaacggaagcaggaggcagagaggagatcgagccagagggcggcgagcaagggcgcgatggcgtccaagaggatacagaaggagcttaaggatctgcagaaggacccccctacctcatgcagcgcaggtcctgtgggtgaagatatgttccattggcaggcaacaataatgggcccatctgacagcccatattctggtggagttttcctagttactatccacttccctcctgattatcctttcaaaccaccaaaggtggcattccgcaccaaggtgttccatccaaacatcaacagcaacgggagcatttgtctggacatcctcaaggaccaatggagccccgctctgaccatttccaaggtgctgctgtccatctgctccctgctgtatgacccgaaccctgatgaccctctggtccctgagatcgcccacatgtacaagacggaccggcacaagtacgagagcaccgccaggacctggacgcaaaggtatgccatgtaatgcaagacggcggatgggtcgccggagtcagtcttgtttgtaacattctcgatcagttcgtgtgtgcccgcccagtgtgtcacctgtctgtcaaactggcactcgttgctcaactgtgtcacctggcgcagtgacttggaacatggaaccggtgttgcatattttggattcagataaatgtagccacctgcctgccacttaaaaaaaaaaaaaaaaaa

SEQ ID NO: 62649 - protein, 185 aa, Triticum aestivum
  peptide (1)..(185): Ceres Seq. ID no. 12584791
  misc_feature (39)..(185): Homolog of NCBI NO: 441457 NR Description: ubiquitin conjugating enzyme E2 [Lycopersicon
  misc_feature (39)..(185): Homolog of NCBI NO: 18423494 NR Description: E2, ubiquitin-conjugating enzyme 10 (UBC10)
  misc_feature (39)..(185): Homolog of NCBI NO: 19347859 NR Description: putative E2, ubiquitin-conjugating enzyme UBC9
  misc_feature (39)..(185): Homolog of NCBI NO: 5762457 NR Description: ubiquitin-conjugating enzyme UBC2
  misc_feature (39)..(185): Homolog of NCBI NO: 18408001 NR Description: E2, ubiquitin-conjugating enzyme, putative
  misc_feature (19)..(181): Homolog of NCBI NO: 34911986 NR Description: P0694A04.26 [Oryza sativa (japonica
  misc_feature (39)..(185): Homolog of NCBI NO: 30687803 NR Description: ubiquitin-conjugating enzyme 9 (UBC9)
  misc_feature (39)..(185): Homolog of NCBI NO: 18417097 NR Description: E2, ubiquitin-conjugating enzyme 9 (UBC9)
  misc_feature (39)..(185): Homolog of NCBI NO: 11762186 NR Description: AT4g27960 [Arabidopsis thaliana]
  misc_feature (39)..(185): Homolog of NCBI NO: 20152203 NR Description: ubiquitin-conjugating enzyme OsUBC5a
HPNRKSSVPLLVLARRGAEKRKQEAERRSSQRAASKGAMASKRIQKELKDLQKDPPTSCSAGPVGEDMFHWQATIMGPSDSPYSGGVFLVTIHFPPDYPFKPPKVAFRTKVFHPNINSNGSICLDILKDQWSPALTISKVLLSICSLLYDPNPDDPLVPEIAHMYKTDRHKYESTARTWTQRYAM

SEQ ID NO: 62650 - protein, 147 aa, Triticum aestivum
  peptide (1)..(147): Ceres Seq. ID no. 12584792
  misc_feature (1)..(147): Homolog of NCBI NO: 441457 NR Description: ubiquitin conjugating enzyme E2 [Lycopersicon
  misc_feature (1)..(147): Homolog of NCBI NO: 18423494 NR Description: E2, ubiquitin-conjugating enzyme 10 (UBC10)
  misc_feature (1)..(147): Homolog of NCBI NO: 19347859 NR Description: putative E2, ubiquitin-conjugating enzyme UBC9
  misc_feature (1)..(147): Homolog of NCBI NO: 5762457 NR Description: ubiquitin-conjugating enzyme UBC2
  misc_feature (1)..(147): Homolog of NCBI NO: 18408001 NR Description: E2, ubiquitin-conjugating enzyme, putative
  misc_feature (1)..(143): Homolog of NCBI NO: 34911986 NR Description: P0694A04.26 [Oryza sativa (japonica
  misc_feature (1)..(147): Homolog of NCBI NO: 30687803 NR Description: ubiquitin-conjugating enzyme 9 (UBC9)
  misc_feature (1)..(147): Homolog of NCBI NO: 18417097 NR Description: E2, ubiquitin-conjugating enzyme 9 (UBC9)
  misc_feature (1)..(147): Homolog of NCBI NO: 11762186 NR Description: AT4g27960 [Arabidopsis thaliana]
  misc_feature (1)..(147): Homolog of NCBI NO: 20152203 NR Description: ubiquitin-conjugating enzyme OsUBC5a
MASKRIQKELKDLQKDPPTSCSAGPVGEDMFHWQATIMGPSDSPYSGGVFLVTIHFPPDYPFKPPKVAFRTKVFHPNINSNGSICLDILKDQWSPALTISKVLLSICSLLYDPNPDDPLVPEIAHMYKTDRHKYESTARTWTQRYAM

SEQ ID NO: 62651 - protein, 118 aa, Triticum aestivum
  peptide (1)..(118): Ceres Seq. ID no. 12584793
  misc_feature (1)..(118): Homolog of NCBI NO: 441457 NR Description: ubiquitin conjugating enzyme E2 [Lycopersicon
  misc_feature (1)..(118): Homolog of NCBI NO: 18423494 NR Description: E2, ubiquitin-conjugating enzyme 10 (UBC10)
  misc_feature (1)..(118): Homolog of NCBI NO: 19347859 NR Description: putative E2, ubiquitin-conjugating enzyme UBC9
  misc_feature (1)..(118): Homolog of NCBI NO: 5762457 NR Description: ubiquitin-conjugating enzyme UBC2
  misc_feature (1)..(118): Homolog of NCBI NO: 18408001 NR Description: E2, ubiquitin-conjugating enzyme, putative
  misc_feature (1)..(114): Homolog of NCBI NO: 34911986 NR Description: P0694A04.26 [Oryza sativa (japonica
  misc_feature (1)..(118): Homolog of NCBI NO: 30687803 NR Description: ubiquitin-conjugating enzyme 9 (UBC9)
  misc_feature (1)..(118): Homolog of NCBI NO: 18417097 NR Description: E2, ubiquitin-conjugating enzyme 9 (UBC9)
  misc_feature (1)..(118): Homolog of NCBI NO: 11762186 NR Description: AT4g27960 [Arabidopsis thaliana]
  misc_feature (1)..(118): Homolog of NCBI NO: 20152203 NR Description: ubiquitin-conjugating enzyme OsUBC5a
MFHWQATIMGPSDSPYSGGVFLVTIHFPPDYPFKPPKVAFRTKVFHPNINSNGSICLDILKDQWSPALTISKVLLSICSLLYDPNPDDPLVPEIAHMYKTDRHKYESTARTWTQRYAM

SEQ ID NO: 62652 - DNA, 1937 bp, Triticum aestivum
  misc_feature (1)..(1937): Ceres Seq. ID no. 14314088
ctattccaccgccccccttcctcccgccaccagcccaacctcgccgccggcctcactctccctctatcctccgccccaccgcccggcctcccaccaccggagcgcgccgccctccccgtcgaagaaaccagaacccctcgccctccgcgtgccctcgtcagctcggccgcgatgatctccgccatgtcctgggtccccaggggcgccgccaagagcgtccccatcgaggcggagccgcccaccaaggaggagatcgaggaggccatgaagaaaatcgccctcggcagagaggccgggagcgacgccgacgacgcggacggggacgaggacgacgacgccgtgatggaggtcgacggcgccgaggacgaggaggtcgacgaggtcgcccaggccaaggccgccgccaaggcgctcgggaccaagagcagctcgggctcggccgccgtcggcgacgtttccgacgggctcgccgagctcaacatggacgcctacgacgacgaggaggatgggctcgagcttttcagcaccgggctgggggacttgtactacaagagcaacgaggaggacccctatatcatcaagaacgaagaagatgatgatggcgaggatgacgatgaggagattgaggacatgactatcaaacctactgatatagtcattgtttgtgctcataacgaggatgaattcaattctctccaggttagtatagtggaagaactggaagatggggatcctaatatgtttgtgcaccatgaggtccctctctcagattttccgctctgcacagcttggatggattttaaccgtcaggatggcgaacagaaaggaaatttcatagctgttggcaccatggatcctacaattgaaatatggaacttggatgtcgtcgacgaggtcgaaccacattatgtgctaggaggagtttcaaaaaagaagaagaaagttaaggggaaaaagggaaaaacatataagaagggtagccatagaagttctgtgcttggtcttgcgtggaacacggtggtgaggaatgctctagctagtgcaagtgcagacaaaactgtgaaagtttgggacttaagtgctggtaaatgtttagtcacactgcaacatcatgatgacaaggttcaatcagttgcctggaggtcacctgaagttcttctcagtggatcttttgatagaacaattgccatgacagatatgaaagacagtggacaatgttgtcataaatggcctgtcgaagcagatgtagagagcttagtttgtgatccacacaatgaacactcctttgtggttagtcttgaaaatgggatggttcaagtatttgatattcggacagcttcatcaaattcaaatcctggacagccgatttttactctgcatgcacacgaaaaggccgtttcttccatatctttcgcaccttctacccctaattttcttgcgactggttcaactgacaaaatggtgaagctctgggatctatcgaataaccagccttcgtgtgtctcgtcgctgaatcctaagcttggagctatattctcggtgtcgttttcgatcgacaaccccttcctgttagcgtgcggaggatcgaaaggcaaactgaaggtctggaacacactgtctgaacccgccgtcgccaacaaatttggtaaggggcggcaaattgcaccagctctgcgaagcgaatcccccacagaatgatgggctcgagctgtttctggctatgtggtagaatagattttttcgcgtttcagttttgttactgggtgcaatgtaatgggagcatggatttatttatatatgtacaaccaaacgacagctgaaatggatctgtagcgggagttcgcagtttatcatggattccgttttatttggacctagaaaaaggaagtcaaagatagctgttttatactccctctgtttcaaatgtttcaaaatgc

SEQ ID NO: 62653 - protein, 565 aa, Triticum aestivum
  peptide (1)..(565): Ceres Seq. ID no. 14314089
  misc_feature (454)..(537): Pfam Name: WD domain, G-beta repeat Pfam Description: WD domain, G-beta repeat
  misc_feature (75)..(554): Homolog of NCBI NO: 13096812 NR Description: periodic tryptophan protein 1 homolog [Mus
  misc_feature (75)..(555): Homolog of NCBI NO: 34862412 NR Description: similar to periodic tryptophan protein 1 homolog
  misc_feature (167)..(552): Homolog of NCBI NO: 28829827 NR Description: similar to Expressed protein
  misc_feature (75)..(565): Homolog of NCBI NO: 29436469 NR Description: Unknown (protein for MGC:56486) [Danio rerio]
  misc_feature (121)..(548): Homolog of NCBI NO: 19112681 NR Description: WD repeat protein; periodic tryptophan protein 1
  misc_feature (56)..(548): Homolog of NCBI NO: 40746560 NR Description: hypothetical protein AN0310.2 [Aspergillus
  misc_feature (57)..(550): Homolog of NCBI NO: 32422969 NR Description: hypothetical protein [Neurospora crassa]
  misc_feature (116)..(556): Homolog of NCBI NO: 18415193 NR Description: transducin / WD-40 repeat protein family
  misc_feature (102)..(550): Homolog of NCBI NO: 20161737 NR Description: B1033B05.3 [Oryza sativa (japonica
  misc_feature (58)..(552): Homolog of NCBI NO: 18415195 NR Description: transducin / WD-40 repeat protein family
LFHRPPSSRHQPNLAAGLTLPLSSAPPPGLPPPERAALPVEETRTPRPPRALVSSAAMISAMSWVPRGAAKSVPIEAEPPTKEEIEEAMKKIALGREAGSDADDADGDEDDDAVMEVDGAEDEEVDEVAQAKAAAKALGTKSSSGSAAVGDVSDGLAELNMDAYDDEEDGLELFSTGLGDLYYKSNEEDPYIIKNEEDDDGEDDDEEIEDMTIKPTDIVIVCAHNEDEFNSLQVSIVEELEDGDPNMFVHHEVPLSDFPLCTAWMDFNRQDGEQKGNFIAVGTMDPTIEIWNLDVVDEVEPHYVLGGVSKKKKKVKGKKGKTYKKGSHRSSVLGLAWNTVVRNALASASADKTVKVWDLSAGKCLVTLQHHDDKVQSVAWRSPEVLLSGSFDRTIAMTDMKDSGQCCHKWPVEADVESLVCDPHNEHSFVVSLENGMVQVFDIRTASSNSNPGQPIFTLHAHEKAVSSISFAPSTPNFLATGSTDKMVKLWDLSNNQPSCVSSLNPKLGAIFSVSFSIDNPFLLACGGSKGKLKVWNTLSEPAVANKFGKGRQIAPALRSESPTE

SEQ ID NO: 62654 - protein, 508 aa, Triticum aestivum
  peptide (1)..(508): Ceres Seq. ID no. 14314090
  misc_feature (397)..(480): Pfam Name: WD domain, G-beta repeat Pfam Description: WD domain, G-beta repeat
  misc_feature (18)..(497): Homolog of NCBI NO: 13096812 NR Description: periodic tryptophan protein 1 homolog [Mus
  misc_feature (18)..(498): Homolog of NCBI NO: 34862412 NR Description: similar to periodic tryptophan protein 1 homolog
  misc_feature (110)..(495): Homolog of NCBI NO: 28829827 NR Description: similar to Expressed protein
  misc_feature (18)..(508): Homolog of NCBI NO: 29436469 NR Description: Unknown (protein for MGC:56486) [Danio rerio]
  misc_feature (64)..(491): Homolog of NCBI NO: 19112681 NR Description: WD repeat protein; periodic tryptophan protein 1
  misc_feature (1)..(491): Homolog of NCBI NO: 40746560 NR Description: hypothetical protein AN0310.2 [Aspergillus
  misc_feature (1)..(493): Homolog of NCBI NO: 32422969 NR Description: hypothetical protein [Neurospora crassa]
  misc_feature (59)..(499): Homolog of NCBI NO: 18415193 NR Description: transducin / WD-40 repeat protein family
  misc_feature (45)..(493): Homolog of NCBI NO: 20161737 NR Description: B1033B05.3 [Oryza sativa (japonica
  misc_feature (1)..(495): Homolog of NCBI NO: 18415195 NR Description: transducin / WD-40 repeat protein family
MISAMSWVPRGAAKSVPIEAEPPTKEEIEEAMKKIALGREAGSDADDADGDEDDDAVMEVDGAEDEEVDEVAQAKAAAKALGTKSSSGSAAVGDVSDGLAELNMDAYDDEEDGLELFSTGLGDLYYKSNEEDPYIIKNEEDDDGEDDDEEIEDMTIKPTDIVIVCAHNEDEFNSLQVSIVEELEDGDPNMFVHHEVPLSDFPLCTAWMDFNRQDGEQKGNFIAVGTMDPTIEIWNLDVVDEVEPHYVLGGVSKKKKKVKGKKGKTYKKGSHRSSVLGLAWNTVVRNALASASADKTVKVWDLSAGKCLVTLQHHDDKVQSVAWRSPEVLLSGSFDRTIAMTDMKDSGQCCHKWPVEADVESLVCDPHNEHSFVVSLENGMVQVFDIRTASSNSNPGQPIFTLHAHEKAVSSISFAPSTPNFLATGSTDKMVKLWDLSNNQPSCVSSLNPKLGAIFSVSFSIDNPFLLACGGSKGKLKVWNTLSEPAVANKFGKGRQIAPALRSESPTE

SEQ ID NO: 62655 - protein, 504 aa, Triticum aestivum
  peptide (1)..(504): Ceres Seq. ID no. 14314091
  misc_feature (393)..(476): Pfam Name: WD domain, G-beta repeat Pfam Description: WD domain, G-beta repeat
  misc_feature (14)..(493): Homolog of NCBI NO: 13096812 NR Description: periodic tryptophan protein 1 homolog [Mus
  misc_feature (14)..(494): Homolog of NCBI NO: 34862412 NR Description: similar to periodic tryptophan protein 1 homolog
  misc_feature (106)..(491): Homolog of NCBI NO: 28829827 NR Description: similar to Expressed protein
  misc_feature (14)..(504): Homolog of NCBI NO: 29436469 NR Description: Unknown (protein for MGC:56486) [Danio rerio]
  misc_feature (60)..(487): Homolog of NCBI NO: 19112681 NR Description: WD repeat protein; periodic tryptophan protein 1
  misc_feature (1)..(487): Homolog of NCBI NO: 40746560 NR Description: hypothetical protein AN0310.2 [Aspergillus
  misc_feature (1)..(489): Homolog of NCBI NO: 32422969 NR Description: hypothetical protein [Neurospora crassa]
  misc_feature (55)..(495): Homolog of NCBI NO: 18415193 NR Description: transducin / WD-40 repeat protein family
  misc_feature (41)..(489): Homolog of NCBI NO: 20161737 NR Description: B1033B05.3 [Oryza sativa (japonica
  misc_feature (1)..(491): Homolog of NCBI NO: 18415195 NR Description: transducin / WD-40 repeat protein family
MSWVPRGAAKSVPIEAEPPTKEEIEEAMKKIALGREAGSDADDADGDEDDDAVMEVDGAEDEEVDEVAQAKAAAKALGTKSSSGSAAVGDVSDGLAELNMDAYDDEEDGLELFSTGLGDLYYKSNEEDPYIIKNEEDDDGEDDDEEIEDMTIKPTDIVIVCAHNEDEFNSLQVSIVEELEDGDPNMFVHHEVPLSDFPLCTAWMDFNRQDGEQKGNFIAVGTMDPTIEIWNLDVVDEVEPHYVLGGVSKKKKKVKGKKGKTYKKGSHRSSVLGLAWNTVVRNALASASADKTVKVWDLSAGKCLVTLQHHDDKVQSVAWRSPEVLLSGSFDRTIAMTDMKDSGQCCHKWPVEADVESLVCDPHNEHSFVVSLENGMVQVFDIRTASSNSNPGQPIFTLHAHEKAVSSISFAPSTPNFLATGSTDKMVKLWDLSNNQPSCVSSLNPKLGAIFSVSFSIDNPFLLACGGSKGKLKVWNTLSEPAVANKFGKGRQIAPALRSESPTE

SEQ ID NO: 62656 - DNA, 1257 bp, Triticum aestivum
  misc_feature (1)..(1257): Ceres Seq. ID no. 13598714
agaacatcctaatcgaaaatcatcgagctcgcaycacargagttayctctrgctagtcrcgtcrcatcaaagccgaagaagcaatggccgccttcgccaccaggtcsgcggccttcctyggcctcgccgycgtgctctgtktcctcgycggcgmggcgagcgcgcagcagctctckcccarcttctactcgaggtcttgccccaacctggcgtccatcgtgcggtcggggatgacckccgcrttgcagacggagaggcggatgggcgcgtccatcctccgcctcttcttccacgactgcttcgtcaatgggtgtgacggctcsattctgcttgacgacacstcgacgttcaccggcgagaagaacgccgggccgaacgccaactcggcscgygggttcgaggtgatcgacgccmtcaagacccrggtcgargccgcgtgcagggccaccgtctcctgcgccgacatcctcgcgctcgccgcccgtgacggagtcaacctgctcggaggtcccacctggagcgtgccgctggggcgcaaggactcgcgcacggcgagtcagagcgcggccaacgcgaacctgccggggcccggctccagcctcgccacgctcatcaccatgttcggcaacaagaacctgtcgccgcgggacatgacggcgctctccggcgcgcacaccatcgggcggtcgcagtgccagttctttcgcaaccgcatctacaacgagcgcaacatcaacgccagcttcgcggcgctgcggcagcggacgtgcccgcggtccggcggcaacggcaacctcgcgcccttcgacgtgcagaccgccgacgggttcgacaacgcatactaccagaacctggtggggcagcgcggcctcctgcactcggaccaggagctcttcaacggcgggtcgcaggatgcgctggtgaggcagtacagcaacagccccagccagttctccgccgacttcgtcacggccatgcttaagatgggcggcctgctgtgtatgtattaatgtgtatgtatgaagaagaacaccaaataatgattgatgccttggaaaaccaggcattggtcaggttcacgtatgtatgtgttaatgtgtatgtatgaagaagaacaccaaatgtacaaacgctcgtttgctcaatccggggcgaacgtgcaaactacaaagtatcaaaatgtacgttggtcgtaaaagtgtatcatcatcaacatcatcaatacagaataatgggatggtgcaatcatcataactg

SEQ ID NO: 62657 - protein, 308 aa, Triticum aestivum
  peptide (1)..(308): Ceres Seq. ID no. 15222409
  misc_feature (46)..(286): Pfam Name: Peroxidase Pfam Description: Peroxidase
  misc_feature (8)..(304): Homolog of NCBI NO: 2117618 NR Description: peroxidase (EC 1.11.1.7) 1 precursor - wheat
  misc_feature (9)..(304): Homolog of NCBI NO: 7433058 NR Description: peroxidase (EC 1.11.1.7) - radish
  misc_feature (29)..(304): Homolog of NCBI NO: 520568 NR Description: peroxidase
  misc_feature (14)..(304): Homolog of NCBI NO: 5381253 NR Description: peroxidase [Nicotiana tabacum]
  misc_feature (25)..(304): Homolog of NCBI NO: 34903770 NR Description: unnamed protein product [Oryza sativa (japonica
  misc_feature (17)..(304): Homolog of NCBI NO: 7433047 NR Description: probable peroxidase (EC 1.11.1.7) (clone PC23) -
  misc_feature (29)..(304): Homolog of NCBI NO: 15239075 NR Description: peroxidase, putative [Arabidopsis thaliana]
  misc_feature (29)..(304): Homolog of NCBI NO: 464365 NR Description: Peroxidase P7 (TP7)
  misc_feature (21)..(304): Homolog of NCBI NO: 7433049 NR Description: peroxidase (EC 1.11.1.7) - flax (fragment)
  misc_feature (17)..(304): Homolog of NCBI NO: 5453379 NR Description: bacterial-induced peroxidase precursor [Gossypium
  misc_feature (8)..(8): Xaa is any aa, unknown or other
  misc_feature (12)..(12): Xaa is any aa, unknown or other
  misc_feature (16)..(16): Xaa is any aa, unknown or other
  misc_feature (20)..(20): Xaa is any aa, unknown or other
  misc_feature (22)..(22): Xaa is any aa, unknown or other
  misc_feature (24)..(24): Xaa is any aa, unknown or other
  misc_feature (31)..(31): Xaa is any aa, unknown or other
  misc_feature (33)..(33): Xaa is any aa, unknown or other
  misc_feature (52)..(52): Xaa is any aa, unknown or other
  misc_feature (53)..(53): Xaa is any aa, unknown or other
  misc_feature (80)..(80): Xaa is any aa, unknown or other
  misc_feature (86)..(86): Xaa is any aa, unknown or other
  misc_feature (102)..(102): Xaa is any aa, unknown or other
  misc_feature (103)..(103): Xaa is any aa, unknown or other
  misc_feature (111)..(111): Xaa is any aa, unknown or other
  misc_feature (114)..(114): Xaa is any aa, unknown or other
  misc_feature (116)..(116): Xaa is any aa, unknown or other
MAAFATRXAAFXGLAXVLCXLXGXASAQQLXPXFYSRSCPNLASIVRSGMTXXLQTERRMGASILRLFFHDCFVNGCDGXILLDDXSTFTGEKNAGPNANSXXGFEVIDAXKTXVXAACRATVSCADILALAARDGVNLLGGPTWSVPLGRKDSRTASQSAANANLPGPGSSLATLITMFGNKNLSPRDMTALSGAHTIGRSQCQFFRNRIYNERNINASFAALRQRTCPRSGGNGNLAPFDVQTADGFDNAYYQNLVGQRGLLHSDQELFNGGSQDALVRQYSNSPSQFSADFVTAMLKMGGLLCMY

SEQ ID NO: 62658 - protein, 259 aa, Triticum aestivum
  peptide (1)..(259): Ceres Seq. ID no. 15222410
  misc_feature (1)..(237): Pfam Name: Peroxidase Pfam Description: Peroxidase
  misc_feature (1)..(255): Homolog of NCBI NO: 2117618 NR Description: peroxidase (EC 1.11.1.7) 1 precursor - wheat
  misc_feature (1)..(255): Homolog of NCBI NO: 7433058 NR Description: peroxidase (EC 1.11.1.7) - radish
  misc_feature (1)..(255): Homolog of NCBI NO: 520568 NR Description: peroxidase
  misc_feature (1)..(255): Homolog of NCBI NO: 5381253 NR Description: peroxidase [Nicotiana tabacum]
  misc_feature (1)..(255): Homolog of NCBI NO: 34903770 NR Description: unnamed protein product [Oryza sativa (japonica
  misc_feature (1)..(255): Homolog of NCBI NO: 7433047 NR Description: probable peroxidase (EC 1.11.1.7) (clone PC23) -
  misc_feature (1)..(255): Homolog of NCBI NO: 15239075 NR Description: peroxidase, putative [Arabidopsis thaliana]
  misc_feature (1)..(255): Homolog of NCBI NO: 464365 NR Description: Peroxidase P7 (TP7)
  misc_feature (1)..(255): Homolog of NCBI NO: 7433049 NR Description: peroxidase (EC 1.11.1.7) - flax (fragment)
  misc_feature (1)..(255): Homolog of NCBI NO: 5453379 NR Description: bacterial-induced peroxidase precursor [Gossypium
  misc_feature (3)..(3): Xaa is any aa, unknown or other
  misc_feature (4)..(4): Xaa is any aa, unknown or other
  misc_feature (31)..(31): Xaa is any aa, unknown or other
  misc_feature (37)..(37): Xaa is any aa, unknown or other
  misc_feature (53)..(53): Xaa is any aa, unknown or other
  misc_feature (54)..(54): Xaa is any aa, unknown or other
  misc_feature (62)..(62): Xaa is any aa, unknown or other
  misc_feature (65)..(65): Xaa is any aa, unknown or other
  misc_feature (67)..(67): Xaa is any aa, unknown or other
MTXXLQTERRMGASILRLFFHDCFVNGCDGXILLDDXSTFTGEKNAGPNANSXXGFEVIDAXKTXVXAACRATVSCADILALAARDGVNLLGGPTWSVPLGRKDSRTASQSAANANLPGPGSSLATLITMFGNKNLSPRDMTALSGAHTIGRSQCQFFRNRIYNERNINASFAALRQRTCPRSGGNGNLAPFDVQTADGFDNAYYQNLVGQRGLLHSDQELFNGGSQDALVRQYSNSPSQFSADFVTAMLKMGGLLCMY

SEQ ID NO: 62659 - protein, 249 aa, Triticum aestivum
  peptide (1)..(249): Ceres Seq. ID no. 15222411
  misc_feature (1)..(227): Pfam Name: Peroxidase Pfam Description: Peroxidase
  misc_feature (1)..(245): Homolog of NCBI NO: 2117618 NR Description: peroxidase (EC 1.11.1.7) 1 precursor - wheat
  misc_feature (1)..(245): Homolog of NCBI NO: 7433058 NR Description: peroxidase (EC 1.11.1.7) - radish
  misc_feature (1)..(245): Homolog of NCBI NO: 520568 NR Description: peroxidase
  misc_feature (1)..(245): Homolog of NCBI NO: 5381253 NR Description: peroxidase [Nicotiana tabacum]
  misc_feature (1)..(245): Homolog of NCBI NO: 34903770 NR Description: unnamed protein product [Oryza sativa (japonica
  misc_feature (1)..(245): Homolog of NCBI NO: 7433047 NR Description: probable peroxidase (EC 1.11.1.7) (clone PC23) -
  misc_feature (1)..(245): Homolog of NCBI NO: 15239075 NR Description: peroxidase, putative [Arabidopsis thaliana]
  misc_feature (1)..(245): Homolog of NCBI NO: 464365 NR Description: Peroxidase P7 (TP7)
  misc_feature (1)..(245): Homolog of NCBI NO: 7433049 NR Description: peroxidase (EC 1.11.1.7) - flax (fragment)
  misc_feature (1)..(245): Homolog of NCBI NO: 5453379 NR Description: bacterial-induced peroxidase precursor [Gossypium
  misc_feature (21)..(21): Xaa is any aa, unknown or other
  misc_feature (27)..(27): Xaa is any aa, unknown or other
  misc_feature (43)..(43): Xaa is any aa, unknown or other
  misc_feature (44)..(44): Xaa is any aa, unknown or other
  misc_feature (52)..(52): Xaa is any aa, unknown or other
  misc_feature (55)..(55): Xaa is any aa, unknown or other
  misc_feature (57)..(57): Xaa is any aa, unknown or other
MGASILRLFFHDCFVNGCDGXILLDDXSTFTGEKNAGPNANSXXGFEVIDAXKTXVXAACRATVSCADILALAARDGVNLLGGPTWSVPLGRKDSRTASQSAANANLPGPGSSLATLITMFGNKNLSPRDMTALSGAHTIGRSQCQFFRNRIYNERNINASFAALRQRTCPRSGGNGNLAPFDVQTADGFDNAYYQNLVGQRGLLHSDQELFNGGSQDALVRQYSNSPSQFSADFVTAMLKMGGLLCMY

SEQ ID NO: 62660 - DNA, 686 bp, Triticum aestivum
  misc_feature (1)..(686): Ceres Seq. ID no. 13590885
atcacttcaccaccaccacaaaccctatccccattaacccgctccaaaaccctgagctgcgcacccaccggcgatgtcggcgacggccatccgctccggcgagctcctcgcttttcccgccgcgctgaggcgtggcctgcccgtggcttctgcctcggtggtcgcgttccggttgagggcgccagtggccgggcgcgtggcggtcagggttgtcgcggcggcggcggagggggcaggggcggaggcggaggcggaagggaagccgaagccgaagaagaagagggcagcgagcgggatcatgaagcctaagccgatttctccggagctaagggagtttgtcggaggcgcggcggagctgccccggacagaggcgctcaagatcatctgggcgcacatcaagggaaacaacctccaggatcccgagaacaagaagataatagtctgcgatgagaaactgaagaagatatttggagggcgtgaccgtgttgggtttcttgagatctctgggctcctcaatccccatttccagaaatgatagggtttatgtagatgttgcactttttctgtattagctaagacagttgtatcagcatatttagctgaacctggtatggagggtccgtaattctggtttgagaatggtacgtctagtatttgcagtaaatggctttgctggtttttggccc

SEQ ID NO: 62661 - protein, 153 aa, Triticum aestivum; identical to SEQ ID NO: 56169
  peptide (1)..(153): Ceres Seq. ID no. 13590886
  misc_feature (24)..(153): Homolog of NCBI NO: 21593643 NR Description: unknown [Arabidopsis thaliana]
  misc_feature (24)..(153): Homolog of NCBI NO: 18396594 NR Description: expressed protein [Arabidopsis thaliana]
  misc_feature (38)..(153): Homolog of NCBI NO: 33667910 NR Description: SWIb domain-containing protein [Solanum chacoense]
  misc_feature (44)..(151): Homolog of NCBI NO: 21553903 NR Description: unknown [Arabidopsis thaliana]
  misc_feature (23)..(151): Homolog of NCBI NO: 15235320 NR Description: expressed protein [Arabidopsis thaliana]
  misc_feature (23)..(151): Homolog of NCBI NO: 14423526 NR Description: putative protein [Arabidopsis thaliana]
  misc_feature (5)..(151): Homolog of NCBI NO: 19698859 NR Description: unknown protein [Arabidopsis thaliana]
  misc_feature (37)..(151): Homolog of NCBI NO: 21593713 NR Description: unknown [Arabidopsis thaliana]
  misc_feature (5)..(151): Homolog of NCBI NO: 18397658 NR Description: expressed protein [Arabidopsis thaliana]
  misc_feature (2)..(153): Homolog of NCBI NO: 14488372 NR Description: hypothetical protein [Oryza sativa (japonica

SEQ ID NO: 62662 - protein, 102 aa, Triticum aestivum
  peptide (1)..(102): Ceres Seq. ID no. 13590887
  misc_feature (42)..(102): Pfam Name: Protein of unknown function, DUF584 Pfam Description: Protein of unknown function, DUF584
ITSPPPQTLSPLTRSKTLSCAPTGDVGDGHPLRRAPRFSRRAEAWPARGFCLGGRVPVEGASGRARGGQGCRGGGGGGRGGGGGGREAEAEEEEGSERDHEA

SEQ ID NO: 62663 - protein, 78 aa, Triticum aestivum; identical to SEQ ID NO: 56171
  peptide (1)..(78): Ceres Seq. ID no. 13590888
  misc_feature (1)..(78): Homolog of NCBI NO: 21593643 NR Description: unknown [Arabidopsis thaliana]
  misc_feature (1)..(78): Homolog of NCBI NO: 18396594 NR Description: expressed protein [Arabidopsis thaliana]
  misc_feature (1)..(78): Homolog of NCBI NO: 33667910 NR Description: SWIb domain-containing protein [Solanum chacoense]
  misc_feature (1)..(76): Homolog of NCBI NO: 21553903 NR Description: unknown [Arabidopsis thaliana]
  misc_feature (1)..(76): Homolog of NCBI NO: 15235320 NR Description: expressed protein [Arabidopsis thaliana]
  misc_feature (1)..(76): Homolog of NCBI NO: 14423526 NR Description: putative protein [Arabidopsis thaliana]
  misc_feature (1)..(76): Homolog of NCBI NO: 19698859 NR Description: unknown protein [Arabidopsis thaliana]
  misc_feature (1)..(76): Homolog of NCBI NO: 21593713 NR Description: unknown [Arabidopsis thaliana]
  misc_feature (1)..(76): Homolog of NCBI NO: 18397658 NR Description: expressed protein [Arabidopsis thaliana]
  misc_feature (1)..(78): Homolog of NCBI NO: 14488372 NR Description: hypothetical protein [Oryza sativa (japonica

SEQ ID NO: 62664 - DNA, 1066 bp, Triticum aestivum
  misc_feature (1)..(1066): Ceres Seq. ID no. 13654802
atccgcccttcgtctcgcccccttcctctcaccgtcggcgccgccgccgccatccaccggagagagccgtccgacgctacccggtccaggtatactcgcctgtgcatgactgcgttggttcggctcgccgggagagcagcttcttggagcaggggcgccagcatcgcgcctccgcgtggcatcggcttattcccgcagcgcaggaccgcgttccagggtgcgaggatggagaatggcggcggcaagggcggccgcggcgcgctcatagtcctggaagggctggacaggagcggcaaatcgtcgcagtgcgcccggctgctgtcctttctgcaagggaaaggctgcgcaaccgaagggtggcgcttcccggacagagacaccagcgtcgggaagatgatctccgcctacctcgccaacgagtcgcagctcgatgatcggaccatccatttgctcttcagcgcgaatcgctgggagaaaagaagtttgatggagagcaagctacttggtggaactacactcgtcgttgaccgctactcttattctggagtggcgttttcagctgctaaaggacttgacattgggtggtgcaaggcccctgaggttggactgctagctccagatcttgtaatatatcttgatgtacaaccagagaaagcggccgaaagaggaggctatgggggtgaaagatacgaaagagttgagttccaaaagagagttgctgagcattaccattcactccgtgattcgacatggaaggtcgtcgatggttcccttcccatggagaccgtggaagaacagctaagagaactagccatgaattgcatttcagaatgccaagacaagcaacttaccaatcttccctggtagagttcccgcgatgaaatgccaaaccacataggcacatcggcaagatctctctttagtatgtgattgactgttgctctgttagatctctgaagtgtgtgattgactgttgcgattgactgctgctccgttagatctcttttaagtgtgtgattgacgactgttactctggatgagatacaggcatatcatttctttcctc

SEQ ID NO: 62665 - protein, 288 aa, Triticum aestivum
  peptide (1)..(288): Ceres Seq. ID no. 13654803
  misc_feature (91)..(267): Pfam Name: Thymidylate kinase Pfam Description: Thymidylate kinase
  misc_feature (85)..(288): Homolog of NCBI NO: 29726715 NR Description: Chain A, Crystal Structure Of Human Thymidylate
  misc_feature (85)..(288): Homolog of NCBI NO: 14488796 NR Description: Chain A, Human Thymidylate Kinase Complexed With
  misc_feature (85)..(288): Homolog of NCBI NO: 23831251 NR Description: Thymidylate kinase (dTMP kinase)
  misc_feature (85)..(288): Homolog of NCBI NO: 291900 NR Description: thymidylate kinase
  misc_feature (92)..(249): Homolog of NCBI NO: 25288285 NR Description: dTMP kinase (EC 2.7.4.9)
  misc_feature (85)..(288): Homolog of NCBI NO: 15912289 NR Description: AT5g59440/f2o15_100 [Arabidopsis thaliana]
  misc_feature (85)..(288): Homolog of NCBI NO: 30697228 NR Description: thymidylate kinase - like protein [Arabidopsis
  misc_feature (33)..(288): Homolog of NCBI NO: 30697225 NR Description: thymidylate kinase - like protein [Arabidopsis
  misc_feature (33)..(288): Homolog of NCBI NO: 21553651 NR Description: thymidylate kinase-like protein [Arabidopsis
  misc_feature (76)..(288): Homolog of NCBI NO: 27261100 NR Description: putative thymidylate kinase
IRPSSRPLPLTVGAAAAIHRREPSDATRSRYTRLCMTALVRLAGRAASWSRGASIAPPRGIGLFPQRRTAFQGARMENGGGKGGRGALIVLEGLDRSGKSSQCARLLSFLQGKGCATEGWRFPDRDTSVGKMISAYLANESQLDDRTIHLLFSANRWEKRSLMESKLLGGTTLVVDRYSYSGVAFSAAKGLDIGWCKAPEVGLLAPDLVIYLDVQPEKAAERGGYGGERYERVEFQKRVAEHYHSLRDSTWKVVDGSLPMETVEEQLRELAMNCISECQDKQLTNLPW

SEQ ID NO: 62666 - protein, 253 aa, Triticum aestivum
  peptide (1)..(253): Ceres Seq. ID no. 13654804
  misc_feature (56)..(232): Pfam Name: Thymidylate kinase Pfam Description: Thymidylate kinase
  misc_feature (50)..(253): Homolog of NCBI NO: 29726715 NR Description: Chain A, Crystal Structure Of Human Thymidylate
  misc_feature (50)..(253): Homolog of NCBI NO: 14488796 NR Description: Chain A, Human Thymidylate Kinase Complexed With
  misc_feature (50)..(253): Homolog of NCBI NO: 23831251 NR Description: Thymidylate kinase (dTMP kinase)
  misc_feature (50)..(253): Homolog of NCBI NO: 291900 NR Description: thymidylate kinase
  misc_feature (57)..(214): Homolog of NCBI NO: 25288285 NR Description: dTMP kinase (EC 2.7.4.9)
  misc_feature (50)..(253): Homolog of NCBI NO: 15912289 NR Description: AT5g59440/f2o15_100 [Arabidopsis thaliana]
  misc_feature (50)..(253): Homolog of NCBI NO: 30697228 NR Description: thymidylate kinase - like protein [Arabidopsis
  misc_feature (1)..(253): Homolog of NCBI NO: 30697225 NR Description: thymidylate kinase - like protein [Arabidopsis
  misc_feature (1)..(253): Homolog of NCBI NO: 21553651 NR Description: thymidylate kinase-like protein [Arabidopsis
  misc_feature (41)..(253): Homolog of NCBI NO: 27261100 NR Description: putative thymidylate kinase
MTALVRLAGRAASWSRGASIAPPRGIGLFPQRRTAFQGARMENGGGKGGRGALIVLEGLDRSGKSSQCARLLSFLQGKGCATEGWRFPDRDTSVGKMISAYLANESQLDDRTIHLLFSANRWEKRSLMESKLLGGTTLVVDRYSYSGVAFSAAKGLDIGWCKAPEVGLLAPDLVIYLDVQPEKAAERGGYGGERYERVEFQKRVAEHYHSLRDSTWKVVDGSLPMETVEEQLRELAMNCISECQDKQLTNLPW

SEQ ID NO: 62667 - protein, 213 aa, Triticum aestivum
  peptide (1)..(213): Ceres Seq. ID no. 13654805
  misc_feature (16)..(192): Pfam Name: Thymidylate kinase Pfam Description: Thymidylate kinase
  misc_feature (10)..(213): Homolog of NCBI NO: 29726715 NR Description: Chain A, Crystal Structure Of Human Thymidylate
  misc_feature (10)..(213): Homolog of NCBI NO: 14488796 NR Description: Chain A, Human Thymidylate Kinase Complexed With
  misc_feature (10)..(213): Homolog of NCBI NO: 23831251 NR Description: Thymidylate kinase (dTMP kinase)
  misc_feature (10)..(213): Homolog of NCBI NO: 291900 NR Description: thymidylate kinase
  misc_feature (17)..(174): Homolog of NCBI NO: 25288285 NR Description: dTMP kinase (EC 2.7.4.9)
  misc_feature (10)..(213): Homolog of NCBI NO: 15912289 NR Description: AT5g59440/f2o15_100 [Arabidopsis thaliana]
  misc_feature (10)..(213): Homolog of NCBI NO: 30697228 NR Description: thymidylate kinase - like protein [Arabidopsis
  misc_feature (1)..(213): Homolog of NCBI NO: 30697225 NR Description: thymidylate kinase - like protein [Arabidopsis
  misc_feature (1)..(213): Homolog of NCBI NO: 21553651 NR Description: thymidylate kinase-like protein [Arabidopsis
  misc_feature (1)..(213): Homolog of NCBI NO: 27261100 NR Description: putative thymidylate kinase
MENGGGKGGRGALIVLEGLDRSGKSSQCARLLSFLQGKGCATEGWRFPDRDTSVGKMISAYLANESQLDDRTIHLLFSANRWEKRSLMESKLLGGTTLVVDRYSYSGVAFSAAKGLDIGWCKAPEVGLLAPDLVIYLDVQPEKAAERGGYGGERYERVEFQKRVAEHYHSLRDSTWKVVDGSLPMETVEEQLRELAMNCISECQDKQLTNLPW

SEQ ID NO: 62668 - DNA, 743 bp, Triticum aestivum
  misc_feature (1)..(743): Ceres Seq. ID no. 15173877
aggagcagaaggcgatggcggacgtgcagatgggcagcggcacggagacggagaccttcgcgttccaggcggagatcaaccagctgctcttgctcatcatcaacaccttctactccaacaaggagatcttcctccgcgatctcatctccaactcatcagatgcgcttgacaagatctggttcgagagcctcacggacaagagtcagaccatgcgaacaacctgggcaccatcgtgggctcgggctccaaggagttcatggaggctctgcagggccggggccgtggctgcgccagcaggagtgaagcaagcgctgatatctttgtcggatacaacagacttggctaatctcggaaacaaccttcagagcttggggttctctatcatctccactggtggtacagcgtcaagcttggaagcagctggagtgaatgtgagaaaagttgaatagcttacacattttcctgaaatgattttggccttcattcatcaaaagttggtgtacaaggaactccaggagaagaatcttgaagtaaataatttatatagataaggatcttatgttgtcgtggtggctgctgctgtgaccgaagatcaaaagaagcctggagatgtgcatcatagttttagttgatgttgccaccatgttttggtgcatgtgtatttgattgtatgtacacttgatggatcgtgcagtcgtgtatgtgttgttgtgagtttcatttagtgatttctggatttgatc

SEQ ID NO: 62669 - protein, 148 aa, Triticum aestivum
  peptide (1)..(148): Ceres Seq. ID no. 15173878
  misc_feature (4)..(68): Homolog of NCBI NO: 38345312 NR Description: OSJNBb0085F13.17 [Oryza sativa (japonica
  misc_feature (5)..(68): Homolog of NCBI NO: 445126 NR Description: heat shock protein HSP81-1
  misc_feature (5)..(68): Homolog of NCBI NO: 418904 NR Description: heat shock protein 83 - Arabidopsis thaliana
  misc_feature (5)..(68): Homolog of NCBI NO: 15237214 NR Description: heat shock protein 81-1 (HSP81-1/heat shock
  misc_feature (5)..(68): Homolog of NCBI NO: 1708314 NR Description: Heat shock protein 83
  misc_feature (5)..(68): Homolog of NCBI NO: 1515105 NR Description: heat shock protein 90A [Arabidopsis thaliana]
  misc_feature (5)..(68): Homolog of NCBI NO: 227782 NR Description: heat shock protein 83
  misc_feature (6)..(68): Homolog of NCBI NO: 21239744 NR Description: HSP90-like protein [Oryza sativa]
  misc_feature (4)..(67): Homolog of NCBI NO: 729771 NR Description: Heat shock protein 82
  misc_feature (4)..(68): Homolog of NCBI NO: 477226 NR Description: heat shock protein HSP82 - maize
EQKAMADVQMGSGTETETFAFQAEINQLLLLIINTFYSNKEIFLRDLISNSSDALDKIWFESLTDKSQTMRTTWAPSWARAPRSSWRLCRAGAVAAPAGVKQALISLSDTTDLANLGNNLQSLGFSIISTGGTASSLEAAGVNVRKVE

SEQ ID NO: 62670 - protein, 144 aa, Triticum aestivum
  peptide (1)..(144): Ceres Seq. ID no. 15173879
  misc_feature (1)..(64): Homolog of NCBI NO: 38345312 NR Description: OSJNBb0085F13.17 [Oryza sativa (japonica
  misc_feature (1)..(64): Homolog of NCBI NO: 1515105 NR Description: heat shock protein 90A [Arabidopsis thaliana]
  misc_feature (1)..(64): Homolog of NCBI NO: 1708314 NR Description: Heat shock protein 83
  misc_feature (1)..(64): Homolog of NCBI NO: 445126 NR Description: heat shock protein HSP81-1
  misc_feature (1)..(64): Homolog of NCBI NO: 15237214 NR Description: heat shock protein 81-1 (HSP81-1/heat shock
  misc_feature (1)..(64): Homolog of NCBI NO: 418904 NR Description: heat shock protein 83 - Arabidopsis thaliana
  misc_feature (1)..(64): Homolog of NCBI NO: 227782 NR Description: heat shock protein 83
  misc_feature (2)..(64): Homolog of NCBI NO: 21239744 NR Description: HSP90-like protein [Oryza sativa]
  misc_feature (1)..(63): Homolog of NCBI NO: 729771 NR Description: Heat shock protein 82
  misc_feature (1)..(64): Homolog of NCBI NO: 477226 NR Description: heat shock protein HSP82 - maize
MADVQMGSGTETETFAFQAEINQLLLLIINTFYSNKEIFLRDLISNSSDALDKIWFESLTDKSQTMRTTWAPSWARAPRSSWRLCRAGAVAAPAGVKQALISLSDTTDLANLGNNLQSLGFSIISTGGTASSLEAAGVNVRKVE

SEQ ID NO: 62671 - protein, 139 aa, Triticum aestivum
  peptide (1)..(139): Ceres Seq. ID no. 15173880
  misc_feature (1)..(59): Homolog of NCBI NO: 38345312 NR Description: OSJNBb0085F13.17 [Oryza sativa (japonica
  misc_feature (1)..(59): Homolog of NCBI NO: 1708314 NR Description: Heat shock protein 83
  misc_feature (1)..(59): Homolog of NCBI NO: 15237214 NR Description: heat shock protein 81-1 (HSP81-1/heat shock
  misc_feature (1)..(59): Homolog of NCBI NO: 1515105 NR Description: heat shock protein 90A [Arabidopsis thaliana]
  misc_feature (1)..(59): Homolog of NCBI NO: 418904 NR Description: heat shock protein 83 - Arabidopsis thaliana
  misc_feature (1)..(59): Homolog of NCBI NO: 445126 NR Description: heat shock protein HSP81-1
  misc_feature (1)..(59): Homolog of NCBI NO: 227782 NR Description: heat shock protein 83
  misc_feature (1)..(59): Homolog of NCBI NO: 21239744 NR Description: HSP90-like protein [Oryza sativa]
  misc_feature (1)..(58): Homolog of NCBI NO: 729771 NR Description: Heat shock protein 82
  misc_feature (1)..(59): Homolog of NCBI NO: 477226 NR Description: heat shock protein HSP82 - maize
MGSGTETETFAFQAEINQLLLLIINTFYSNKEIFLRDLISNSSDALDKIWFESLTDKSQTMRTTWAPSWARAPRSSWRLCRAGAVAAPAGVKQALISLSDTTDLANLGNNLQSLGFSIISTGGTASSLEAAGVNVRKVE

SEQ ID NO: 62672 - DNA, 735 bp, Triticum aestivum
  misc_feature (1)..(735): Ceres Seq. ID no. 12584812
atcgatcgagagagaaagagagagcaaaacctagaactctgaaggaagcggggccgtcggactcgagaaggcggcgagggagggagatgtcgatcctgtgggagaagagcccggcgtggcggtggctggtggggcggacgcgggactccaagcccttcttcttcaccttcgccgcgctctgcggcgtcgtccccggcgtcgtcggctacggcgtcatgcagctcaccagctcccgcaacgacaagctcgaggcccacctccgctccaacgccagaccggagaccacgatgatggggcaagtcaacagggagagactggcagagtttctcggtgagatacagaggaaggaggacacaaatgacagatatgttgctgctcttaaaggggagacgctgacaaggaagcgctatgaacgtattcagcccgtcccccagcaagctgcaccggagaaagccaaggaccagcaagctaccaaggagagcgccaaggcaaagtgaatggcgcatgtttgatgatcggggtgggtgaaatgtgcttctactaagtgaacataaacgggctgtagctccaaaagcttcaagactggcgaatcatttttgtaagcatcattatctacttgcctttcgtttagtcgtggcactgccccgtacgaaaaaactgagaaactctggtgatagtgttgaatcttgtaaatgttttacctgcgtattacgtggtaatattttaggaacctgc

SEQ ID NO: 62673 - protein, 164 aa, Triticum aestivum
  peptide (1)..(164): Ceres Seq. ID no. 12584813
  misc_feature (29)..(144): Homolog of NCBI NO: 18412355 NR Description: expressed protein
RSREKERAKPRTLKEAGPSDSRRRRGREMSILWEKSPAWRWLVGRTRDSKPFFFTFAALCGVVPGVVGYGVMQLTSSRNDKLEAHLRSNARPETTMMGQVNRERLAEFLGEIQRKEDTNDRYVAALKGETLTRKRYERIQPVPQQAAPEKAKDQQATKESAKAK

SEQ ID NO: 62674 - protein, 136 aa, Triticum aestivum
  peptide (1)..(136): Ceres Seq. ID no. 12584814
  misc_feature (1)..(116): Homolog of NCBI NO: 18412355 NR Description: expressed protein
MSILWEKSPAWRWLVGRTRDSKPFFFTFAALCGVVPGVVGYGVMQLTSSRNDKLEAHLRSNARPETTMMGQVNRERLAEFLGEIQRKEDTNDRYVAALKGETLTRKRYERIQPVPQQAAPEKAKDQQATKESAKAK

SEQ ID NO: 62675 - protein, 93 aa, Triticum aestivum
  peptide (1)..(93): Ceres Seq. ID no. 12584815
  misc_feature (1)..(73): Homolog of NCBI NO: 18412355 NR Description: expressed protein
MQLTSSRNDKLEAHLRSNARPETTMMGQVNRERLAEFLGEIQRKEDTNDRYVAALKGETLTRKRYERIQPVPQQAAPEKAKDQQATKESAKAK

SEQ ID NO: 62676 - DNA, 832 bp, Triticum aestivum
  misc_feature (1)..(832): Ceres Seq. ID no. 12615074
gaaaaatcccagccagccgtcaaagcacgacacatccaggtccaagcaaagcatccccagcccagccgagaccgcgtgcgctccacgcagcatccgccgcagcagccgcccagagaagtcgccgccggagaagggggagatgtcgtggcagacgtacgtcgacgaccacctgtgctgcgagatcgacggccagcacctcacctccgccgccatcctcggccacgacggcngcgtctgggccgagtcccccaacttccccaagttcaagcctgaggagattgctggcatcgttaaagactttgaagaacctggacaccttgcaccaactggtcttttccttggaggcacaaagtacatggtcatccaaggtgaacctggggttgtcatccgaggaaagaagggcaccggtggcattactatcaagaagaccggcatggccctgattcttggtatctacgatgagcccatgactcctggccagtgcaatttggtcgtggagaggctcggcgactacctggtcgagcagggtttctaagcccgccctgatatgctgttattttggtcgtctgggactaagtttgctctactgtgggctttgcatccatctgcttggcgtaccgcatgatatatgcagtgaataattttagcttggggtttgtcggttggtgatgtgtcgaaggggaaaaatggatttactatgttttctttttaatgtttggcatcgcgtcgtatcaaactcagccgctctttcgctgagtaatgtacatttgcctggtcatggtaacttgtgggttctgctgctgctttattgaaagatgattgcaattttagc

SEQ ID NO: 62677 - protein, 177 aa, Triticum aestivum
  peptide (1)..(177): Ceres Seq. ID no. 12615075
  misc_feature (48)..(172): Pfam Name: Profilin Pfam Description: Profilin
  misc_feature (47)..(176): Homolog of NCBI NO: 464471 NR Description: PROFILIN 1 (POLLEN ALLERGEN PHL P 11) (PHL P XI)
  misc_feature (47)..(176): Homolog of NCBI NO: 464466 NR Description: Profilin 1 (ZmPRO1)
  misc_feature (47)..(176): Homolog of NCBI NO: 3914432 NR Description: PROFILIN 2/4 (POLLEN ALLERGEN PHL P 11) (PHL P
  misc_feature (47)..(177): Homolog of NCBI NO: 3914423 NR Description: Profilin 4 (ZmPRO4)
  misc_feature (47)..(177): Homolog of NCBI NO: 14161637 NR Description: profilin [Ananas comosus]
  misc_feature (47)..(177): Homolog of NCBI NO: 14423853 NR Description: Profilin 5 (ZmPRO5)
  misc_feature (47)..(177): Homolog of NCBI NO: 1346806 NR Description: Profilin 3
  misc_feature (47)..(177): Homolog of NCBI NO: 1709779 NR Description: Profilin 1
  misc_feature (47)..(177): Homolog of NCBI NO: 1346804 NR Description: Profilin 2
  misc_feature (47)..(177): Homolog of NCBI NO: 1346803 NR Description: Profilin 1
  misc_feature (77)..(77): Xaa is any aa, unknown or other
KNPSQPSKHDTSRSKQSIPSPAETACAPRSIRRSSRPEKSPPEKGEMSWQTYVDDHLCCEIDGQHLTSAAILGHDGXVWAESPNFPKFKPEEIAGIVKDFEEPGHLAPTGLFLGGTKYMVIQGEPGVVIRGKKGTGGITIKKTGMALILGIYDEPMTPGQCNLVVERLGDYLVEQGF

SEQ ID NO: 62678 - protein, 146 aa, Triticum aestivum
  peptide (1)..(146): Ceres Seq. ID no. 12615076
  misc_feature (76)..(76): Xaa is any aa, unknown or other
KIPASRQSTTHPGPSKASPAQPRPRALHAASAAAAAQRSRRRRRGRCRGRRTSTTTCAARSTASTSPPPPSSATTXASGPSPPTSPSSSLRRLLASLKTLKNLDTLHQLVFSLEAQSTWSSKVNLGLSSEERRAPVALLSRRPAWP

SEQ ID NO: 62679 - protein, 131 aa, Triticum aestivum
  peptide (1)..(131): Ceres Seq. ID no. 12615077
  misc_feature (2)..(126): Pfam Name: Profilin Pfam Description: Profilin
  misc_feature (1)..(130): Homolog of NCBI NO: 464471 NR Description: PROFILIN 1 (POLLEN ALLERGEN PHL P 11) (PHL P XI)
  misc_feature (1)..(130): Homolog of NCBI NO: 464466 NR Description: Profilin 1 (ZmPRO1)
  misc_feature (1)..(130): Homolog of NCBI NO: 3914432 NR Description: PROFILIN 2/4 (POLLEN ALLERGEN PHL P 11) (PHL P
  misc_feature (1)..(131): Homolog of NCBI NO: 3914423 NR Description: Profilin 4 (ZmPRO4)
  misc_feature (1)..(131): Homolog of NCBI NO: 14161637 NR Description: profilin [Ananas comosus]
  misc_feature (1)..(131): Homolog of NCBI NO: 14423853 NR Description: Profilin 5 (ZmPRO5)
  misc_feature (1)..(131): Homolog of NCBI NO: 1346806 NR Description: Profilin 3
  misc_feature (1)..(131): Homolog of NCBI NO: 1709779 NR Description: Profilin 1
  misc_feature (1)..(131): Homolog of NCBI NO: 1346804 NR Description: Profilin 2
  misc_feature (1)..(131): Homolog of NCBI NO: 1346803 NR Description: Profilin 1
  misc_feature (31)..(31): Xaa is any aa, unknown or other
MSWQTYVDDHLCCEIDGQHLTSAAILGHDGXVWAESPNFPKFKPEEIAGIVKDFEEPGHLAPTGLFLGGTKYMVIQGEPGVVIRGKKGTGGITIKKTGMALILGIYDEPMTPGQCNLVVERLGDYLVEQGF

SEQ ID NO: 62680 - DNA, 721 bp, Triticum aestivum
  misc_feature (1)..(721): Ceres Seq. ID no. 13583459
aaaaaaagagagcccccgctagtactactctctaaccttacccagaccgccgcaggtcttcatcgtcttcctcggaacgccgccgccgaagtgcgcctcgagtaatttcagaggaaggaggagccaagtgttgatcggagatgaatgcccctgaccgctatgagcgcttcgtcgtgcctgagggcacgaagaaggtatcatttgagaaggatacaaagatcatgaatgctgcatctttcactattgaacgtgaggaccacaccatcgggaacatcctccgcatgcagctgcacagggacccaaatgttcactttgctggctataagctccctcacccccttcagtacaagatcattgttaggatccatactgcaagccaatcctccccaactcaggcatatacccaggcaatcaatgatctagacaaggagcttgagaacctgaagcaagcttttgaggatgagaagacccgattcgaggaaaggatgaagcagggctactaggccaagggtgttctggatgctgacgtgaaaccttccttgctagtaattatatctgatgtctgaactgcggtagaaaaaaaattactcaaggattgtcgatgatcctctgaactcgtagaacctcttcatgtgcggattgcgtatgattgcacggttgttaaacatgtgttggcacttgataagcctgctagttgaattgctcgcctttgacaggttcc

SEQ ID NO: 62681 - protein, 120 aa, Triticum aestivum
  peptide (1)..(120): Ceres Seq. ID no. 13583460
  misc_feature (40)..(107): Homolog of NCBI NO: 25012186 NR Description: GM15177p [Drosophila melanogaster]
  misc_feature (1)..(105): Homolog of NCBI NO: 19401711 NR Description: DNA-directed RNA polymerase II subunit 11 [Homo
  misc_feature (1)..(105): Homolog of NCBI NO: 21704274 NR Description: DNA directed RNA polymerase II polypeptide
  misc_feature (1)..(105): Homolog of NCBI NO: 21704272 NR Description: DNA directed RNA polymerase II polypeptide
  misc_feature (1)..(107): Homolog of NCBI NO: 19921456 NR Description: CG6840-PA [Drosophila melanogaster]
  misc_feature (1)..(105): Homolog of NCBI NO: 11595485 NR Description: RPB11a protein [Homo sapiens]
  misc_feature (1)..(105): Homolog of NCBI NO: 6755362 NR Description: polymerase (RNA) II (DNA directed) polypeptide J
  misc_feature (1)..(105): Homolog of NCBI NO: 5453932 NR Description: DNA directed RNA polymerase II polypeptide J
  misc_feature (1)..(115): Homolog of NCBI NO: 15231127 NR Description: DNA-directed RNA polymerase II 13.6K chain
  misc_feature (1)..(120): Homolog of NCBI NO: 34394446 NR Description: putative DNA-directed RNA polymerase II 13.6K
MNAPDRYERFVVPEGTKKVSFEKDTKIMNAASFTIEREDHTIGNILRMQLHRDPNVHFAGYKLPHPLQYKIIVRIHTASQSSPTQAYTQAINDLDKELENLKQAFEDEKTRFEERMKQGY

SEQ ID NO: 62682 - protein, 93 aa, Triticum aestivum
  peptide (1)..(93): Ceres Seq. ID no. 13583461
  misc_feature (13)..(80): Homolog of NCBI NO: 25012186 NR Description: GM15177p [Drosophila melanogaster]
  misc_feature (1)..(78): Homolog of NCBI NO: 19401711 NR Description: DNA-directed RNA polymerase II subunit 11 [Homo
  misc_feature (1)..(78): Homolog of NCBI NO: 21704274 NR Description: DNA directed RNA polymerase II polypeptide
  misc_feature (1)..(78): Homolog of NCBI NO: 21704272 NR Description: DNA directed RNA polymerase II polypeptide
  misc_feature (1)..(80): Homolog of NCBI NO: 19921456 NR Description: CG6840-PA [Drosophila melanogaster]
  misc_feature (1)..(78): Homolog of NCBI NO: 11595485 NR Description: RPB11a protein [Homo sapiens]
  misc_feature (1)..(78): Homolog of NCBI NO: 6755362 NR Description: polymerase (RNA) II (DNA directed) polypeptide J
  misc_feature (1)..(78): Homolog of NCBI NO: 5453932 NR Description: DNA directed RNA polymerase II polypeptide J
  misc_feature (1)..(88): Homolog of NCBI NO: 15231127 NR Description: DNA-directed RNA polymerase II 13.6K chain
  misc_feature (1)..(93): Homolog of NCBI NO: 34394446 NR Description: putative DNA-directed RNA polymerase II 13.6K
MNAASFTIEREDHTIGNILRMQLHRDPNVHFAGYKLPHPLQYKIIVRIHTASQSSPTQAYTQAINDLDKELENLKQAFEDEKTRFEERMKQGY

SEQ ID NO: 62683 - protein, 73 aa, Triticum aestivum
  peptide (1)..(73): Ceres Seq. ID no. 13583462
  misc_feature (1)..(60): Homolog of NCBI NO: 25012186 NR Description: GM15177p [Drosophila melanogaster]
  misc_feature (1)..(58): Homolog of NCBI NO: 19401711 NR Description: DNA-directed RNA polymerase II subunit 11 [Homo
  misc_feature (1)..(58): Homolog of NCBI NO: 21704274 NR Description: DNA directed RNA polymerase II polypeptide
  misc_feature (1)..(58): Homolog of NCBI NO: 21704272 NR Description: DNA directed RNA polymerase II polypeptide
  misc_feature (1)..(60): Homolog of NCBI NO: 19921456 NR Description: CG6840-PA [Drosophila melanogaster]
  misc_feature (1)..(58): Homolog of NCBI NO: 11595485 NR Description: RPB11a protein [Homo sapiens]
  misc_feature (1)..(58): Homolog of NCBI NO: 6755362 NR Description: polymerase (RNA) II (DNA directed) polypeptide J
  misc_feature (1)..(58): Homolog of NCBI NO: 5453932 NR Description: DNA directed RNA polymerase II polypeptide J
  misc_feature (1)..(68): Homolog of NCBI NO: 15231127 NR Description: DNA-directed RNA polymerase II 13.6K chain
  misc_feature (1)..(73): Homolog of NCBI NO: 34394446 NR Description: putative DNA-directed RNA polymerase II 13.6K
MQLHRDPNVHFAGYKLPHPLQYKIIVRIHTASQSSPTQAYTQAINDLDKELENLKQAFEDEKTRFEERMKQGY

SEQ ID NO: 62684 - DNA, 826 bp, Triticum aestivum
  misc_feature (1)..(826): Ceres Seq. ID no. 13583463
acaacacacatccatccatggagggagtggtcaagcaggccatccacgcgggcggggagcagggagtccgcatgggcagcgagcaaggcggatgcgcgggcggcgagccgagcccgcatgtgcagcgagcaaggcggacacgctggcggcgagccgagcccgcatgggcagcgagcaaggcggacgcacggacggcgagccgaggccgcgtgggcagcgagcaaggcagacgcgcgggcgacgagccgagcccgcatgcgcagcgagcaaggcggactcgcggacggcgagccgaggccgcgtgggcagtgaacaaggcagatgcgcgggcggcgagcatggtgcgcggcggcggcccactccaccgtcggcttcttccctcgggcgtgtggcggcctattcccttgggcgcacggtggcctattccctcaagcatggcgcgtgacggccactacagaggagctccttcctccggcgtcggccgcccgacgctgcactagcgcgcggcggtgcccctctctctctctccaggaaccagcgagcacggccgggcggcggtgcagataccagggtcgggcgggcgtgcctgtctggtggcgtggcgagtagggcggggcgagcggcgcggtgagcagggggaggcggcagtattgtccccagcgagaagaaggtggctggcggtgaagtagttgttgctgcgatggaggacttgattgcttttcctttttagtttctaggggtccttgtgtaaattttcaggacagcttgtaacttctctgtaacttcaccgacgatgaatgcaagacagcacggctgtgtcaaattc

SEQ ID NO: 62685 - protein, 165 aa, Triticum aestivum
  peptide (1)..(165): Ceres Seq. ID no. 13583464
NTHPSMEGVVKQAIHAGGEQGVRMGSEQGGCAGGEPSPHVQRARRTRWRRAEPAWAASKADARTASRGRVGSEQGRRAGDEPSPHAQRARRTRGRRAEAAWAVNKADARAASMVRGGGPLHRRLLPSGVWRPIPLGARWPIPSSMARDGHYRGAPSSGVGRPTLH

SEQ ID NO: 62686 - protein, 160 aa, Triticum aestivum
  peptide (1)..(160): Ceres Seq. ID no. 13583465
MEGVVKQAIHAGGEQGVRMGSEQGGCAGGEPSPHVQRARRTRWRRAEPAWAASKADARTASRGRVGSEQGRRAGDEPSPHAQRARRTRGRRAEAAWAVNKADARAASMVRGGGPLHRRLLPSGVWRPIPLGARWPIPSSMARDGHYRGAPSSGVGRPTLH

SEQ ID NO: 62687 - protein, 147 aa, Triticum aestivum
  peptide (1)..(147): Ceres Seq. ID no. 13583466
  misc_feature (7)..(132): Homolog of NCBI NO: 34895050 NR Description: B1045F02.20 [Oryza sativa (japonica
QHTSIHGGSGQAGHPRGRGAGSPHGQRARRMRGRRAEPACAASKADTLAASRARMGSEQGGRTDGEPRPRGQRARQTRGRRAEPACAASKADSRTASRGRVGSEQGRCAGGEHGARRRPTPPSASSLGRVAAYSLGRTVAYSLKHGA

SEQ ID NO: 62688 - DNA, 890 bp, Triticum aestivum
  misc_feature (1)..(890): Ceres Seq. ID no. 13655197
cagatttacagagttctagaatagaagatgatctggtggttacctctctattatttactcgaatgactgtacttatatcttacgttcaaactttacccgatcttggtttagtttccatctccaatcagattaatggtttgcggaccaaagccaatgttttatggagttcttattcctaatttagttatacatttcatttgtagtttcttggtagataataagcagtggcagatgaaccaataagttatctgtgcccatgctttattgtaagcgttaaatttgctctctggtattactttcaatgtgttatccatacccatgctttttgcggttaattatcatgtcttatcaacttatgcagagtccatgatatcatacagtttgaagtcaaaaaattcatgatatgggtgatatggaaaagtcattgccttctttgctggaacattccctgattgcctggacttcttgggtcaatcgctggacgccacccccgtctcctggacgtcatgacgccgccgatttccttgacgccgcgtgccaccgatcttctataactcaatttctccaatttctctcggctgtgagctcatatatatttttgagttgtgaacatattatgtaaactcaacactttgttttgtgacaagtgaactcatttcatattcatctatcaatcatggttgaagtgtctaaaaaaaaaaaaaaaaaaaaaaaaaaaaaaaaaaaaaaaaaaaaaaaaaaaaaaaaaaaaaaaaccaaaaaaaaaaaaaaaaaggtttatcaaaaccgccaacctcaaggggggccccgaaaccaaattccccaaaaaggaagccaaataacccgcgctaattgcccgccttttaaaaacgccgaaatggaaaaaaccc

SEQ ID NO: 62689 - protein, 72 aa, Triticum aestivum
  peptide (1)..(72): Ceres Seq. ID no. 15219719
  misc_feature (61)..(72): Homolog of NCBI NO: 33086466 NR Description: Ab1-160 [Rattus norvegicus]
MGDMEKSLPSLLEHSLIAWTSWVNRWTPPPSPGRHDAADFLDAACHRSSITQFLQFLSAVSSYIFLSCEHIM

SEQ ID NO: 62690 - protein, 71 aa, Triticum aestivum
  peptide (1)..(71): Ceres Seq. ID no. 15219720
  misc_feature (6)..(46): Homolog of NCBI NO: 39595494 NR Description: Hypothetical protein CBG04159 [Caenorhabditis
  misc_feature (6)..(51): Homolog of NCBI NO: 39594135 NR Description: Hypothetical protein CBG16734 [Caenorhabditis
  misc_feature (3)..(33): Homolog of NCBI NO: 32416700 NR Description: predicted protein [Neurospora crassa]
  misc_feature (2)..(33): Homolog of NCBI NO: 39595494 NR Description: Hypothetical protein CBG04159 [Caenorhabditis
  misc_feature (6)..(34): Homolog of NCBI NO: 31218028 NR Description: ENSANGP00000024948 [Anopheles gambiae]
  misc_feature (6)..(40): Homolog of NCBI NO: 39597582 NR Description: Hypothetical protein CBG03276 [Caenorhabditis
  misc_feature (6)..(38): Homolog of NCBI NO: 16416102 NR Description: hypothetical protein [Neurospora crassa]
  misc_feature (7)..(41): Homolog of NCBI NO: 33086466 NR Description: Ab1-160 [Rattus norvegicus]
  misc_feature (1)..(33): Homolog of NCBI NO: 37536950 NR Description: hypothetical protein [Oryza sativa (japonica
  misc_feature (1)..(40): Homolog of NCBI NO: 33086466 NR Description: Ab1-160 [Rattus norvegicus]
MVEVSKKKKKKKKKKKKKKKKKKKKKTKKKKKKVYQNRQPQGGPRNQIPQKGSQITRANCPPFKNAEMEKT

SEQ ID NO: 62691 - protein, 69 aa, Triticum aestivum
  peptide (1)..(69): Ceres Seq. ID no. 15219721
  misc_feature (58)..(69): Homolog of NCBI NO: 33086466 NR Description: Ab1-160 [Rattus norvegicus]
MEKSLPSLLEHSLIAWTSWVNRWTPPPSPGRHDAADFLDAACHRSSITQFLQFLSAVSSYIFLSCEHIM

SEQ ID NO: 62692 - DNA, 622 bp, Triticum aestivum
  misc_feature (1)..(622): Ceres Seq. ID no. 13654829
atttgcggtcacgtcagtcattacttcgcaagatccgcatccaaacctgagctgtataaggtcgacgacggacaaggaaaagagatgccgttgaacaccatctgcgtacgtaagggtatggctgcttccttcttcctgagtctcgtcgtccccttggttctgcttcttctgccgctctcgcgctcggcgtcggtggtgacccatctccccggcttccatggccgccttccgttccacctggagaccgggtacgtcaacgtggacgaggagacgggaacggagctcttctactacttcgtggagtcggagaggagccccgacacggaccccgtcgtcctgtggctgacgggcgggcccggctgctctagcttgattttctacgaagttggtgaggccctcatcctccgttcctcgtctcctgtgggcgtattagctggctagaaggaagccgccatgctgtcaattactacatcagattaagataaagagtgaagttaacttctattagcctctaattcaaagctagatgagcaaatcgtccgagtttgcaaatgtgtatcaggttgtgttacaaagtttggcaccttttatccaaagttttaaatagccccatagctgggtt

SEQ ID NO: 62693 - protein, 146 aa, Triticum aestivum
  peptide (1)..(146): Ceres Seq. ID no. 13654830
  misc_feature (71)..(130): Pfam Name: Serine carboxypeptidase Pfam Description: Serine carboxypeptidase
  misc_feature (40)..(130): Homolog of NCBI NO: 15217581 NR Description: serine carboxypeptidase -related [Arabidopsis
  misc_feature (42)..(130): Homolog of NCBI NO: 22327401 NR Description: serine carboxypeptidase -related [Arabidopsis
  misc_feature (48)..(130): Homolog of NCBI NO: 30682106 NR Description: serine carboxypeptidase -related [Arabidopsis
  misc_feature (40)..(130): Homolog of NCBI NO: 15219433 NR Description: serine carboxypeptidase -related [Arabidopsis
  misc_feature (42)..(130): Homolog of NCBI NO: 15228300 NR Description: serine carboxypeptidase -related [Arabidopsis
  misc_feature (48)..(130): Homolog of NCBI NO: 21592952 NR Description: serine carboxypeptidase, putative [Arabidopsis
  misc_feature (60)..(135): Homolog of NCBI NO: 37530320 NR Description: putative serine carboxypeptidase
  misc_feature (60)..(130): Homolog of NCBI NO: 28273381 NR Description: putative glucose acyltransferase
  misc_feature (48)..(130): Homolog of NCBI NO: 28273383 NR Description: putative serine carboxypeptidase
  misc_feature (42)..(130): Homolog of NCBI NO: 28273379 NR Description: putative serine carboxypeptidase I
ICGHVSHYFARSASKPELYKVDDGQGKEMPLNTICVRKGMAASFFLSLVVPLVLLLLPLSRSASVVTHLPGFHGRLPFHLETGYVNVDEETGTELFYYFVESERSPDTDPVVLWLTGGPGCSSLIFYEVGEALILRSSSPVGVLAG

SEQ ID NO: 62694 - protein, 118 aa, Triticum aestivum
  peptide (1)..(118): Ceres Seq. ID no. 13654831
  misc_feature (43)..(102): Pfam Name: Serine carboxypeptidase Pfam Description: Serine carboxypeptidase
  misc_feature (12)..(102): Homolog of NCBI NO: 15217581 NR Description: serine carboxypeptidase -related [Arabidopsis
  misc_feature (14)..(102): Homolog of NCBI NO: 22327401 NR Description: serine carboxypeptidase -related [Arabidopsis
  misc_feature (20)..(102): Homolog of NCBI NO: 30682106 NR Description: serine carboxypeptidase -related [Arabidopsis
  misc_feature (12)..(102): Homolog of NCBI NO: 15219433 NR Description: serine carboxypeptidase -related [Arabidopsis
  misc_feature (14)..(102): Homolog of NCBI NO: 15228300 NR Description: serine carboxypeptidase -related [Arabidopsis
  misc_feature (20)..(102): Homolog of NCBI NO: 21592952 NR Description: serine carboxypeptidase, putative [Arabidopsis
  misc_feature (32)..(107): Homolog of NCBI NO: 37530320 NR Description: putative serine carboxypeptidase
  misc_feature (32)..(102): Homolog of NCBI NO: 28273381 NR Description: putative glucose acyltransferase
  misc_feature (20)..(102): Homolog of NCBI NO: 28273383 NR Description: putative serine carboxypeptidase
  misc_feature (14)..(102): Homolog of NCBI NO: 28273379 NR Description: putative serine carboxypeptidase I
MPLNTICVRKGMAASFFLSLVVPLVLLLLPLSRSASVVTHLPGFHGRLPFHLETGYVNVDEETGTELFYYFVESERSPDTDPVVLWLTGGPGCSSLIFYEVGEALILRSSSPVGVLAG

SEQ ID NO: 62695 - protein, 107 aa, Triticum aestivum
  peptide (1)..(107): Ceres Seq. ID no. 13654832
  misc_feature (32)..(91): Pfam Name: Serine carboxypeptidase Pfam Description: Serine carboxypeptidase
  misc_feature (1)..(91): Homolog of NCBI NO: 15217581 NR Description: serine carboxypeptidase -related [Arabidopsis
  misc_feature (3)..(91): Homolog of NCBI NO: 22327401 NR Description: serine carboxypeptidase -related [Arabidopsis
  misc_feature (9)..(91): Homolog of NCBI NO: 30682106 NR Description: serine carboxypeptidase -related [Arabidopsis
  misc_feature (1)..(91): Homolog of NCBI NO: 15219433 NR Description: serine carboxypeptidase -related [Arabidopsis
  misc_feature (3)..(91): Homolog of NCBI NO: 15228300 NR Description: serine carboxypeptidase -related [Arabidopsis
  misc_feature (9)..(91): Homolog of NCBI NO: 21592952 NR Description: serine carboxypeptidase, putative [Arabidopsis
  misc_feature (21)..(96): Homolog of NCBI NO: 37530320 NR Description: putative serine carboxypeptidase
  misc_feature (21)..(91): Homolog of NCBI NO: 28273381 NR Description: putative glucose acyltransferase
  misc_feature (9)..(91): Homolog of NCBI NO: 28273383 NR Description: putative serine carboxypeptidase
  misc_feature (3)..(91): Homolog of NCBI NO: 28273379 NR Description: putative serine carboxypeptidase I
MAASFFLSLVVPLVLLLLPLSRSASVVTHLPGFHGRLPFHLETGYVNVDEETGTELFYYFVESERSPDTDPVVLWLTGGPGCSSLIFYEVGEALILRSSSPVGVLAG

SEQ ID NO: 62696 - DNA, 1127 bp, Triticum aestivum
  misc_feature (1)..(1127): Ceres Seq. ID no. 13596876
agaacatcctaatcgaaaagaccccaccgccgcccccatcatgccgccgctcctcctcgccgcgctcgcgctcgccctggccctctcccacgccgccgccggaggaggcaccgggttctacgacccggcgcgggttacccagatctcctggcgccccagggcgttcctgtacagcggcttcctctcgcacgccgagtgcgaccacctcatcaagctggccaaggggaggctggagaagtcgatggtggccgacaacgagtccgggaagagtgtcatgagccaggtgcgcacaagctctggcaccttcttgtccaagcgcgaggatgaaattatctctggaattgaaaagcgtgtagctgcttggacgtttctccctgaagaaaatgccgaatcaatgcaggttctgcattatgaagttggtcagaagtatgatgcccacttcgattattttagtgacaaaaagaacgtgaagcgtggtggtcatcgggttgctactgttcttatgtacctgacagatgtgaagaagggtggagagaccgtgttcccaattgctgagggaagagatttacaacataaggatgaaacgtggtcggagcgcgcgagacatggcctggcagtgaagccaagaaaaggcgatgcgctactcttcttcagtctccacgttaacgcgacaacagatccgagcagtcttcacgcgagctgcccagtagtcgagggcgagaagtggtctgccacaaaatggatccacgtccggtcattcgacaaccctccagatgttatgacggacgcacggtgttctgatgacaatgagcaatgccctagatgggctgctcttggtgagtgttacaagaacgcaaaatacatggtgggcacgaaggacaccctcgggtcttgccgcaaaagttgcggggtctgcgatgcttgaaccccggcaccaatcttaactgaatttgcatggttactgagatgtagattacaaaaccaaataggttcttagtagcatggcattagatgtttactctccttgtcatgtagtttgacctcagagcatcttgatataaagcaaaaagggaattgactttgtttcagaagaatttggatataacctgatggtatcaaatatttcc

SEQ ID NO: 62697 - protein, 307 aa, Triticum aestivum
  peptide (1)..(307): Ceres Seq. ID no. 15221988
  misc_feature (128)..(250): Pfam Name: 2OG-Fe(II) oxygenase superfamily Pfam Description: 2OG-Fe(II) oxygenase superfamily
  misc_feature (40)..(305): Homolog of NCBI NO: 29150368 NR Description: putative oxidoreductase [Oryza sativa (japonica
  misc_feature (49)..(305): Homolog of NCBI NO: 28393447 NR Description: putative prolyl 4-hydroxylase [Arabidopsis
  misc_feature (5)..(307): Homolog of NCBI NO: 34393269 NR Description: prolyl 4-hydroxylase alpha-1 subunit
  misc_feature (21)..(305): Homolog of NCBI NO: 30689216 NR Description: oxidoreductase, 2OG-Fe(II) oxygenase family
  misc_feature (40)..(307): Homolog of NCBI NO: 18086437 NR Description: AT3g28480/MFJ20_16 [Arabidopsis thaliana]
  misc_feature (40)..(307): Homolog of NCBI NO: 18405808 NR Description: oxidoreductase, 2OG-Fe(II) oxygenase family
  misc_feature (40)..(307): Homolog of NCBI NO: 9294583 NR Description: prolyl 4-hydroxylase alpha subunit-like protein
  misc_feature (17)..(107): Homolog of NCBI NO: 37534316 NR Description: unknown protein [Oryza sativa (japonica
  misc_feature (108)..(305): Homolog of NCBI NO: 37534316 NR Description: unknown protein [Oryza sativa (japonica
  misc_feature (18)..(307): Homolog of NCBI NO: 29150365 NR Description: putative oxidoreductase [Oryza sativa (japonica
EHPNRKDPTAAPIMPPLLLAALALALALSHAAAGGGTGFYDPARVTQISWRPRAFLYSGFLSHAECDHLIKLAKGRLEKSMVADNESGKSVMSQVRTSSGTFLSKREDEIISGIEKRVAAWTFLPEENAESMQVLHYEVGQKYDAHFDYFSDKKNVKRGGHRVATVLMYLTDVKKGGETVFPIAEGRDLQHKDETWSERARHGLAVKPRKGDALLFFSLHVNATTDPSSLHASCPVVEGEKWSATKWIHVRSFDNPPDVMTDARCSDDNEQCPRWAALGECYKNAKYMVGTKDTLGSCRKSCGVCDA

SEQ ID NO: 62698 - protein, 294 aa, Triticum aestivum
  peptide (1)..(294): Ceres Seq. ID no. 15221989
  misc_feature (115)..(237): Pfam Name: 2OG-Fe(II) oxygenase superfamily Pfam Description: 2OG-Fe(II) oxygenase superfamily
  misc_feature (27)..(292): Homolog of NCBI NO: 29150368 NR Description: putative oxidoreductase [Oryza sativa (japonica
  misc_feature (36)..(292): Homolog of NCBI NO: 28393447 NR Description: putative prolyl 4-hydroxylase [Arabidopsis
  misc_feature (1)..(294): Homolog of NCBI NO: 34393269 NR Description: prolyl 4-hydroxylase alpha-1 subunit
  misc_feature (8)..(292): Homolog of NCBI NO: 30689216 NR Description: oxidoreductase, 2OG-Fe(II) oxygenase family
  misc_feature (27)..(294): Homolog of NCBI NO: 18086437 NR Description: AT3g28480/MFJ20_16 [Arabidopsis thaliana]
  misc_feature (27)..(294): Homolog of NCBI NO: 18405808 NR Description: oxidoreductase, 2OG-Fe(II) oxygenase family
  misc_feature (27)..(294): Homolog of NCBI NO: 9294583 NR Description: prolyl 4-hydroxylase alpha subunit-like protein
  misc_feature (4)..(94): Homolog of NCBI NO: 37534316 NR Description: unknown protein [Oryza sativa (japonica
  misc_feature (95)..(292): Homolog of NCBI NO: 37534316 NR Description: unknown protein [Oryza sativa (japonica
  misc_feature (5)..(294): Homolog of NCBI NO: 29150365 NR Description: putative oxidoreductase [Oryza sativa (japonica
MPPLLLAALALALALSHAAAGGGTGFYDPARVTQISWRPRAFLYSGFLSHAECDHLIKLAKGRLEKSMVADNESGKSVMSQVRTSSGTFLSKREDEIISGIEKRVAAWTFLPEENAESMQVLHYEVGQKYDAHFDYFSDKKNVKRGGHRVATVLMYLTDVKKGGETVFPIAEGRDLQHKDETWSERARHGLAVKPRKGDALLFFSLHVNATTDPSSLHASCPVVEGEKWSATKWIHVRSFDNPPDVMTDARCSDDNEQCPRWAALGECYKNAKYMVGTKDTLGSCRKSCGVCDA

SEQ ID NO: 62699 - protein, 227 aa, Triticum aestivum
  peptide (1)..(227): Ceres Seq. ID no. 15221990
  misc_feature (48)..(170): Pfam Name: 2OG-Fe(II) oxygenase superfamily Pfam Description: 2OG-Fe(II) oxygenase superfamily
  misc_feature (1)..(225): Homolog of NCBI NO: 29150368 NR Description: putative oxidoreductase [Oryza sativa (japonica
  misc_feature (1)..(225): Homolog of NCBI NO: 28393447 NR Description: putative prolyl 4-hydroxylase [Arabidopsis
  misc_feature (1)..(227): Homolog of NCBI NO: 34393269 NR Description: prolyl 4-hydroxylase alpha-1 subunit
  misc_feature (1)..(225): Homolog of NCBI NO: 30689216 NR Description: oxidoreductase, 2OG-Fe(II) oxygenase family
  misc_feature (1)..(227): Homolog of NCBI NO: 18086437 NR Description: AT3g28480/MFJ20_16 [Arabidopsis thaliana]
  misc_feature (1)..(227): Homolog of NCBI NO: 18405808 NR Description: oxidoreductase, 2OG-Fe(II) oxygenase family
  misc_feature (1)..(227): Homolog of NCBI NO: 9294583 NR Description: prolyl 4-hydroxylase alpha subunit-like protein
  misc_feature (1)..(27): Homolog of NCBI NO: 37534316 NR Description: unknown protein [Oryza sativa (japonica
  misc_feature (28)..(225): Homolog of NCBI NO: 37534316 NR Description: unknown protein [Oryza sativa (japonica
  misc_feature (1)..(227): Homolog of NCBI NO: 29150365 NR Description: putative oxidoreductase [Oryza sativa (japonica
MVADNESGKSVMSQVRTSSGTFLSKREDEIISGIEKRVAAWTFLPEENAESMQVLHYEVGQKYDAHFDYFSDKKNVKRGGHRVATVLMYLTDVKKGGETVFPIAEGRDLQHKDETWSERARHGLAVKPRKGDALLFFSLHVNATTDPSSLHASCPVVEGEKWSATKWIHVRSFDNPPDVMTDARCSDDNEQCPRWAALGECYKNAKYMVGTKDTLGSCRKSCGVCDA

SEQ ID NO: 62700 - DNA, 1320 bp, Triticum aestivum
  misc_feature (1)..(1320): Ceres Seq. ID no. 15226612
ctttttgcagtgtctggccgtcgcgctctcgccgtctcgctgccggctgccggctgcccctccccctcgccgcgcccgatttctccgccaactcccatacccaagttctagggaaagatacactgctccgatggcggtcagagttccgtccatggagctgaaccgctccccgccgctcctctccggcggcagaggcaaaacatgccttcagaagcctttcattgtccaagcaaagagatcaggtggattggagaaagcaaatactagcaggtcacgaggaccgcaagcttctgaaaaactcaagaaaagagaacccctgactcgtgggactgttagtgcgcctcttccggtaccaggacacatacctcgacctccttacgttggatcaaacaaaatgcccgagatatcgagtgagagacaaatgcaggacaaagacaccatcgtgcacatgaaagctgcatgtgagcttgctgctcgtgttcttcaaaatgcagggaaattagtcaaaccctctgtaacaacagacgaaattgataaagcagtgcacaagatgatcattgatgctggagcctatccatccccgcttggatacggtgggtttccaaaaagtgtatgcacatcagtgaacgaatgcatgtgccatggtattcctgattcacgagaactaaaggatggagacataattaacatcgatgtcactgtctacttgaacggttttcatggggatacctctaaaacgtttttctgtggagaagttgacgaagctgctaaaagacttgtgaaggttactgaagagtgcatgcttaggggcatatcatcctgcaaacacggtgtgagctttaagaaaatcggcagaagaataagcgagcatgctgagaggaatggatttggtgtcgtggagcaatttgttgggcatggagttggcagagtttttcattcacaaccaattatatatcaccagcgcaacaacatgccagggcagatggttgaaggccagacgttcacaatagagccgatcctgaccatgggaagcaacagcaacagcatcgagtgcgacatgtgggaggacggctggacggcggtgacgacggacggcagcctggcggcgcagttcgagcacaccatcctcatcaccaggaccggcgcagagatcctaaccaaatgctagcaaagccagcgctgaaggcgtacggatcctgaccgcgtagatcacgtgatttcttcttatgttgtatgccaaagcatcactggaacagctgcttacgtataaccgatgatttttggcagcggcaaagagctccaggcttcctctggcacact

SEQ ID NO: 62701 - protein, 388 aa, Triticum aestivum
  peptide (1)..(388): Ceres Seq. ID no. 15226613
  misc_feature (105)..(386): Homolog of NCBI NO: 23018702 NR Description: COG0024: Methionine aminopeptidase [Thermobifida
  misc_feature (82)..(386): Homolog of NCBI NO: 11320958 NR Description: methionine aminopeptidase-like protein
  misc_feature (82)..(386): Homolog of NCBI NO: 15230872 NR Description: methionine aminopeptidase -related [Arabidopsis
  misc_feature (82)..(386): Homolog of NCBI NO: 7939560 NR Description: methionine aminopeptidase-like protein
  misc_feature (102)..(388): Homolog of NCBI NO: 25289731 NR Description: methionyl aminopeptidase-like protein
  misc_feature (102)..(388): Homolog of NCBI NO: 18419957 NR Description: methionyl aminopeptidase-related protein
  misc_feature (84)..(387): Homolog of NCBI NO: 34394646 NR Description: putative methionine aminopeptidase I (MAP1)
  misc_feature (56)..(388): Homolog of NCBI NO: 11320956 NR Description: methionine aminopeptidase-like protein
  misc_feature (56)..(388): Homolog of NCBI NO: 15222218 NR Description: methionine aminopeptidase I (MAP1) -related
  misc_feature (51)..(388): Homolog of NCBI NO: 38345794 NR Description: OSJNBa0085I10.11 [Oryza sativa (japonica
FLQCLAVALSPSRCRLPAAPPPRRARFLRQLPYPSSRERYTAPMAVRVPSMELNRSPPLLSGGRGKTCLQKPFIVQAKRSGGLEKANTSRSRGPQASEKLKKREPLTRGTVSAPLPVPGHIPRPPYVGSNKMPEISSERQMQDKDTIVHMKAACELAARVLQNAGKLVKPSVTTDEIDKAVHKMIIDAGAYPSPLGYGGFPKSVCTSVNECMCHGIPDSRELKDGDIINIDVTVYLNGFHGDTSKTFFCGEVDEAAKRLVKVTEECMLRGISSCKHGVSFKKIGRRISEHAERNGFGVVEQFVGHGVGRVFHSQPIIYHQRNNMPGQMVEGQTFTIEPILTMGSNSNSIECDMWEDGWTAVTTDGSLAAQFEHTILITRTGAEILTKC

SEQ ID NO: 62702 - protein, 345 aa, Triticum aestivum
  peptide (1)..(345): Ceres Seq. ID no. 15226614
  misc_feature (62)..(343): Homolog of NCBI NO: 23018702 NR Description: COG0024: Methionine aminopeptidase [Thermobifida
  misc_feature (39)..(343): Homolog of NCBI NO: 11320958 NR Description: methionine aminopeptidase-like protein
  misc_feature (39)..(343): Homolog of NCBI NO: 15230872 NR Description: methionine aminopeptidase -related [Arabidopsis
  misc_feature (39)..(343): Homolog of NCBI NO: 7939560 NR Description: methionine aminopeptidase-like protein
  misc_feature (59)..(345): Homolog of NCBI NO: 25289731 NR Description: methionyl aminopeptidase-like protein
  misc_feature (59)..(345): Homolog of NCBI NO: 18419957 NR Description: methionyl aminopeptidase-related protein
  misc_feature (41)..(344): Homolog of NCBI NO: 34394646 NR Description: putative methionine aminopeptidase I (MAP1)
  misc_feature (13)..(345): Homolog of NCBI NO: 11320956 NR Description: methionine aminopeptidase-like protein
  misc_feature (13)..(345): Homolog of NCBI NO: 15222218 NR Description: methionine aminopeptidase I (MAP1) -related
  misc_feature (8)..(345): Homolog of NCBI NO: 38345794 NR Description: OSJNBa0085I10.11 [Oryza sativa (japonica
MAVRVPSMELNRSPPLLSGGRGKTCLQKPFIVQAKRSGGLEKANTSRSRGPQASEKLKKREPLTRGTVSAPLPVPGHIPRPPYVGSNKMPEISSERQMQDKDTIVHMKAACELAARVLQNAGKLVKPSVTTDEIDKAVHKMIIDAGAYPSPLGYGGFPKSVCTSVNECMCHGIPDSRELKDGDIINIDVTVYLNGFHGDTSKTFFCGEVDEAAKRLVKVTEECMLRGISSCKHGVSFKKIGRRISEHAERNGFGVVEQFVGHGVGRVFHSQPIIYHQRNNMPGQMVEGQTFTIEPILTMGSNSNSIECDMWEDGWTAVTTDGSLAAQFEHTILITRTGAEILTKC

SEQ ID NO: 62703 - protein, 338 aa, Triticum aestivum
  peptide (1)..(338): Ceres Seq. ID no. 15226615
  misc_feature (55)..(336): Homolog of NCBI NO: 23018702 NR Description: COG0024: Methionine aminopeptidase [Thermobifida
  misc_feature (32)..(336): Homolog of NCBI NO: 11320958 NR Description: methionine aminopeptidase-like protein
  misc_feature (32)..(336): Homolog of NCBI NO: 15230872 NR Description: methionine aminopeptidase -related [Arabidopsis
  misc_feature (32)..(336): Homolog of NCBI NO: 7939560 NR Description: methionine aminopeptidase-like protein
  misc_feature (52)..(338): Homolog of NCBI NO: 25289731 NR Description: methionyl aminopeptidase-like protein
  misc_feature (52)..(338): Homolog of NCBI NO: 18419957 NR Description: methionyl aminopeptidase-related protein
  misc_feature (34)..(337): Homolog of NCBI NO: 34394646 NR Description: putative methionine aminopeptidase I (MAP1)
  misc_feature (6)..(338): Homolog of NCBI NO: 11320956 NR Description: methionine aminopeptidase-like protein
  misc_feature (6)..(338): Homolog of NCBI NO: 15222218 NR Description: methionine aminopeptidase I (MAP1) -related
  misc_feature (1)..(338): Homolog of NCBI NO: 38345794 NR Description: OSJNBa0085I10.11 [Oryza sativa (japonica
MELNRSPPLLSGGRGKTCLQKPFIVQAKRSGGLEKANTSRSRGPQASEKLKKREPLTRGTVSAPLPVPGHIPRPPYVGSNKMPEISSERQMQDKDTIVHMKAACELAARVLQNAGKLVKPSVTTDEIDKAVHKMIIDAGAYPSPLGYGGFPKSVCTSVNECMCHGIPDSRELKDGDIINIDVTVYLNGFHGDTSKTFFCGEVDEAAKRLVKVTEECMLRGISSCKHGVSFKKIGRRISEHAERNGFGVVEQFVGHGVGRVFHSQPIIYHQRNNMPGQMVEGQTFTIEPILTMGSNSNSIECDMWEDGWTAVTTDGSLAAQFEHTILITRTGAEILTKC

SEQ ID NO: 62704 - DNA, 1227 bp, Triticum aestivum
  misc_feature (1)..(1227): Ceres Seq. ID no. 13654868
gtggttggatcggcttccgagtgccgcggcgtgtcggcggcgaccggccgacatgagggtggtggtgacgggcgcgacggggtacctgggcgggcgcctgtgcgcggcgctggcgggggcggggcacgacgtgcgggcgttcgtgcgccgcaccggcgacgcgtccggcctgcccgacgccgtcgagctcgcctacggcgacgtcggcgacgcggactccctcgccgcggccttcgacgggcgcgacgccgtcttccacgccgccgcctccgtcgagccatggctccccgacccctccgtcttcacggccgtcaatgtgagagggcttgagaatgtgttaacagcggccaagagaacgccgacagtaaagaagatcatatacacgtcgtcgttcttcgcacttggcccaacagatggttatgtcgcagatgagacacagatgcacaaagggaaaacattttgcacggagtatgagaaatcaaaggttcttgcagatagaatcgcattgcaggcagcagcagagggggtgccaataaccattgtctatccaggagtcatctatggtcctggaaaacttacaactggaaaccttgtttcccgcattttaattgaaaggtttaatggccgtctacctggctacattggagatgggtatgatagagaatcattttgccatgtcgacgatgttgttagtgggcacatagcagctatggagaagggcagagtgggagaaagatatctgctcaccggcgaaaacttgtcattcatgcatattttcagtatggctgctaatatcacaaacacaaaggccccgtacttccacgtaccgctctggttgattgaaatatatggatggatttcagttttcatttcccgcatcactggaaagctccctcttatcagttaccctacagtgcgtgttattagacatcaatgggcgtattcatgtgagaaagcaaaaagggaactaggctacaatccaagaaacttgactgaaggtcttgctgagatgcttttatggctcaagaacgagaaactgatcaaattttagtgttctactctgttattacttccgttacatttctcacttcatgtagaccgtcatgttttatgtactggatcattgacatgtatatactgcagtatgccactgttctgttgtatcaagttgagatgtaataatgtaatactgagtccatatattcatataaaggaagagactgtatt

SEQ ID NO: 62705 - protein, 349 aa, Triticum aestivum
  peptide (1)..(349): Ceres Seq. ID no. 13654869
  misc_feature (19)..(345): Pfam Name: 3-beta hydroxysteroid dehydrogenase/isomerase family Pfam Description: 3-beta hydroxysteroid dehydrogenase/isomerase
  misc_feature (18)..(342): Homolog of NCBI NO: 23056056 NR Description: hypothetical protein [Geobacter metallireducens]
  misc_feature (18)..(348): Homolog of NCBI NO: 40063226 NR Description: conserved hypothetical protein [uncultured
  misc_feature (20)..(347): Homolog of NCBI NO: 2598072 NR Description: HpnA protein [Zymomonas mobilis]
  misc_feature (20)..(348): Homolog of NCBI NO: 22985846 NR Description: hypothetical protein [Burkholderia fungorum]
  misc_feature (4)..(342): Homolog of NCBI NO: 22965470 NR Description: hypothetical protein [Rhodospirillum rubrum]
  misc_feature (18)..(345): Homolog of NCBI NO: 23103397 NR Description: hypothetical protein [Azotobacter vinelandii]
  misc_feature (20)..(348): Homolog of NCBI NO: 22981628 NR Description: hypothetical protein [Ralstonia metallidurans]
  misc_feature (17)..(349): Homolog of NCBI NO: 21450875 NR Description: unknown protein [Arabidopsis thaliana]
  misc_feature (17)..(349): Homolog of NCBI NO: 15234163 NR Description: terpene cyclase/mutase-related [Arabidopsis
  misc_feature (18)..(349): Homolog of NCBI NO: 15217277 NR Description: Putative dihydroflavonal-4-reductase [Oryza
WLDRLPSAAACRRRPADMRVVVTGATGYLGGRLCAALAGAGHDVRAFVRRTGDASGLPDAVELAYGDVGDADSLAAAFDGRDAVFHAAASVEPWLPDPSVFTAVNVRGLENVLTAAKRTPTVKKIIYTSSFFALGPTDGYVADETQMHKGKTFCTEYEKSKVLADRIALQAAAEGVPITIVYPGVIYGPGKLTTGNLVSRILIERFNGRLPGYIGDGYDRESFCHVDDVVSGHIAAMEKGRVGERYLLTGENLSFMHIFSMAANITNTKAPYFHVPLWLIEIYGWISVFISRITGKLPLISYPTVRVIRHQWAYSCEKAKRELGYNPRNLTEGLAEMLLWLKNEKLIKF

SEQ ID NO: 62706 - protein, 332 aa, Triticum aestivum
  peptide (1)..(332): Ceres Seq. ID no. 13654870
  misc_feature (2)..(328): Pfam Name: 3-beta hydroxysteroid dehydrogenase/isomerase family Pfam Description: 3-beta hydroxysteroid dehydrogenase/isomerase
  misc_feature (1)..(325): Homolog of NCBI NO: 23056056 NR Description: hypothetical protein [Geobacter metallireducens]
  misc_feature (1)..(331): Homolog of NCBI NO: 40063226 NR Description: conserved hypothetical protein [uncultured
  misc_feature (3)..(330): Homolog of NCBI NO: 2598072 NR Description: HpnA protein [Zymomonas mobilis]
  misc_feature (3)..(331): Homolog of NCBI NO: 22985846 NR Description: hypothetical protein [Burkholderia fungorum]
  misc_feature (1)..(325): Homolog of NCBI NO: 22965470 NR Description: hypothetical protein [Rhodospirillum rubrum]
  misc_feature (1)..(328): Homolog of NCBI NO: 23103397 NR Description: hypothetical protein [Azotobacter vinelandii]
  misc_feature (3)..(331): Homolog of NCBI NO: 22981628 NR Description: hypothetical protein [Ralstonia metallidurans]
  misc_feature (1)..(332): Homolog of NCBI NO: 21450875 NR Description: unknown protein [Arabidopsis thaliana]
  misc_feature (1)..(332): Homolog of NCBI NO: 15234163 NR Description: terpene cyclase/mutase-related [Arabidopsis
  misc_feature (1)..(332): Homolog of NCBI NO: 15217277 NR Description: Putative dihydroflavonal-4-reductase [Oryza
MRVVVTGATGYLGGRLCAALAGAGHDVRAFVRRTGDASGLPDAVELAYGDVGDADSLAAAFDGRDAVFHAAASVEPWLPDPSVFTAVNVRGLENVLTAAKRTPTVKKIIYTSSFFALGPTDGYVADETQMHKGKTFCTEYEKSKVLADRIALQAAAEGVPITIVYPGVIYGPGKLTTGNLVSRILIERFNGRLPGYIGDGYDRESFCHVDDVVSGHIAAMEKGRVGERYLLTGENLSFMHIFSMAANITNTKAPYFHVPLWLIEIYGWISVFISRITGKLPLISYPTVRVIRHQWAYSCEKAKRELGYNPRNLTEGLAEMLLWLKNEKLIKF

SEQ ID NO: 62707 - protein, 203 aa, Triticum aestivum
  peptide (1)..(203): Ceres Seq. ID no. 13654871
  misc_feature (1)..(199): Pfam Name: 3-beta hydroxysteroid dehydrogenase/isomerase family Pfam Description: 3-beta hydroxysteroid dehydrogenase/isomerase
  misc_feature (1)..(196): Homolog of NCBI NO: 23056056 NR Description: hypothetical protein [Geobacter metallireducens]
  misc_feature (1)..(202): Homolog of NCBI NO: 40063226 NR Description: conserved hypothetical protein [uncultured
  misc_feature (1)..(201): Homolog of NCBI NO: 2598072 NR Description: HpnA protein [Zymomonas mobilis]
  misc_feature (1)..(202): Homolog of NCBI NO: 22985846 NR Description: hypothetical protein [Burkholderia fungorum]
  misc_feature (1)..(196): Homolog of NCBI NO: 22965470 NR Description: hypothetical protein [Rhodospirillum rubrum]
  misc_feature (1)..(199): Homolog of NCBI NO: 23103397 NR Description: hypothetical protein [Azotobacter vinelandii]
  misc_feature (1)..(202): Homolog of NCBI NO: 22981628 NR Description: hypothetical protein [Ralstonia metallidurans]
  misc_feature (1)..(203): Homolog of NCBI NO: 21450875 NR Description: unknown protein [Arabidopsis thaliana]
  misc_feature (1)..(203): Homolog of NCBI NO: 15234163 NR Description: terpene cyclase/mutase-related [Arabidopsis
  misc_feature (1)..(203): Homolog of NCBI NO: 15217277 NR Description: Putative dihydroflavonal-4-reductase [Oryza
MHKGKTFCTEYEKSKVLADRIALQAAAEGVPITIVYPGVIYGPGKLTTGNLVSRILIERFNGRLPGYIGDGYDRESFCHVDDVVSGHIAAMEKGRVGERYLLTGENLSFMHIFSMAANITNTKAPYFHVPLWLIEIYGWISVFISRITGKLPLISYPTVRVIRHQWAYSCEKAKRELGYNPRNLTEGLAEMLLWLKNEKLIKF

SEQ ID NO: 62708 - DNA, 1332 bp, Triticum aestivum
  misc_feature (1)..(1332): Ceres Seq. ID no. 13662245
ctcaccgccacgcttcaaggctagctagctcgatcgcacagcgaaaatggcgggtagattagttctgtcggtggtggtgactctgctagctgcggccggggcagccgcggcggagtcgtcgtgcccggcgacgccgccggacgcggggccgatgctgcaggtgtcgcacgcgttcgggccgtgctcgccgctgggaaacgcggccgcagcgccgtcgtgggcggggttcctcgcggaccagtcctcccgggacgcgtcgcggctgctgtacctcgactccctcgccgtggccgggcgcgcgtacgcgccgatcgcgtccgggcggcagctgctgcagacgccgacgtacgtggtgcgcgcgcgcctcggcaccccgccgcagcagctcctgctcgccgtcgacaccagcaacgacgccgcgtggatcccctgctccggctgcgcgggctgccccaccaccacgcccttcaagccagccgcgtccacctcgtaccgcgccgtgccgtgcggctcgccggcgtgctcgcgggcgccgaacccgtcctgctcgctcaacaccaagtcctgcgggttcagcctcacctacgccgactcctcgctggaggccgcgctgtcccaggactccctcgccgtcgccaacgacgtcgtgaagagctacaccttcggatgtctccagaaggccaccggcacggcggcgccgccgcagggcctcctcgggctcggccgcgggccgctgtcgttcctgtcgcagaccaaggacatgtacgagggcaccttctcctactgcctcccgagcttcaagtccctcaacttctccggcacgctcaggctcggccgcaagggccaaccgctgcgcatcaagacgacgccgctgctcgtcaacccgcaccgctcctcgctctactacgtgggcatgaccggcatccgcgtgggcaagaaggtggtgcccatcccgccctccgcgctggcgttcgacccggcgacgggcgccggcacggtgctcgactccgggacgatgttcaccaggctggtggcgccggcgtacgtggcggtgcgcgacgaggtccgccaccgcatccgcggcgccaacggccgcgtcggcttcgcccgcgagcagtgcaccgcggcttgacaccgattgattatccctctgccggtagctgggaaccgaggctgcggcctgcgccactgttgcctgtccgttggtgtcggacctgcatgcatccatgctggtgatttaattattttgtagcctagtgagtgtgtcgtctccatcggtgtgcaagatcttgtgtctttctttcttgtttgtgtaatatcatgtgtgtctct

SEQ ID NO: 62709 - protein, 361 aa, Triticum aestivum
  peptide (1)..(361): Ceres Seq. ID no. 13662246
  misc_feature (62)..(347): Pfam Name: Eukaryotic aspartyl protease Pfam Description: Eukaryotic aspartyl protease
  misc_feature (87)..(346): Homolog of NCBI NO: 15290061 NR Description: nucleoid DNA-binding protein cnd41-like protein
  misc_feature (52)..(338): Homolog of NCBI NO: 34895664 NR Description: nucleoid DNA-binding protein cnd41-like protein
  misc_feature (62)..(350): Homolog of NCBI NO: 34910676 NR Description: P0690B02.2 [Oryza sativa (japonica
  misc_feature (73)..(361): Homolog of NCBI NO: 21450872 NR Description: unknown protein [Arabidopsis thaliana]
  misc_feature (13)..(361): Homolog of NCBI NO: 18391062 NR Description: expressed protein [Arabidopsis thaliana]
  misc_feature (27)..(345): Homolog of NCBI NO: 20161865 NR Description: putative nucleoid DNA-binding-like protein
  misc_feature (25)..(345): Homolog of NCBI NO: 15240680 NR Description: nucleoid DNA-binding-related protein [Arabidopsis
  misc_feature (37)..(348): Homolog of NCBI NO: 15232503 NR Description: nucleoid DNA-binding - like protein [Arabidopsis
  misc_feature (37)..(348): Homolog of NCBI NO: 21617933 NR Description: nucleoid DNA-binding-like protein [Arabidopsis
  misc_feature (1)..(347): Homolog of NCBI NO: 34899068 NR Description: similar to nucleoid DNA-binding-like protein
MAGRLVLSVVVTLLAAAGAAAAESSCPATPPDAGPMLQVSHAFGPCSPLGNAAAAPSWAGFLADQSSRDASRLLYLDSLAVAGRAYAPIASGRQLLQTPTYVVRARLGTPPQQLLLAVDTSNDAAWIPCSGCAGCPTTTPFKPAASTSYRAVPCGSPACSRAPNPSCSLNTKSCGFSLTYADSSLEAALSQDSLAVANDVVKSYTFGCLQKATGTAAPPQGLLGLGRGPLSFLSQTKDMYEGTFSYCLPSFKSLNFSGTLRLGRKGQPLRIKTTPLLVNPHRSSLYYVGMTGIRVGKKVVPIPPSALAFDPATGAGTVLDSGTMFTRLVAPAYVAVRDEVRHRIRGANGRVGFAREQCTAA

SEQ ID NO: 62710 - protein, 326 aa, Triticum aestivum
  peptide (1)..(326): Ceres Seq. ID no. 13662247
  misc_feature (27)..(312): Pfam Name: Eukaryotic aspartyl protease Pfam Description: Eukaryotic aspartyl protease
  misc_feature (52)..(311): Homolog of NCBI NO: 15290061 NR Description: nucleoid DNA-binding protein cnd41-like protein
  misc_feature (17)..(303): Homolog of NCBI NO: 34895664 NR Description: nucleoid DNA-binding protein cnd41-like protein
  misc_feature (27)..(315): Homolog of NCBI NO: 34910676 NR Description: P0690B02.2 [Oryza sativa (japonica
  misc_feature (38)..(326): Homolog of NCBI NO: 21450872 NR Description: unknown protein [Arabidopsis thaliana]
  misc_feature (1)..(326): Homolog of NCBI NO: 18391062 NR Description: expressed protein [Arabidopsis thaliana]
  misc_feature (1)..(310): Homolog of NCBI NO: 20161865 NR Description: putative nucleoid DNA-binding-like protein
  misc_feature (1)..(310): Homolog of NCBI NO: 15240680 NR Description: nucleoid DNA-binding-related protein [Arabidopsis
  misc_feature (2)..(313): Homolog of NCBI NO: 15232503 NR Description: nucleoid DNA-binding - like protein [Arabidopsis
  misc_feature (2)..(313): Homolog of NCBI NO: 21617933 NR Description: nucleoid DNA-binding-like protein [Arabidopsis
  misc_feature (1)..(312): Homolog of NCBI NO: 34899068 NR Description: similar to nucleoid DNA-binding-like protein
MLQVSHAFGPCSPLGNAAAAPSWAGFLADQSSRDASRLLYLDSLAVAGRAYAPIASGRQLLQTPTYVVRARLGTPPQQLLLAVDTSNDAAWIPCSGCAGCPTTTPFKPAASTSYRAVPCGSPACSRAPNPSCSLNTKSCGFSLTYADSSLEAALSQDSLAVANDVVKSYTFGCLQKATGTAAPPQGLLGLGRGPLSFLSQTKDMYEGTFSYCLPSFKSLNFSGTLRLGRKGQPLRIKTTPLLVNPHRSSLYYVGMTGIRVGKKVVPIPPSALAFDPATGAGTVLDSGTMFTRLVAPAYVAVRDEVRHRIRGANGRVGFAREQCTAA

SEQ ID NO: 62711 - protein, 189 aa, Triticum aestivum
  peptide (1)..(189): Ceres Seq. ID no. 13662248
MSPEGHRHGGAAAGPPRARPRAAVVPVADQGHVRGHLLLLPPELQVPQLLRHAQARPQGPTAAHQDDAAARQPAPLLALLRGHDRHPRGQEGGAHPALRAGVRPGDGRRHGARLRDDVHQAGGAGVRGGARRGPPPHPRRQRPRRLRPRAVHRGLTPIDYPSAGSWEPRLRPAPLLPVRWCRTCMHPCW

SEQ ID NO: 62712 - DNA, 934 bp, Triticum aestivum
  misc_feature (1)..(934): Ceres Seq. ID no. 12584903
acaatcgtcccagatctcaagctctcaactcacctcacctcgcatctcaaacagtcttctcttttcggttggcataattgctagaagcagggttctatccatggcaatggtggtgaaggccctcctcgttgccgtcgtggccgtggcagcgcttgcgcagctcaccgtggcagtggatcaccaggtgggcggcagcggcgcgacctgggccaccagcggcggctacgactcgtggtcggggaagcagaagttctctccgggagacagcctcgtattttcgtactcgccggcgcacgacgtcgtggaggtgagcaaggccgactacgacgcctgcacggccagcaaagtcgtcgccagatacaccggcggcaagaccaccgtcaagctcaccactgccggaaagcgctacttcatctgcagcatcaccggccactgcgacgccggcatgaagctccaggtgaacgtcgccgacgtgaccgccggccccaccaagcccaggggccagaggagcgtcgcccctgtcgccgccccggcgccggcaccggaggggtcggccaccgacgagcagctgccgacagtgtcgtcgcctacgggaacaccgacgcccagttcaccgtccggctcgggcgccgctagcatcggtgcgagcgctgcggtggcgctcgccatgggcatggccgtggcgttggccatttgagagggatctggccgatccatgtgtaccaaggcttagttttggagtgctcaagtcttaatcacgtcgatacatttgcggatttgttcttgttattcttggctggcagtggcatgcacattgccttccctgcatgttccttccttcctactagtacagtgctatcagggttcagtgtactactgtgcgatttatttgttgtatttgtctgtcggagaataaatacaattcacattcttt

SEQ ID NO: 62713 - protein, 231 aa, Triticum aestivum
  peptide (1)..(231): Ceres Seq. ID no. 12584904
  misc_feature (69)..(149): Pfam Name: Plastocyanin-like domain Pfam Description: Plastocyanin-like domain
  misc_feature (38)..(185): Homolog of NCBI NO: 4104058 NR Description: blue copper-binding protein homolog [Triticum
  misc_feature (36)..(203): Homolog of NCBI NO: 34908748 NR Description: uclacyanin-like protein [Oryza sativa (japonica
  misc_feature (40)..(230): Homolog of NCBI NO: 34395239 NR Description: putative phytocyanin [Oryza sativa (japonica
  misc_feature (43)..(231): Homolog of NCBI NO: 14140127 NR Description: uclacyanin 3-like protein [Oryza sativa]
  misc_feature (36)..(228): Homolog of NCBI NO: 38636761 NR Description: putative blue copper binding protein
  misc_feature (36)..(227): Homolog of NCBI NO: 38636760 NR Description: putative blue copper binding protein
  misc_feature (41)..(231): Homolog of NCBI NO: 15225223 NR Description: putative uclacyanin I
  misc_feature (40)..(228): Homolog of NCBI NO: 38636763 NR Description: putative blue copper binding protein
  misc_feature (34)..(231): Homolog of NCBI NO: 38636764 NR Description: putative blue copper binding protein
  misc_feature (39)..(228): Homolog of NCBI NO: 34915492 NR Description: contains ESTs
QSSQISSSQLTSPRISNSLLFSVGIIARSRVLSMAMVVKALLVAVVAVAALAQLTVAVDHQVGGSGATWATSGGYDSWSGKQKFSPGDSLVFSYSPAHDVVEVSKADYDACTASKVVARYTGGKTTVKLTTAGKRYFICSITGHCDAGMKLQVNVADVTAGPTKPRGQRSVAPVAAPAPAPEGSATDEQLPTVSSPTGTPTPSSPSGSGAASIGASAAVALAMGMAVALAI

SEQ ID NO: 62714 - protein, 198 aa, Triticum aestivum
  peptide (1)..(198): Ceres Seq. ID no. 12584905
  misc_feature (36)..(116): Pfam Name: Plastocyanin-like domain Pfam Description: Plastocyanin-like domain
  misc_feature (5)..(152): Homolog of NCBI NO: 4104058 NR Description: blue copper-binding protein homolog [Triticum
  misc_feature (3)..(170): Homolog of NCBI NO: 34908748 NR Description: uclacyanin-like protein [Oryza sativa (japonica
  misc_feature (7)..(197): Homolog of NCBI NO: 34395239 NR Description: putative phytocyanin [Oryza sativa (japonica
  misc_feature (10)..(198): Homolog of NCBI NO: 14140127 NR Description: uclacyanin 3-like protein [Oryza sativa]
  misc_feature (3)..(195): Homolog of NCBI NO: 38636761 NR Description: putative blue copper binding protein
  misc_feature (3)..(194): Homolog of NCBI NO: 38636760 NR Description: putative blue copper binding protein
  misc_feature (8)..(198): Homolog of NCBI NO: 15225223 NR Description: putative uclacyanin I
  misc_feature (7)..(195): Homolog of NCBI NO: 38636763 NR Description: putative blue copper binding protein
  misc_feature (1)..(198): Homolog of NCBI NO: 38636764 NR Description: putative blue copper binding protein
  misc_feature (6)..(195): Homolog of NCBI NO: 34915492 NR Description: contains ESTs
MAMVVKALLVAVVAVAALAQLTVAVDHQVGGSGATWATSGGYDSWSGKQKFSPGDSLVFSYSPAHDVVEVSKADYDACTASKVVARYTGGKTTVKLTTAGKRYFICSITGHCDAGMKLQVNVADVTAGPTKPRGQRSVAPVAAPAPAPEGSATDEQLPTVSSPTGTPTPSSPSGSGAASIGASAAVALAMGMAVALAI

SEQ ID NO: 62715 - protein, 196 aa, Triticum aestivum
  peptide (1)..(196): Ceres Seq. ID no. 12584906
  misc_feature (34)..(114): Pfam Name: Plastocyanin-like domain Pfam Description: Plastocyanin-like domain
  misc_feature (3)..(150): Homolog of NCBI NO: 4104058 NR Description: blue copper-binding protein homolog [Triticum
  misc_feature (1)..(168): Homolog of NCBI NO: 34908748 NR Description: uclacyanin-like protein [Oryza sativa (japonica
  misc_feature (5)..(195): Homolog of NCBI NO: 34395239 NR Description: putative phytocyanin [Oryza sativa (japonica
  misc_feature (8)..(196): Homolog of NCBI NO: 14140127 NR Description: uclacyanin 3-like protein [Oryza sativa]
  misc_feature (1)..(193): Homolog of NCBI NO: 38636761 NR Description: putative blue copper binding protein
  misc_feature (1)..(192): Homolog of NCBI NO: 38636760 NR Description: putative blue copper binding protein
  misc_feature (6)..(196): Homolog of NCBI NO: 15225223 NR Description: putative uclacyanin I
  misc_feature (5)..(193): Homolog of NCBI NO: 38636763 NR Description: putative blue copper binding protein
  misc_feature (1)..(196): Homolog of NCBI NO: 38636764 NR Description: putative blue copper binding protein
  misc_feature (4)..(193): Homolog of NCBI NO: 34915492 NR Description: contains ESTs
MVVKALLVAVVAVAALAQLTVAVDHQVGGSGATWATSGGYDSWSGKQKFSPGDSLVFSYSPAHDVVEVSKADYDACTASKVVARYTGGKTTVKLTTAGKRYFICSITGHCDAGMKLQVNVADVTAGPTKPRGQRSVAPVAAPAPAPEGSATDEQLPTVSSPTGTPTPSSPSGSGAASIGASAAVALAMGMAVALAI

SEQ ID NO: 62716 - DNA, 1653 bp, Triticum aestivum
  misc_feature (1)..(1653): Ceres Seq. ID no. 13655244
aaaaaaactctccaagcgaatcccatttccgccggtcctcccttcgccaagccatcggcgactgctgcagcacagcctcctccccctcctcatggccgacccctccttctcctcccccacggcggcctccgcaggcgacgccctccccgcgccggcggcttccgacgcgccggaggtgaccctccccgccgccgcccccgacctggacaaggagttcgggttccagcgggcggagctcggtaaggagaagctcgccgggacggtgggcttccacgagcgccacgtgttcctctgctacaagggccctgaggagtggccatcccacgtcgaggcctccgagtccgaccacctcccccgcctcctcgccgccgccatcaaggcccgcaagcccaatctgaagaagagcaccaaactgacaatttgtgaaggagaagatggcactgagtcatctcttggagacgtgttgatctttcctgatatgatccgatacagagagctgacccaccttgatgtcgacaactttgtggatgaagtactcgtgaaagatactgaatggcttcctggatctcctgaggctataaaaggttcctatgtttttgtctgctgccatggaagcagggataaaaggtgtggtgtttgcggtcctgctctgattacaaggttcaaggaagggattgaaggacaaggtcttcatggtcaggtggctgttagtgcatgctcacacgttggaggtcacaagtatgcaggaaatgtcatcatattcagtccagatgccaagggagaagtgactggtcattggtatggttatgttgctcctgatgatgtgcctgtgttactgcgtcaacatatcggacaaggagagatcgtgggccatctatggaggggccagttgggtttgtctgaagagcagcagaagaaagctctggagcttaggcgcgcgacgaatggcctgactgaggaagaatcaagcgccaaagaatcccctgaagcaaatggagccaacggtgctgcttgcaaccctgcacctgcaggtggatgctgccagggcaatggaggaggtttaacctgctgccaaagtgatctgccagcaggaaaacaggataagagcgtcccagctgagcagaaccacaagagctctacgacagagagtgacaaagaaaacggtgctgccagcaagaaggggcgcatgaagatttgccggatgcccacctggttcgagacctgggacaagtccgacacctacaccactcttgctgttgttgcttctgctgcaaccgtgttcgccgccttcaggtgctacaaggccatgaactgaaccctcaaaacaaggccaggttctttgcaccaaggacagtctaccgcagtaaaacaatccgatttgaaaataatatactgcctgtgcatatcaagataatatgcgttaggactttagaaagtacagtagctgatctggagatggcgatgaaaatctgttatgcgtaatgccctcatgtactaaaagtctaaaactcgtaagtttgaagttccccacgccttggctgcatggctgtggctgtggtgttcagcgtgatgatgatgttatgctcgtttggctggaactgggatgcttgcgttagaaaaactgtgcattgctggcatttgcttctttgaagc

SEQ ID NO: 62717 - protein, 437 aa, Triticum aestivum
  peptide (1)..(437): Ceres Seq. ID no. 13655245
  misc_feature (69)..(358): Homolog of NCBI NO: 30688845 NR Description: sucrose cleavage protein -related [Arabidopsis
  misc_feature (69)..(358): Homolog of NCBI NO: 16604338 NR Description: AT3g27570/MMJ24_12 [Arabidopsis thaliana]
  misc_feature (69)..(362): Homolog of NCBI NO: 21553503 NR Description: sucrose cleavage protein-like [Arabidopsis
  misc_feature (69)..(362): Homolog of NCBI NO: 15237439 NR Description: sucrose cleavage protein -related [Arabidopsis
  misc_feature (81)..(367): Homolog of NCBI NO: 1086252 NR Description: sucrose cleavage protein - potato
  misc_feature (294)..(436): Homolog of NCBI NO: 7488353 NR Description: sucrose cleavage protein homolog T15N24.70 -
  misc_feature (69)..(230): Homolog of NCBI NO: 7488353 NR Description: sucrose cleavage protein homolog T15N24.70 -
  misc_feature (74)..(436): Homolog of NCBI NO: 15241075 NR Description: sucrose cleavage protein-related [Arabidopsis
  misc_feature (69)..(436): Homolog of NCBI NO: 18416788 NR Description: sucrase-related protein [Arabidopsis thaliana]
  misc_feature (69)..(436): Homolog of NCBI NO: 16604384 NR Description: AT4g26620/T15N24_70 [Arabidopsis thaliana]
KKLSKRIPFPPVLPSPSHRRLLQHSLLPLLMADPSFSSPTAASAGDALPAPAASDAPEVTLPAAAPDLDKEFGFQRAELGKEKLAGTVGFHERHVFLCYKGPEEWPSHVEASESDHLPRLLAAAIKARKPNLKKSTKLTICEGEDGTESSLGDVLIFPDMIRYRELTHLDVDNFVDEVLVKDTEWLPGSPEAIKGSYVFVCCHGSRDKRCGVCGPALITRFKEGIEGQGLHGQVAVSACSHVGGHKYAGNVIIFSPDAKGEVTGHWYGYVAPDDVPVLLRQHIGQGEIVGHLWRGQLGLSEEQQKKALELRRATNGLTEEESSAKESPEANGANGAACNPAPAGGCCQGNGGGLTCCQSDLPAGKQDKSVPAEQNHKSSTTESDKENGAASKKGRMKICRMPTWFETWDKSDTYTTLAVVASAATVFAAFRCYKAMN

SEQ ID NO: 62718 - protein, 407 aa, Triticum aestivum
  peptide (1)..(407): Ceres Seq. ID no. 13655246
  misc_feature (39)..(328): Homolog of NCBI NO: 30688845 NR Description: sucrose cleavage protein -related [Arabidopsis
  misc_feature (39)..(328): Homolog of NCBI NO: 16604338 NR Description: AT3g27570/MMJ24_12 [Arabidopsis thaliana]
  misc_feature (39)..(332): Homolog of NCBI NO: 21553503 NR Description: sucrose cleavage protein-like [Arabidopsis
  misc_feature (39)..(332): Homolog of NCBI NO: 15237439 NR Description: sucrose cleavage protein -related [Arabidopsis
  misc_feature (51)..(337): Homolog of NCBI NO: 1086252 NR Description: sucrose cleavage protein - potato
  misc_feature (264)..(406): Homolog of NCBI NO: 7488353 NR Description: sucrose cleavage protein homolog T15N24.70 -
  misc_feature (39)..(200): Homolog of NCBI NO: 7488353 NR Description: sucrose cleavage protein homolog T15N24.70 -
  misc_feature (44)..(406): Homolog of NCBI NO: 15241075 NR Description: sucrose cleavage protein-related [Arabidopsis
  misc_feature (39)..(406): Homolog of NCBI NO: 18416788 NR Description: sucrase-related protein [Arabidopsis thaliana]
  misc_feature (39)..(406): Homolog of NCBI NO: 16604384 NR Description: AT4g26620/T15N24_70 [Arabidopsis thaliana]
MADPSFSSPTAASAGDALPAPAASDAPEVTLPAAAPDLDKEFGFQRAELGKEKLAGTVGFHERHVFLCYKGPEEWPSHVEASESDHLPRLLAAAIKARKPNLKKSTKLTICEGEDGTESSLGDVLIFPDMIRYRELTHLDVDNFVDEVLVKDTEWLPGSPEAIKGSYVFVCCHGSRDKRCGVCGPALITRFKEGIEGQGLHGQVAVSACSHVGGHKYAGNVIIFSPDAKGEVTGHWYGYVAPDDVPVLLRQHIGQGEIVGHLWRGQLGLSEEQQKKALELRRATNGLTEEESSAKESPEANGANGAACNPAPAGGCCQGNGGGLTCCQSDLPAGKQDKSVPAEQNHKSSTTESDKENGAASKKGRMKICRMPTWFETWDKSDTYTTLAVVASAATVFAAFRCYKAMN

SEQ ID NO: 62719 - protein, 278 aa, Triticum aestivum
  peptide (1)..(278): Ceres Seq. ID no. 13655247
  misc_feature (1)..(199): Homolog of NCBI NO: 30688845 NR Description: sucrose cleavage protein -related [Arabidopsis
  misc_feature (1)..(199): Homolog of NCBI NO: 16604338 NR Description: AT3g27570/MMJ24_12 [Arabidopsis thaliana]
  misc_feature (1)..(203): Homolog of NCBI NO: 21553503 NR Description: sucrose cleavage protein-like [Arabidopsis
  misc_feature (1)..(203): Homolog of NCBI NO: 15237439 NR Description: sucrose cleavage protein -related [Arabidopsis
  misc_feature (1)..(208): Homolog of NCBI NO: 1086252 NR Description: sucrose cleavage protein - potato
  misc_feature (135)..(277): Homolog of NCBI NO: 7488353 NR Description: sucrose cleavage protein homolog T15N24.70 -
  misc_feature (1)..(71): Homolog of NCBI NO: 7488353 NR Description: sucrose cleavage protein homolog T15N24.70 -
  misc_feature (1)..(277): Homolog of NCBI NO: 15241075 NR Description: sucrose cleavage protein-related [Arabidopsis
  misc_feature (1)..(277): Homolog of NCBI NO: 18416788 NR Description: sucrase-related protein [Arabidopsis thaliana]
  misc_feature (1)..(277): Homolog of NCBI NO: 16604384 NR Description: AT4g26620/T15N24_70 [Arabidopsis thaliana]
MIRYRELTHLDVDNFVDEVLVKDTEWLPGSPEAIKGSYVFVCCHGSRDKRCGVCGPALITRFKEGIEGQGLHGQVAVSACSHVGGHKYAGNVIIFSPDAKGEVTGHWYGYVAPDDVPVLLRQHIGQGEIVGHLWRGQLGLSEEQQKKALELRRATNGLTEEESSAKESPEANGANGAACNPAPAGGCCQGNGGGLTCCQSDLPAGKQDKSVPAEQNHKSSTTESDKENGAASKKGRMKICRMPTWFETWDKSDTYTTLAVVASAATVFAAFRCYKAMN

SEQ ID NO: 62720 - DNA, 1623 bp, Triticum aestivum
  misc_feature (1)..(1623): Ceres Seq. ID no. 13591365
gacgacaacgccagcgccaccactctcaagagtcttaaaccctcactcctctccttccaccacctctccacacacaccatctctgtcagacatggcgccttccgcgacctgccctctccactccatggcatccgtctcccgcgctctccgcccgcgcccgcgtctcgccgctcctcgtctcggatgcggactgagagttggatgctctgtgccagcatatggaagtgctgccacggagaaggccgagtggggattggccattgcgccctcaccagcgaccactcttgttccggttgtcaggagccgtcaaattttctgcaaggcagaagctaacatttctagtaacctgccagcgagcaagcctactggagcaagccagtacgagaaaatagttgagctactcactactcttttccctgtctgggtcatattaggtacagttattggcatctacaagccatcaatggtcacctggttggagactgatctttttaccgtgggcctaggattcctaatgttgtcaatgggactaacattaacatttgaagatttcaggagatgtttaaggaatccatggacagttggtgtgggatttcttgcgcagtatttgatcaaacctatgctaggatatgctatcgcattgtcattgaagttatctgctcctcttgcaactggtcttattttggtctcatgttgtcctggtggtcaagcatcaaacgttgcaacttacatatccaaaggaaatgtggcactttcagttcttatgaccacttgctcgactattggtgctatagcgatgacaccactccttactaaactccttgctggtcaattagtccctgttgatgctgcaggcttggccatcagtacttttcaggttgttttagtaccgactatcgttggagtgttggcacatgagtattttcccaagtttaccgagcggattatctccataacaccactgataggggtcatcctcaccaccttgctttgtgctagccctattgggcaagtcgcagaagtgttgaaaactcaaggtgctcaacttattctccctgttgctctgctgcatgctgttgcattcgctcttggctattggatctcgaaatggtcttctttcggggaatcaacttctagaaccatctcaattgagtgtgggatgcagagttctgcgcttggatttttacttgcccaaaagcacttcacaaaccctcttgttgctgttccttctgctgtcagtgttgtgtgcatggcgctcggaggcagtgctcttgcagtattctggagaaacagaggccttccagcagatgacaaggacgatttcaaggaatgaatgaagcaaaaacaatcctaggctccagcttctagtcgttccatgttttagttgagcgtggttacgtcagagaattttttatattcccatattttaggtatgtaaaacacaaaacaggataaggacgtttgtttattctagataattgattattggtaggaaggacccttgttaatgatttaggcaaggctttgcaattaagtttggtgtgtaatgtatttttcatcttctaaataaataagctgcttctcagacaaagcagtaattcgtttatatatatggtgttatgc

SEQ ID NO: 62721 - protein, 443 aa, Triticum aestivum
  peptide (1)..(443): Ceres Seq. ID no. 13591366
  misc_feature (165)..(342): Pfam Name: Sodium Bile acid symporter family Pfam Description: Sodium Bile acid symporter family
  misc_feature (171)..(438): Homolog of NCBI NO: 22298669 NR Description: ORF_ID:tll1126~probable sodium-dependent
  misc_feature (131)..(429): Homolog of NCBI NO: 33865169 NR Description: Sodium/bile acid cotransporter family
  misc_feature (125)..(429): Homolog of NCBI NO: 24217327 NR Description: conserved hypothetical protein
  misc_feature (129)..(438): Homolog of NCBI NO: 38346633 NR Description: OSJNBa0072D21.3 [Oryza sativa (japonica
  misc_feature (66)..(439): Homolog of NCBI NO: 18412023 NR Description: bile acid:sodium symporter family [Arabidopsis
  misc_feature (172)..(443): Homolog of NCBI NO: 28393076 NR Description: putative Na+ dependent ileal bile acid
  misc_feature (99)..(419): Homolog of NCBI NO: 7485401 NR Description: hypothetical protein At2g26900 [imported] -
  misc_feature (90)..(443): Homolog of NCBI NO: 20269901 NR Description: putative sodium-dependent bile acid symporter
  misc_feature (90)..(443): Homolog of NCBI NO: 30683305 NR Description: bile acid:sodium symporter family [Arabidopsis
  misc_feature (42)..(443): Homolog of NCBI NO: 34911708 NR Description: P0707D10.18 [Oryza sativa (japonica
TTTPAPPLSRVLNPHSSPSTTSPHTPSLSDMAPSATCPLHSMASVSRALRPRPRLAAPRLGCGLRVGCSVPAYGSAATEKAEWGLAIAPSPATTLVPVVRSRQIFCKAEANISSNLPASKPTGASQYEKIVELLTTLFPVWVILGTVIGIYKPSMVTWLETDLFTVGLGFLMLSMGLTLTFEDFRRCLRNPWTVGVGFLAQYLIKPMLGYAIALSLKLSAPLATGLILVSCCPGGQASNVATYISKGNVALSVLMTTCSTIGAIAMTPLLTKLLAGQLVPVDAAGLAISTFQVVLVPTIVGVLAHEYFPKFTERIISITPLIGVILTTLLCASPIGQVAEVLKTQGAQLILPVALLHAVAFALGYWISKWSSFGESTSRTISIECGMQSSALGFLLAQKHFTNPLVAVPSAVSVVCMALGGSALAVFWRNRGLPADDKDDFKE

SEQ ID NO: 62722 - protein, 413 aa, Triticum aestivum
  peptide (1)..(413): Ceres Seq. ID no. 13591367
  misc_feature (135)..(312): Pfam Name: Sodium Bile acid symporter family Pfam Description: Sodium Bile acid symporter family
  misc_feature (141)..(408): Homolog of NCBI NO: 22298669 NR Description: ORF_ID:tll1126~probable sodium-dependent
  misc_feature (101)..(399): Homolog of NCBI NO: 33865169 NR Description: Sodium/bile acid cotransporter family
  misc_feature (95)..(399): Homolog of NCBI NO: 24217327 NR Description: conserved hypothetical protein
  misc_feature (99)..(408): Homolog of NCBI NO: 38346633 NR Description: OSJNBa0072D21.3 [Oryza sativa (japonica
  misc_feature (36)..(409): Homolog of NCBI NO: 18412023 NR Description: bile acid:sodium symporter family [Arabidopsis
  misc_feature (142)..(413): Homolog of NCBI NO: 28393076 NR Description: putative Na+ dependent ileal bile acid
  misc_feature (69)..(389): Homolog of NCBI NO: 7485401 NR Description: hypothetical protein At2g26900 [imported] -
  misc_feature (60)..(413): Homolog of NCBI NO: 20269901 NR Description: putative sodium-dependent bile acid symporter
  misc_feature (60)..(413): Homolog of NCBI NO: 30683305 NR Description: bile acid:sodium symporter family [Arabidopsis
  misc_feature (12)..(413): Homolog of NCBI NO: 34911708 NR Description: P0707D10.18 [Oryza sativa (japonica
MAPSATCPLHSMASVSRALRPRPRLAAPRLGCGLRVGCSVPAYGSAATEKAEWGLAIAPSPATTLVPVVRSRQIFCKAEANISSNLPASKPTGASQYEKIVELLTTLFPVWVILGTVIGIYKPSMVTWLETDLFTVGLGFLMLSMGLTLTFEDFRRCLRNPWTVGVGFLAQYLIKPMLGYAIALSLKLSAPLATGLILVSCCPGGQASNVATYISKGNVALSVLMTTCSTIGAIAMTPLLTKLLAGQLVPVDAAGLAISTFQVVLVPTIVGVLAHEYFPKFTERIISITPLIGVILTTLLCASPIGQVAEVLKTQGAQLILPVALLHAVAFALGYWISKWSSFGESTSRTISIECGMQSSALGFLLAQKHFTNPLVAVPSAVSVVCMALGGSALAVFWRNRGLPADDKDDFKE

SEQ ID NO: 62723 - protein, 402 aa, Triticum aestivum
  peptide (1)..(402): Ceres Seq. ID no. 13591368
  misc_feature (124)..(301): Pfam Name: Sodium Bile acid symporter family Pfam Description: Sodium Bile acid symporter family
  misc_feature (130)..(397): Homolog of NCBI NO: 22298669 NR Description: ORF_ID:tll1126~probable sodium-dependent
  misc_feature (90)..(388): Homolog of NCBI NO: 33865169 NR Description: Sodium/bile acid cotransporter family
  misc_feature (84)..(388): Homolog of NCBI NO: 24217327 NR Description: conserved hypothetical protein
  misc_feature (88)..(397): Homolog of NCBI NO: 38346633 NR Description: OSJNBa0072D21.3 [Oryza sativa (japonica
  misc_feature (25)..(398): Homolog of NCBI NO: 18412023 NR Description: bile acid:sodium symporter family [Arabidopsis
  misc_feature (131)..(402): Homolog of NCBI NO: 28393076 NR Description: putative Na+ dependent ileal bile acid
  misc_feature (58)..(378): Homolog of NCBI NO: 7485401 NR Description: hypothetical protein At2g26900 [imported] -
  misc_feature (49)..(402): Homolog of NCBI NO: 20269901 NR Description: putative sodium-dependent bile acid symporter
  misc_feature (49)..(402): Homolog of NCBI NO: 30683305 NR Description: bile acid:sodium symporter family [Arabidopsis
  misc_feature (1)..(402): Homolog of NCBI NO: 34911708 NR Description: P0707D10.18 [Oryza sativa (japonica
MASVSRALRPRPRLAAPRLGCGLRVGCSVPAYGSAATEKAEWGLAIAPSPATTLVPVVRSRQIFCKAEANISSNLPASKPTGASQYEKIVELLTTLFPVWVILGTVIGIYKPSMVTWLETDLFTVGLGFLMLSMGLTLTFEDFRRCLRNPWTVGVGFLAQYLIKPMLGYAIALSLKLSAPLATGLILVSCCPGGQASNVATYISKGNVALSVLMTTCSTIGAIAMTPLLTKLLAGQLVPVDAAGLAISTFQVVLVPTIVGVLAHEYFPKFTERIISITPLIGVILTTLLCASPIGQVAEVLKTQGAQLILPVALLHAVAFALGYWISKWSSFGESTSRTISIECGMQSSALGFLLAQKHFTNPLVAVPSAVSVVCMALGGSALAVFWRNRGLPADDKDDFKE

SEQ ID NO: 62724 - DNA, 1115 bp, Triticum aestivum
  misc_feature (1)..(1115): Ceres Seq. ID no. 12615296
aaagcggttgttccccattcttaaaccttccacgaccctctcctcccttccggcctgcttccactcttctccgtcaggatttcgttccagaaatcgaaagatgaagatcattccggtggcttgcttggaggataactatgcctacctgatcgttgacgagagcaccaaggcggcggcggccgtcgacccggtggagccggagaaggtgctggcggcggccagcgaggtcggcgcctacatcgactgcgtcctcaccacccaccaccactgggatcatgctggtggcaatgagaagatgaggctgctggtgccagggattaaggtctatgggggatccatggacaatgttaaaggctgcactgatcaggtggaaaacggaactaagttatccattgggaaggaaattgacatactgtgcctacatacgccatgtcatacaaaaggtcatattagctactacgttactagcaaagaggaggaagacccagcagtatttactggagacaccttgttcattgctggctgtgggaggtttttcgagggtacggcagagcaaatgtaccagtccctttgtgttacactgggctcgctgcctaagtcaactcgtgtttactgtggccatgagtacactgtaaagagcctacaattcatgctgacagtcgagccagagaacgaaaaaatgaagcagaaactggaatgggctcaaaagcagcgtgaagcaaatcaaccgacggttccctcaactataggagatgagcttgagataaacaccttcatgcgtgttgatctgcctgaaatacaggcaaaatttggtgccaagtcggcagttgaagcgctgaggacggtcaggaacatcaaggatacctggaaaggttgataaacgcagctgccactcatacttgtaggtggcgtttacagccgtgcgatgctttgagagctacgtacgtgttaagaagataatatgccagtgtttcctttaagaaaaacataagagaaaggagtccagtctgctaatatgctttggtatcaatcagaatacaactgttgtggcatgttaattactactggtatgttatttcttggcaaaacaaacaaaaactatgttggcctgtggc

SEQ ID NO: 62725 - protein, 291 aa, Triticum aestivum
  peptide (1)..(291): Ceres Seq. ID no. 12615297
  misc_feature (44)..(207): Pfam Name: Metallo-beta-lactamase superfamily Pfam Description: Metallo-beta-lactamase superfamily
  misc_feature (34)..(287): Homolog of NCBI NO: 29841459 NR Description: similar to probable hydroxyacylglutathione
  misc_feature (21)..(290): Homolog of NCBI NO: 24667711 NR Description: CG4365-PB [Drosophila melanogaster]
  misc_feature (21)..(290): Homolog of NCBI NO: 24667703 NR Description: CG4365-PC [Drosophila melanogaster]
  misc_feature (21)..(290): Homolog of NCBI NO: 21356335 NR Description: CG4365-PA [Drosophila melanogaster]
  misc_feature (34)..(290): Homolog of NCBI NO: 2494848 NR Description: Hydroxyacylglutathione hydrolase (Glyoxalase II)
  misc_feature (34)..(290): Homolog of NCBI NO: 15375320 NR Description: hydroxyacyl glutathione hydrolase
  misc_feature (34)..(290): Homolog of NCBI NO: 4885389 NR Description: hydroxyacyl glutathione hydrolase
  misc_feature (34)..(290): Homolog of NCBI NO: 21729786 NR Description: hydroxyacyl glutathione hydrolase
  misc_feature (34)..(291): Homolog of NCBI NO: 2570342 NR Description: glyoxalase II cytoplasmic isozyme [Arabidopsis
  misc_feature (34)..(291): Homolog of NCBI NO: 15228389 NR Description: glyoxalase II (hydroxyacylglutathione
KRLFPILKPSTTLSSLPACFHSSPSGFRSRNRKMKIIPVACLEDNYAYLIVDESTKAAAAVDPVEPEKVLAAASEVGAYIDCVLTTHHHWDHAGGNEKMRLLVPGIKVYGGSMDNVKGCTDQVENGTKLSIGKEIDILCLHTPCHTKGHISYYVTSKEEEDPAVFTGDTLFIAGCGRFFEGTAEQMYQSLCVTLGSLPKSTRVYCGHEYTVKSLQFMLTVEPENEKMKQKLEWAQKQREANQPTVPSTIGDELEINTFMRVDLPEIQAKFGAKSAVEALRTVRNIKDTWKG

SEQ ID NO: 62726 - protein, 258 aa, Triticum aestivum
  peptide (1)..(258): Ceres Seq. ID no. 12615298
  misc_feature (11)..(174): Pfam Name: Metallo-beta-lactamase superfamily Pfam Description: Metallo-beta-lactamase superfamily
  misc_feature (1)..(254): Homolog of NCBI NO: 29841459 NR Description: similar to probable hydroxyacylglutathione
  misc_feature (1)..(257): Homolog of NCBI NO: 24667711 NR Description: CG4365-PB [Drosophila melanogaster]
  misc_feature (1)..(257): Homolog of NCBI NO: 24667703 NR Description: CG4365-PC [Drosophila melanogaster]
  misc_feature (1)..(257): Homolog of NCBI NO: 21356335 NR Description: CG4365-PA [Drosophila melanogaster]
  misc_feature (1)..(257): Homolog of NCBI NO: 2494848 NR Description: Hydroxyacylglutathione hydrolase (Glyoxalase II)
  misc_feature (1)..(257): Homolog of NCBI NO: 15375320 NR Description: hydroxyacyl glutathione hydrolase
  misc_feature (1)..(257): Homolog of NCBI NO: 4885389 NR Description: hydroxyacyl glutathione hydrolase
  misc_feature (1)..(257): Homolog of NCBI NO: 21729786 NR Description: hydroxyacyl glutathione hydrolase
  misc_feature (1)..(258): Homolog of NCBI NO: 2570342 NR Description: glyoxalase II cytoplasmic isozyme [Arabidopsis
  misc_feature (1)..(258): Homolog of NCBI NO: 15228389 NR Description: glyoxalase II (hydroxyacylglutathione
MKIIPVACLEDNYAYLIVDESTKAAAAVDPVEPEKVLAAASEVGAYIDCVLTTHHHWDHAGGNEKMRLLVPGIKVYGGSMDNVKGCTDQVENGTKLSIGKEIDILCLHTPCHTKGHISYYVTSKEEEDPAVFTGDTLFIAGCGRFFEGTAEQMYQSLCVTLGSLPKSTRVYCGHEYTVKSLQFMLTVEPENEKMKQKLEWAQKQREANQPTVPSTIGDELEINTFMRVDLPEIQAKFGAKSAVEALRTVRNIKDTWKG

SEQ ID NO: 62727 - protein, 193 aa, Triticum aestivum
  peptide (1)..(193): Ceres Seq. ID no. 12615299
  misc_feature (1)..(109): Pfam Name: Metallo-beta-lactamase superfamily Pfam Description: Metallo-beta-lactamase superfamily
  misc_feature (1)..(189): Homolog of NCBI NO: 29841459 NR Description: similar to probable hydroxyacylglutathione
  misc_feature (1)..(192): Homolog of NCBI NO: 24667711 NR Description: CG4365-PB [Drosophila melanogaster]
  misc_feature (1)..(192): Homolog of NCBI NO: 24667703 NR Description: CG4365-PC [Drosophila melanogaster]
  misc_feature (1)..(192): Homolog of NCBI NO: 21356335 NR Description: CG4365-PA [Drosophila melanogaster]
  misc_feature (1)..(192): Homolog of NCBI NO: 2494848 NR Description: Hydroxyacylglutathione hydrolase (Glyoxalase II)
  misc_feature (1)..(192): Homolog of NCBI NO: 15375320 NR Description: hydroxyacyl glutathione hydrolase
  misc_feature (1)..(192): Homolog of NCBI NO: 4885389 NR Description: hydroxyacyl glutathione hydrolase
  misc_feature (1)..(192): Homolog of NCBI NO: 21729786 NR Description: hydroxyacyl glutathione hydrolase
  misc_feature (1)..(193): Homolog of NCBI NO: 2570342 NR Description: glyoxalase II cytoplasmic isozyme [Arabidopsis
  misc_feature (1)..(193): Homolog of NCBI NO: 15228389 NR Description: glyoxalase II (hydroxyacylglutathione
MRLLVPGIKVYGGSMDNVKGCTDQVENGTKLSIGKEIDILCLHTPCHTKGHISYYVTSKEEEDPAVFTGDTLFIAGCGRFFEGTAEQMYQSLCVTLGSLPKSTRVYCGHEYTVKSLQFMLTVEPENEKMKQKLEWAQKQREANQPTVPSTIGDELEINTFMRVDLPEIQAKFGAKSAVEALRTVRNIKDTWKG

SEQ ID NO: 62728 - DNA, 1313 bp, Triticum aestivum
  misc_feature (1)..(1313): Ceres Seq. ID no. 13596689
acaaaagagggccgaggagacagggacacgcaagcttcaggcacaagccctacgccgcctcgcctcgcctggttgcttgcttgtcttcgaagatccatagttagttgcactacaccagaagaatcaaccaaagcttcggcccgacttaatcgccatcccttgttgttgttgcgcctcgatcgatcttggcgcggtggtgactaatggcgcactgcggcggcggtcaggcggcgtccgtggagagccatttccagggcctgctcgacgacgacgacaagtaccgcgcattgtgcggcgcgttcgggtacctgcagcagcaggagtggccggacctcagcggcgcttgctacgcggccttcggcgcgccaccaccaccgggcagcagcaacggcgccggcaactccttctcctgcagcggtagcgccagcagcggcgacgggtccacgaagagaaaacctgacgcgtatgtggacgcaaaggacgactgcaagaggccgagagggaagcagcagctgtgcgaccctggcgaggctgaaggagcggcgaaaggcaggccggagaaacccaaggcgtgcgccaggaagaagccggaggcggcggccaccggccagaagaccgactacatccacgtccgagcccggcgcgggcaggccacggacagccacagcctcgccgaacgggtgaggcgggagcggatcagcgagcggatgaggtacctgcaggagctggtgcccgggtgcgacaaggtcactggcaaggccggcatgctcgacgagatcattaactacgtccagtccctgcagaagcaggtcgagttcctgtccatgaagatcgccgcctccaacccggtggtgaacttcaacatcgtcgacgacctcttcggcggcaggcggatgaaccaggcgtgcggccccgcggcggccctgcccgccatgacgttgccgatgcaccatgcgcagctggacccgtcctgccttcagatgagcagcactaccatgcagcagatgcagcagccggctgctgggttcgggctggacatgctcctcaacaacccgtacccggcggcgcagagcgcgtcccggtcggcggctgccacgccggtctcggtgtcggccgccgcgtcggtcgagtcatccctcgatgtgaatggagctgctgcttgggacattgcgtctcagcatttgttcagtgggtttgacgcacagtttcagtcagttcaaagtgagtagctgcttctytgaagcaaagcttgcagggttaccttgtactgatattcttgtgtgaaagaacatagatacagagttagccaaggg

SEQ ID NO: 62729 - protein, 341 aa, Triticum aestivum
  peptide (1)..(341): Ceres Seq. ID no. 15221951
  misc_feature (150)..(200): Pfam Name: Helix-loop-helix DNA-binding domain Pfam Description: Helix-loop-helix DNA-binding domain
  misc_feature (60)..(267): Homolog of NCBI NO: 15222679 NR Description: bHLH protein [Arabidopsis thaliana]
  misc_feature (55)..(275): Homolog of NCBI NO: 30697769 NR Description: DNA-binding protein -related [Arabidopsis
  misc_feature (55)..(275): Homolog of NCBI NO: 20127044 NR Description: putative bHLH transcription factor [Arabidopsis
  misc_feature (55)..(275): Homolog of NCBI NO: 15221563 NR Description: DNA-binding protein -related [Arabidopsis
  misc_feature (136)..(270): Homolog of NCBI NO: 22329164 NR Description: bHLH protein [Arabidopsis thaliana]
  misc_feature (136)..(270): Homolog of NCBI NO: 21539493 NR Description: unknown protein [Arabidopsis thaliana]
  misc_feature (136)..(270): Homolog of NCBI NO: 20127066 NR Description: putative bHLH transcription factor [Arabidopsis
  misc_feature (136)..(270): Homolog of NCBI NO: 7487656 NR Description: hypothetical protein T4L20.110 - Arabidopsis
  misc_feature (5)..(237): Homolog of NCBI NO: 34906952 NR Description: DNA-binding protein-like protein
  misc_feature (58)..(276): Homolog of NCBI NO: 34898690 NR Description: hypothetical protein [Oryza sativa (japonica
MAHCGGGQAASVESHFQGLLDDDDKYRALCGAFGYLQQQEWPDLSGACYAAFGAPPPPGSSNGAGNSFSCSGSASSGDGSTKRKPDAYVDAKDDCKRPRGKQQLCDPGEAEGAAKGRPEKPKACARKKPEAAATGQKTDYIHVRARRGQATDSHSLAERVRRERISERMRYLQELVPGCDKVTGKAGMLDEIINYVQSLQKQVEFLSMKIAASNPVVNFNIVDDLFGGRRMNQACGPAAALPAMTLPMHHAQLDPSCLQMSSTTMQQMQQPAAGFGLDMLLNNPYPAAQSASRSAAATPVSVSAAASVESSLDVNGAAAWDIASQHLFSGFDAQFQSVQSE

SEQ ID NO: 62730 - protein, 173 aa, Triticum aestivum
  peptide (1)..(173): Ceres Seq. ID no. 15221952
  misc_feature (1)..(99): Homolog of NCBI NO: 15222679 NR Description: bHLH protein [Arabidopsis thaliana]
  misc_feature (1)..(107): Homolog of NCBI NO: 30697769 NR Description: DNA-binding protein -related [Arabidopsis
  misc_feature (1)..(107): Homolog of NCBI NO: 20127044 NR Description: putative bHLH transcription factor [Arabidopsis
  misc_feature (1)..(107): Homolog of NCBI NO: 15221563 NR Description: DNA-binding protein -related [Arabidopsis
  misc_feature (1)..(102): Homolog of NCBI NO: 20127066 NR Description: putative bHLH transcription factor [Arabidopsis
  misc_feature (1)..(102): Homolog of NCBI NO: 21539493 NR Description: unknown protein [Arabidopsis thaliana]
  misc_feature (1)..(102): Homolog of NCBI NO: 22329164 NR Description: bHLH protein [Arabidopsis thaliana]
  misc_feature (1)..(102): Homolog of NCBI NO: 7487656 NR Description: hypothetical protein T4L20.110 - Arabidopsis
  misc_feature (1)..(69): Homolog of NCBI NO: 34906952 NR Description: DNA-binding protein-like protein
  misc_feature (1)..(108): Homolog of NCBI NO: 34898690 NR Description: hypothetical protein [Oryza sativa (japonica
MRYLQELVPGCDKVTGKAGMLDEIINYVQSLQKQVEFLSMKIAASNPVVNFNIVDDLFGGRRMNQACGPAAALPAMTLPMHHAQLDPSCLQMSSTTMQQMQQPAAGFGLDMLLNNPYPAAQSASRSAAATPVSVSAAASVESSLDVNGAAAWDIASQHLFSGFDAQFQSVQSE

SEQ ID NO: 62731 - DNA, 1612 bp, Triticum aestivum
  misc_feature (1)..(1612): Ceres Seq. ID no. 13596743
actgatttccccctccacctatctacccgccgccgccacgcccgccgccgacgacgatggcaactaccgcctcaccctccaccacgaccaccccccggtccttcctctcgtcgccttccttctccctcagggcatcgaagtcgagccacctccggacgacgagaaggctgcccgttaatgtacgctgcgccagtagctctccggccgccgatacatcttacacgacgaaggtctcgcggaatgccaacatagccaagctccaagcaggctatttgtttccggagattgccagaagaagggcagctcatctgctaaagcatcctgacgccaaaattataagtctgggaataggtgacactactgagcccattccggaggtcataacaaatgccatggcagagagagcacatgctttatccacagtggatggctacagtggttatggagctgaacaaggtgaaaagaaactaagggcagcaattgctgcaacctactatgcggatcttggtattgacgaaactgatatatttgtctctgatggtgccaaatgtgacatttctcgcctacaggttctttttggatctaaagtgaagattgcagttcaagatccatcatatcccgcatatgttgattcaagtgttatcatggggcaaactgacttatatcagcaggatgttcagaagtatggaaatattgaatacatgagatgcagtcctgaaaatggatttttccctgatctttccaaggtcccacggacagatatcatattcttctgttcacccaacaatcctactggtgctgctgcatctagggaccagctaacacagttggtcaaattcgcaaaggacaatgggtccataatagtctatgattctgcttatgccatgtacatatcagatgacagcccaaaatccatctttgaaattcctggggcgaaggaggttgccctcgagacagcatctttctctaaatatgctgggttcactggtgtccgactgggttggactgtggtccctaaggagctccttttctccgatgggcatccagtcgctaaagatttcaaccgcatagtctgcacttccttcaatggcgcatcgaccatctctcaggccggtggtttaggctgcctctctccagagggtctaaaggctatgcaagacgttgtcggattctacaaggagaacaccaaaatcattgtcgacacgtttgagtcgctcggattcaacgtctacggtgcgaagaatgccccctatgtgtgggtgcacttccctgaccgcaattcctgggatgtctttgccgagatccttgagaaggcaaacgtggtcactactcccggcagtggatttgggcccggcggtgagggctttgtgagggtcagtgcatttggccacagagagaacattattgaagctgcgagaagactgaagcagctatacaaatgagcgttggtttagcaggtggccccctctgtcgctggggagccaggcaataagaacccagcagcatttggagcacgaggtttgcttctcggctgctgggaagtgttagaatagagacagggtgttgtttttgctccattcgtaaccatttaatactggaaatttgcttgttc

SEQ ID NO: 62732 - protein, 461 aa, Triticum aestivum
  peptide (1)..(461): Ceres Seq. ID no. 15221966
  misc_feature (150)..(460): Pfam Name: Aminotransferase class I and II Pfam Description: Aminotransferase class I and II
  misc_feature (62)..(459): Homolog of NCBI NO: 23022290 NR Description: hypothetical protein [Clostridium thermocellum
  misc_feature (62)..(461): Homolog of NCBI NO: 23124300 NR Description: hypothetical protein [Nostoc punctiforme]
  misc_feature (62)..(459): Homolog of NCBI NO: 24213476 NR Description: aminotransferase [Leptospira interrogans serovar
  misc_feature (56)..(460): Homolog of NCBI NO: 18397344 NR Description: aminotransferase family [Arabidopsis thaliana]
  misc_feature (51)..(460): Homolog of NCBI NO: 25315768 NR Description: probable aspartate aminotransferase
  misc_feature (57)..(457): Homolog of NCBI NO: 24414269 NR Description: Putative transaminase [Oryza sativa (japonica
  misc_feature (57)..(457): Homolog of NCBI NO: 37703722 NR Description: putative aminotransferase ALD1
  misc_feature (40)..(461): Homolog of NCBI NO: 7447845 NR Description: probable transaminase (EC 2.6.1.-) T16L1.170
  misc_feature (6)..(461): Homolog of NCBI NO: 18418270 NR Description: aminotransferase family [Arabidopsis thaliana]
  misc_feature (2)..(461): Homolog of NCBI NO: 37703720 NR Description: putative aminotransferase AGD2
MATTASPSTTTTPRSFLSSPSFSLRASKSSHLRTTRRLPVNVRCASSSPAADTSYTTKVSRNANIAKLQAGYLFPEIARRRAAHLLKHPDAKIISLGIGDTTEPIPEVITNAMAERAHALSTVDGYSGYGAEQGEKKLRAAIAATYYADLGIDETDIFVSDGAKCDISRLQVLFGSKVKIAVQDPSYPAYVDSSVIMGQTDLYQQDVQKYGNIEYMRCSPENGFFPDLSKVPRTDIIFFCSPNNPTGAAASRDQLTQLVKFAKDNGSIIVYDSAYAMYISDDSPKSIFEIPGAKEVALETASFSKYAGFTGVRLGWTVVPKELLFSDGHPVAKDFNRIVCTSFNGASTISQAGGLGCLSPEGLKAMQDVVGFYKENTKIIVDTFESLGFNVYGAKNAPYVWVHFPDRNSWDVFAEILEKANVVTTPGSGFGPGGEGFVRVSAFGHRENIIEAARRLKQLYK

SEQ ID NO: 62733 - protein, 349 aa, Triticum aestivum
  peptide (1)..(349): Ceres Seq. ID no. 15221967
  misc_feature (38)..(348): Pfam Name: Aminotransferase class I and II Pfam Description: Aminotransferase class I and II
  misc_feature (1)..(347): Homolog of NCBI NO: 23022290 NR Description: hypothetical protein [Clostridium thermocellum
  misc_feature (1)..(349): Homolog of NCBI NO: 23124300 NR Description: hypothetical protein [Nostoc punctiforme]
  misc_feature (1)..(347): Homolog of NCBI NO: 24213476 NR Description: aminotransferase [Leptospira interrogans serovar
  misc_feature (1)..(348): Homolog of NCBI NO: 18397344 NR Description: aminotransferase family [Arabidopsis thaliana]
  misc_feature (1)..(348): Homolog of NCBI NO: 25315768 NR Description: probable aspartate aminotransferase
  misc_feature (1)..(345): Homolog of NCBI NO: 24414269 NR Description: Putative transaminase [Oryza sativa (japonica
  misc_feature (1)..(345): Homolog of NCBI NO: 37703722 NR Description: putative aminotransferase ALD1
  misc_feature (1)..(349): Homolog of NCBI NO: 7447845 NR Description: probable transaminase (EC 2.6.1.-) T16L1.170
  misc_feature (1)..(349): Homolog of NCBI NO: 18418270 NR Description: aminotransferase family [Arabidopsis thaliana]
  misc_feature (1)..(349): Homolog of NCBI NO: 37703720 NR Description: putative aminotransferase AGD2
MAERAHALSTVDGYSGYGAEQGEKKLRAAIAATYYADLGIDETDIFVSDGAKCDISRLQVLFGSKVKIAVQDPSYPAYVDSSVIMGQTDLYQQDVQKYGNIEYMRCSPENGFFPDLSKVPRTDIIFFCSPNNPTGAAASRDQLTQLVKFAKDNGSIIVYDSAYAMYISDDSPKSIFEIPGAKEVALETASFSKYAGFTGVRLGWTVVPKELLFSDGHPVAKDFNRIVCTSFNGASTISQAGGLGCLSPEGLKAMQDVVGFYKENTKIIVDTFESLGFNVYGAKNAPYVWVHFPDRNSWDVFAEILEKANVVTTPGSGFGPGGEGFVRVSAFGHRENIIEAARRLKQLYK

SEQ ID NO: 62734 - protein, 265 aa, Triticum aestivum
  peptide (1)..(265): Ceres Seq. ID no. 15221968
  misc_feature (1)..(264): Pfam Name: Aminotransferase class I and II Pfam Description: Aminotransferase class I and II
  misc_feature (1)..(263): Homolog of NCBI NO: 23022290 NR Description: hypothetical protein [Clostridium thermocellum
  misc_feature (1)..(265): Homolog of NCBI NO: 23124300 NR Description: hypothetical protein [Nostoc punctiforme]
  misc_feature (1)..(263): Homolog of NCBI NO: 24213476 NR Description: aminotransferase [Leptospira interrogans serovar
  misc_feature (1)..(264): Homolog of NCBI NO: 18397344 NR Description: aminotransferase family [Arabidopsis thaliana]
  misc_feature (1)..(264): Homolog of NCBI NO: 25315768 NR Description: probable aspartate aminotransferase
  misc_feature (1)..(261): Homolog of NCBI NO: 24414269 NR Description: Putative transaminase [Oryza sativa (japonica
  misc_feature (1)..(261): Homolog of NCBI NO: 37703722 NR Description: putative aminotransferase ALD1
  misc_feature (1)..(265): Homolog of NCBI NO: 7447845 NR Description: probable transaminase (EC 2.6.1.-) T16L1.170
  misc_feature (1)..(265): Homolog of NCBI NO: 18418270 NR Description: aminotransferase family [Arabidopsis thaliana]
  misc_feature (1)..(265): Homolog of NCBI NO: 37703720 NR Description: putative aminotransferase AGD2
MGQTDLYQQDVQKYGNIEYMRCSPENGFFPDLSKVPRTDIIFFCSPNNPTGAAASRDQLTQLVKFAKDNGSIIVYDSAYAMYISDDSPKSIFEIPGAKEVALETASFSKYAGFTGVRLGWTVVPKELLFSDGHPVAKDFNRIVCTSFNGASTISQAGGLGCLSPEGLKAMQDVVGFYKENTKIIVDTFESLGFNVYGAKNAPYVWVHFPDRNSWDVFAEILEKANVVTTPGSGFGPGGEGFVRVSAFGHRENIIEAARRLKQLYK

SEQ ID NO: 62735 - DNA, 1263 bp, Triticum aestivum
  misc_feature (1)..(1263): Ceres Seq. ID no. 14313449
ggcagaactcccgcgactatcaggatcggcggctatacaccgtgaactgcgccactagactaggaagaaaatggggtggaagggcgtcctggggttcgactacggcgtcgtgcaggcaccgctcggccccgacatctccggcccggagctcgccgccgccgtcgccaacgctggcgccataggcctcctccgccttcctgactggccggcgccggaccacgtgagggggttgatacagaggaccaggagcctgaccgagaagccgttcggggcggccatcgtgctggccttcccgcacgaggagaatctgagggtcgtgctggaggagaagctcgccgtgctgcaggtgtactggggcgagttccccaaggagcaggtcgacgaggcccatcgtgccggcgtcaaggtcttgcatcaggttggtaaccttgaggaggcagcaaaagctaaggaagctggtgtagatggaattatcgttcaaggccgcgaagcaggggggcatgtgattggtcaagagggtctgctaccgttgctgccgagagtagtggatctagtttcagatagtactgtttcggttatcgccgctggtggaatcgtagatggccgtggctatgctgctgcattggcacttggtgctcatggtgtttgcttaggaactaggtttgtagccaccgaggaaagctttgcgcatccgctgtataagaaaaagctaattgagatgaattgcacggactatacagctgtgttcgggcgtactagatggcctggtgctccacaacgtgtcctgaagacacctttctatgttgagtggaacaatcttccagatcatgaaacagaggaaaatcagcctattataggtcattctatcatccatggtgtgcacaaggatatatgccggtttgctggtactgttcctaatgcgacaacaacaggcgatatcgatagcatggccatgtatgctggccagagtgttgggctaatcaccgagattgtaccagcaagggaagttgtcaagaggctagtcgctgaagcacagcgtgtcattggagaaaagctttctggtttccccaaatcatcagagtagtgctggtgaagtccttggtaattaaactgttaaggtatctaatggtgtacgctgcgtgttatttgtaggcaatagccaatgaaaataaatgggttttccaaggtattccctttttaccacagttttgtacttgtatgtgttgtttgtaagtatatattcaataaaggtaaatgatttcg

SEQ ID NO: 62736 - protein, 337 aa, Triticum aestivum
  peptide (1)..(337): Ceres Seq. ID no. 14313450
  misc_feature (4)..(320): Pfam Name: 2-nitropropane dioxygenase Pfam Description: 2-nitropropane dioxygenase
  misc_feature (22)..(326): Homolog of NCBI NO: 23038509 NR Description: hypothetical protein [Oenococcus oeni MCW]
  misc_feature (1)..(325): Homolog of NCBI NO: 16802856 NR Description: similar to oxidoreductases [Listeria
  misc_feature (6)..(325): Homolog of NCBI NO: 20807921 NR Description: Dioxygenases related to 2-nitropropane
  misc_feature (1)..(325): Homolog of NCBI NO: 16799884 NR Description: similar to oxidoreductases [Listeria innocua]
  misc_feature (233)..(332): Homolog of NCBI NO: 15643563 NR Description: conserved hypothetical protein [Thermotoga
  misc_feature (25)..(243): Homolog of NCBI NO: 15643563 NR Description: conserved hypothetical protein [Thermotoga
  misc_feature (6)..(332): Homolog of NCBI NO: 16127609 NR Description: conserved hypothetical protein [Caulobacter
  misc_feature (22)..(334): Homolog of NCBI NO: 38505809 NR Description: 2-nitropropane dioxygenase [Synechocystis sp. PCC
  misc_feature (48)..(330): Homolog of NCBI NO: 30697978 NR Description: 2-nitropropane dioxygenase-related protein
  misc_feature (4)..(330): Homolog of NCBI NO: 30697982 NR Description: 2-nitropropane dioxygenase-related protein
MGWKGVLGFDYGVVQAPLGPDISGPELAAAVANAGAIGLLRLPDWPAPDHVRGLIQRTRSLTEKPFGAAIVLAFPHEENLRVVLEEKLAVLQVYWGEFPKEQVDEAHRAGVKVLHQVGNLEEAAKAKEAGVDGIIVQGREAGGHVIGQEGLLPLLPRVVDLVSDSTVSVIAAGGIVDGRGYAAALALGAHGVCLGTRFVATEESFAHPLYKKKLIEMNCTDYTAVFGRTRWPGAPQRVLKTPFYVEWNNLPDHETEENQPIIGHSIIHGVHKDICRFAGTVPNATTTGDIDSMAMYAGQSVGLITEIVPAREVVKRLVAEAQRVIGEKLSGFPKSSE

SEQ ID NO: 62737 - DNA, 951 bp, Triticum aestivum
  misc_feature (1)..(951): Ceres Seq. ID no. 13654873
cctcctcctccttgtcaaagctagccagcaagaaccaagaagaagcagagcagctcagaaccgagcgcagagcgaagcggagccaaacgaaagaagggacctaacctaacctagccaagccagccggcgatcgaccgagagatggcgcggtggtgtcagctggcggcggtgctgctcgccgtgtcgatggcggcgtcgacgtcggtggcgcaggacgcgctgcagaccaagtgccagggggacctgcagaagctgtcggactgcatggactacgcgacggggcacgaggaaacgccgtcggccaagtgctgcgaggacacggcggacacgcagaaggcgcggcccgagtgcctctgctccatcatccagcaggtgcacagcggcagccacggcgtgcagcagctcggcctccgcttcgaccgcctcctggcccagcccgcagcctgcaagctcacctacgccaacgtctccctctgcatcaacctgctgcacctgaccccgagctcgccagactacgctctcttcgcaaatgcttccaagattactccgtccactgccgcaccggcgagagacaccgccgacggcttcaaggtttcgccgggactcggttacggcgtcgtggcagcggccgtcgtctctgctgtcttctcatccatcttctgattttcggacaagcacacgcccttttatcctctccctttcttctatctgtcatgtttgtttacataaccctgcaagttcccacacaacgacgatgctttagatggtctattatctactcacgtggtaagaggattcgttcggatgacatactgttgttttaccccagataagaagatggaaagttgagacttgtgtttcttcatgtggaagtgatggtttgcagtaatatcctcaaaaaaaaaaaaaaaaaagcttatcgataccgtcgactgtttaaacacaataaag

SEQ ID NO: 62738 - protein, 173 aa, Triticum aestivum
  peptide (1)..(173): Ceres Seq. ID no. 13654874
  misc_feature (31)..(112): Pfam Name: Protease inhibitor/seed storage/LTP family Pfam Description: Protease inhibitor/seed storage/LTP family
  misc_feature (6)..(173): Homolog of NCBI NO: 18403453 NR Description: protease inhibitor/seed storage/lipid transfer
  misc_feature (19)..(148): Homolog of NCBI NO: 21537387 NR Description: unknown [Arabidopsis thaliana]
  misc_feature (19)..(148): Homolog of NCBI NO: 18405294 NR Description: protease inhibitor/seed storage/lipid transfer
  misc_feature (9)..(157): Homolog of NCBI NO: 28269454 NR Description: putative protease inhibitor
  misc_feature (8)..(158): Homolog of NCBI NO: 15224862 NR Description: lipid transfer protein family [Arabidopsis
  misc_feature (7)..(156): Homolog of NCBI NO: 15224863 NR Description: lipid transfer protein - related [Arabidopsis
  misc_feature (1)..(173): Homolog of NCBI NO: 25553595 NR Description: OJ1656_E11.26 [Oryza sativa (japonica
  misc_feature (4)..(168): Homolog of NCBI NO: 25553602 NR Description: OJ1656_E11.34 [Oryza sativa (japonica
  misc_feature (7)..(172): Homolog of NCBI NO: 15217777 NR Description: lipid transfer protein - related [Arabidopsis
  misc_feature (7)..(172): Homolog of NCBI NO: 21553541 NR Description: lipid transfer protein, putative [Arabidopsis
MARWCQLAAVLLAVSMAASTSVAQDALQTKCQGDLQKLSDCMDYATGHEETPSAKCCEDTADTQKARPECLCSIIQQVHSGSHGVQQLGLRFDRLLAQPAACKLTYANVSLCINLLHLTPSSPDYALFANASKITPSTAAPARDTADGFKVSPGLGYGVVAAAVVSAVFSSIF

SEQ ID NO: 62739 - protein, 158 aa, Triticum aestivum
  peptide (1)..(158): Ceres Seq. ID no. 13654875
  misc_feature (16)..(97): Pfam Name: Protease inhibitor/seed storage/LTP family Pfam Description: Protease inhibitor/seed storage/LTP family
  misc_feature (1)..(158): Homolog of NCBI NO: 18403453 NR Description: protease inhibitor/seed storage/lipid transfer
  misc_feature (4)..(133): Homolog of NCBI NO: 21537387 NR Description: unknown [Arabidopsis thaliana]
  misc_feature (4)..(133): Homolog of NCBI NO: 18405294 NR Description: protease inhibitor/seed storage/lipid transfer
  misc_feature (1)..(142): Homolog of NCBI NO: 28269454 NR Description: putative protease inhibitor
  misc_feature (1)..(143): Homolog of NCBI NO: 15224862 NR Description: lipid transfer protein family [Arabidopsis
  misc_feature (1)..(141): Homolog of NCBI NO: 15224863 NR Description: lipid transfer protein - related [Arabidopsis
  misc_feature (1)..(158): Homolog of NCBI NO: 25553595 NR Description: OJ1656_E11.26 [Oryza sativa (japonica
  misc_feature (1)..(153): Homolog of NCBI NO: 25553602 NR Description: OJ1656_E11.34 [Oryza sativa (japonica
  misc_feature (1)..(157): Homolog of NCBI NO: 15217777 NR Description: lipid transfer protein - related [Arabidopsis
  misc_feature (1)..(157): Homolog of NCBI NO: 21553541 NR Description: lipid transfer protein, putative [Arabidopsis
MAASTSVAQDALQTKCQGDLQKLSDCMDYATGHEETPSAKCCEDTADTQKARPECLCSIIQQVHSGSHGVQQLGLRFDRLLAQPAACKLTYANVSLCINLLHLTPSSPDYALFANASKITPSTAAPARDTADGFKVSPGLGYGVVAAAVVSAVFSSIF

SEQ ID NO: 62740 - protein, 132 aa, Triticum aestivum
  peptide (1)..(132): Ceres Seq. ID no. 13654876
  misc_feature (1)..(71): Pfam Name: Protease inhibitor/seed storage/LTP family Pfam Description: Protease inhibitor/seed storage/LTP family
  misc_feature (1)..(132): Homolog of NCBI NO: 18403453 NR Description: protease inhibitor/seed storage/lipid transfer
  misc_feature (1)..(107): Homolog of NCBI NO: 21537387 NR Description: unknown [Arabidopsis thaliana]
  misc_feature (1)..(107): Homolog of NCBI NO: 18405294 NR Description: protease inhibitor/seed storage/lipid transfer
  misc_feature (1)..(116): Homolog of NCBI NO: 28269454 NR Description: putative protease inhibitor
  misc_feature (1)..(117): Homolog of NCBI NO: 15224862 NR Description: lipid transfer protein family [Arabidopsis
  misc_feature (1)..(115): Homolog of NCBI NO: 15224863 NR Description: lipid transfer protein - related [Arabidopsis
  misc_feature (1)..(132): Homolog of NCBI NO: 25553595 NR Description: OJ1656_E11.26 [Oryza sativa (japonica
  misc_feature (1)..(127): Homolog of NCBI NO: 25553602 NR Description: OJ1656_E11.34 [Oryza sativa (japonica
  misc_feature (1)..(131): Homolog of NCBI NO: 15217777 NR Description: lipid transfer protein - related [Arabidopsis
  misc_feature (1)..(131): Homolog of NCBI NO: 21553541 NR Description: lipid transfer protein, putative [Arabidopsis
MDYATGHEETPSAKCCEDTADTQKARPECLCSIIQQVHSGSHGVQQLGLRFDRLLAQPAACKLTYANVSLCINLLHLTPSSPDYALFANASKITPSTAAPARDTADGFKVSPGLGYGVVAAAVVSAVFSSIF

SEQ ID NO: 62741 - DNA, 1330 bp, Triticum aestivum
  misc_feature (1)..(1330): Ceres Seq. ID no. 15226378
attaaaactcggacaggtctccggcggtacgtgacgccaacctcgcgggaagcgccggcgtctgcgcgcgtgcgatcatgatgatgaggcgccagttatcggtctgcgtcctcctcctgctcgtgctcgcggggcagcagcaggcggcggccaagaagtacgccgccatcttcaacttcggggactccctcgtggacgccggcaacctcgtcgtggacggcatccccgagtacctcgccacggcgaagctgccgtatggcatgacctacttcgggtaccccaccggccgctgctccgacggccgcctcgtcgtcgacttcatcgcgcaggagctggggctgccgctgctgccgccgtcgaaggcgcgcaacgccacgttccaccacggcgccaacttcgccatcaccggggccacggcgctggacaccagctacttcgtggcgaaggggctgggcaagacggtgtggaactccggctccctgcacacccagatcaagtggctgcaggagatgaagcccaaaatctgcagctcccccgaagagtgcaggggcctgttccggcggtcgctgttcatcgtgggcgagttcggcggcaacgactacaactcgccgctcttcgcgttccgcccgctggaggaggtgcacgagttcgtgggggacgtcgtcaactccatcggcgagggaatcgagaagctgattgcggagggggccgtggacctggtggtgcccggggtgctcccgatcggctgcttcccggtgtacctgtccatcttccggaagcagccggagatgtacggcggcaagagcgggtgcatcaaggacctcaacacgctgtcgtgggtgcacaacgtggcgctgcagcgcaagatcgtggagctccggaagaagcactccgacgtgcgcatcatgtacgccgactactacacgcccaccatccagttcgtcctccacgccgagaaatgggggatgctgaggcagaagccgagggcgtgctgcggggcgccgggcgtcggggtgtacaacttcaacctgacgtccaagtgcggcgagcccggcgcgtacgcgtgcgacgacccgtccaaccactggagctgggacggcatccacctcacggaggcctcctacggccacatcgccaggggctggctctacggccccttcgccgacccgcccatcgtcggcaaccggaacctcgagtagcactgtagcagcagtagtacagggcttgtttttgcgtacatgcacatgggttactgtatgtagagaaaggaaaagaaatcaaagaacagacatgtcttgtgcagattaattaattattaattaattggttc

SEQ ID NO: 62742 - protein, 373 aa, Triticum aestivum
  peptide (1)..(373): Ceres Seq. ID no. 15226379
  misc_feature (31)..(356): Pfam Name: GDSL-like Lipase/Acylhydrolase Pfam Description: GDSL-like Lipase/Acylhydrolase
  misc_feature (11)..(369): Homolog of NCBI NO: 34903970 NR Description: OSJNBa0038J17.30 [Oryza sativa (japonica
  misc_feature (27)..(364): Homolog of NCBI NO: 21553708 NR Description: GDSL-motif lipase/hydrolase-like protein
  misc_feature (27)..(364): Homolog of NCBI NO: 15242538 NR Description: GDSL-motif lipase/hydrolase protein [Arabidopsis
  misc_feature (28)..(357): Homolog of NCBI NO: 34903962 NR Description: OSJNBa0038J17.26 [Oryza sativa (japonica
  misc_feature (11)..(367): Homolog of NCBI NO: 34903986 NR Description: unnamed protein product [Oryza sativa (japonica
  misc_feature (1)..(367): Homolog of NCBI NO: 34903978 NR Description: unnamed protein product [Oryza sativa (japonica
  misc_feature (3)..(367): Homolog of NCBI NO: 34903996 NR Description: unnamed protein product [Oryza sativa (japonica
  misc_feature (6)..(367): Homolog of NCBI NO: 34903994 NR Description: unnamed protein product [Oryza sativa (japonica
  misc_feature (9)..(367): Homolog of NCBI NO: 34903956 NR Description: OSJNBa0038J17.23 [Oryza sativa (japonica
  misc_feature (3)..(371): Homolog of NCBI NO: 34903958 NR Description: OSJNBa0038J17.24 [Oryza sativa (japonica
MMMRRQLSVCVLLLLVLAGQQQAAAKKYAAIFNFGDSLVDAGNLVVDGIPEYLATAKLPYGMTYFGYPTGRCSDGRLVVDFIAQELGLPLLPPSKARNATFHHGANFAITGATALDTSYFVAKGLGKTVWNSGSLHTQIKWLQEMKPKICSSPEECRGLFRRSLFIVGEFGGNDYNSPLFAFRPLEEVHEFVGDVVNSIGEGIEKLIAEGAVDLVVPGVLPIGCFPVYLSIFRKQPEMYGGKSGCIKDLNTLSWVHNVALQRKIVELRKKHSDVRIMYADYYTPTIQFVLHAEKWGMLRQKPRACCGAPGVGVYNFNLTSKCGEPGAYACDDPSNHWSWDGIHLTEASYGHIARGWLYGPFADPPIVGNRNLE

SEQ ID NO: 62743 - protein, 372 aa, Triticum aestivum
  peptide (1)..(372): Ceres Seq. ID no. 15226380
  misc_feature (30)..(355): Pfam Name: GDSL-like Lipase/Acylhydrolase Pfam Description: GDSL-like Lipase/Acylhydrolase
  misc_feature (10)..(368): Homolog of NCBI NO: 34903970 NR Description: OSJNBa0038J17.30 [Oryza sativa (japonica
  misc_feature (26)..(363): Homolog of NCBI NO: 21553708 NR Description: GDSL-motif lipase/hydrolase-like protein
  misc_feature (26)..(363): Homolog of NCBI NO: 15242538 NR Description: GDSL-motif lipase/hydrolase protein [Arabidopsis
  misc_feature (27)..(356): Homolog of NCBI NO: 34903962 NR Description: OSJNBa0038J17.26 [Oryza sativa (japonica
  misc_feature (10)..(366): Homolog of NCBI NO: 34903986 NR Description: unnamed protein product [Oryza sativa (japonica
  misc_feature (1)..(366): Homolog of NCBI NO: 34903978 NR Description: unnamed protein product [Oryza sativa (japonica
  misc_feature (2)..(366): Homolog of NCBI NO: 34903996 NR Description: unnamed protein product [Oryza sativa (japonica
  misc_feature (5)..(366): Homolog of NCBI NO: 34903994 NR Description: unnamed protein product [Oryza sativa (japonica
  misc_feature (8)..(366): Homolog of NCBI NO: 34903956 NR Description: OSJNBa0038J17.23 [Oryza sativa (japonica
  misc_feature (2)..(370): Homolog of NCBI NO: 34903958 NR Description: OSJNBa0038J17.24 [Oryza sativa (japonica
MMRRQLSVCVLLLLVLAGQQQAAAKKYAAIFNFGDSLVDAGNLVVDGIPEYLATAKLPYGMTYFGYPTGRCSDGRLVVDFIAQELGLPLLPPSKARNATFHHGANFAITGATALDTSYFVAKGLGKTVWNSGSLHTQIKWLQEMKPKICSSPEECRGLFRRSLFIVGEFGGNDYNSPLFAFRPLEEVHEFVGDVVNSIGEGIEKLIAEGAVDLVVPGVLPIGCFPVYLSIFRKQPEMYGGKSGCIKDLNTLSWVHNVALQRKIVELRKKHSDVRIMYADYYTPTIQFVLHAEKWGMLRQKPRACCGAPGVGVYNFNLTSKCGEPGAYACDDPSNHWSWDGIHLTEASYGHIARGWLYGPFADPPIVGNRNLE

SEQ ID NO: 62744 - protein, 371 aa, Triticum aestivum
  peptide (1)..(371): Ceres Seq. ID no. 15226381
  misc_feature (29)..(354): Pfam Name: GDSL-like Lipase/Acylhydrolase Pfam Description: GDSL-like Lipase/Acylhydrolase
  misc_feature (9)..(367): Homolog of NCBI NO: 34903970 NR Description: OSJNBa0038J17.30 [Oryza sativa (japonica
  misc_feature (25)..(362): Homolog of NCBI NO: 21553708 NR Description: GDSL-motif lipase/hydrolase-like protein
  misc_feature (25)..(362): Homolog of NCBI NO: 15242538 NR Description: GDSL-motif lipase/hydrolase protein [Arabidopsis
  misc_feature (26)..(355): Homolog of NCBI NO: 34903962 NR Description: OSJNBa0038J17.26 [Oryza sativa (japonica
  misc_feature (9)..(365): Homolog of NCBI NO: 34903986 NR Description: unnamed protein product [Oryza sativa (japonica
  misc_feature (1)..(365): Homolog of NCBI NO: 34903978 NR Description: unnamed protein product [Oryza sativa (japonica
  misc_feature (1)..(365): Homolog of NCBI NO: 34903996 NR Description: unnamed protein product [Oryza sativa (japonica
  misc_feature (4)..(365): Homolog of NCBI NO: 34903994 NR Description: unnamed protein product [Oryza sativa (japonica
  misc_feature (7)..(365): Homolog of NCBI NO: 34903956 NR Description: OSJNBa0038J17.23 [Oryza sativa (japonica
  misc_feature (1)..(369): Homolog of NCBI NO: 34903958 NR Description: OSJNBa0038J17.24 [Oryza sativa (japonica
MRRQLSVCVLLLLVLAGQQQAAAKKYAAIFNFGDSLVDAGNLVVDGIPEYLATAKLPYGMTYFGYPTGRCSDGRLVVDFIAQELGLPLLPPSKARNATFHHGANFAITGATALDTSYFVAKGLGKTVWNSGSLHTQIKWLQEMKPKICSSPEECRGLFRRSLFIVGEFGGNDYNSPLFAFRPLEEVHEFVGDVVNSIGEGIEKLIAEGAVDLVVPGVLPIGCFPVYLSIFRKQPEMYGGKSGCIKDLNTLSWVHNVALQRKIVELRKKHSDVRIMYADYYTPTIQFVLHAEKWGMLRQKPRACCGAPGVGVYNFNLTSKCGEPGAYACDDPSNHWSWDGIHLTEASYGHIARGWLYGPFADPPIVGNRNLE

SEQ ID NO: 62745 - DNA, 1276 bp, Triticum aestivum
  misc_feature (1)..(1276): Ceres Seq. ID no. 13655193
ttttttctactgctctcgccgctggaacctgacggaaaaaccctacctcgccgtcgccccatcgtcgaacttcccgatggcgtcgaggtgcgcggcgaggcttccgcacccgccgtgcgcggcgccgcagcacggttgggcgagctcgcgggtctcggcacgcccggcgcaatccggcgcgtcaagagggcgtgccgtcgcgtgcgccgtcagcttcaggccatgtatcgacattcacaaggggaaagttaaacagattgttggctctactctccgggatgcatcggatgatggcactgcactggtgacgaactttgaatcagacaagtctccagcagaatttgcaaatatttataaagaagatggacttgttggtggacatgtaataatgcttggcggagaccctgcaagccgttctgctgccctggaagcactgcatgcatatcctggtggtttgcaagttggaggtggaataaatttggagaatgcaatgtcataccttaatgaaggagcaagtcacgtgattgtaacttcttatgtgtttagtgatggcaaaatgaacattgaaaggctaacgcaacttgtcgagcttgttgggaaacaaaggcttattttggacctgagttgtcggaaaaaggatggcagatatgccattgtgactgacagatggcagaagttcagtgatgtctttgtggatgggccaacattagaacgtcttgctgcatatgcagatgagtttttggttcatggagttgatgtggagggcaaaaggttaggaattgacgaggaacttgtggaactattgggaagccattcacctatcccgacaacatatgctgggggtgtgtcaacgatggacgacctggagaggatcaagaaagcagggaaaggtcgagtcgatgtcactgtcgggagtgccctagacatattcgggggagatttgccctacgatactgttgtccgttggcacaaggagcaaaacctggttagccaacggtgaagaaatcagatgatctttttatagagcaaatgatcgaagttcagctcatgtgtgatccccacctgaccatggtcaggtcaggttatagagctttattgtttgctggacattgtagtgtgaaccgcgtagtgtgaatgtgtcttgtgtgacatgtcaaagctgaagcggaggtgtcaactcagtgtcgtagaggaccacccggtattcagatactgttcttcacattctgtttgtattgtagtactggtaatggtgaataaacaggggttgaactgc

SEQ ID NO: 62746 - protein, 332 aa, Triticum aestivum
  peptide (1)..(332): Ceres Seq. ID no. 13655194
  misc_feature (74)..(323): Pfam Name: Histidine biosynthesis protein Pfam Description: Histidine biosynthesis protein
  misc_feature (74)..(307): Homolog of NCBI NO: 2498448 NR Description: 1-(5-phosphoribosyl)-5-
  misc_feature (110)..(307): Homolog of NCBI NO: 15669727 NR Description: phosphoribosylformimino-5-aminoimidazole
  misc_feature (74)..(314): Homolog of NCBI NO: 20093802 NR Description: Phosphoribosylformimino-5-aminoimidazole
  misc_feature (72)..(237): Homolog of NCBI NO: 40745248 NR Description: hypothetical protein AN2293.2 [Aspergillus
  misc_feature (72)..(326): Homolog of NCBI NO: 6322169 NR Description:
  misc_feature (72)..(324): Homolog of NCBI NO: 10444341 NR Description: 5-proFAR isomerase [Candida albicans]
  misc_feature (72)..(326): Homolog of NCBI NO: 38105940 NR Description: hypothetical protein MG04998.4 [Magnaporthe
  misc_feature (72)..(326): Homolog of NCBI NO: 32403246 NR Description: hypothetical protein [Neurospora crassa]
  misc_feature (72)..(324): Homolog of NCBI NO: 19114853 NR Description: probable phosphoribosylformimino-5-aminoimidazole
  misc_feature (58)..(327): Homolog of NCBI NO: 15227607 NR Description: phosphoribosylformimino-5-aminoimidazole
FFYCSRRWNLTEKPYLAVAPSSNFPMASRCAARLPHPPCAAPQHGWASSRVSARPAQSGASRGRAVACAVSFRPCIDIHKGKVKQIVGSTLRDASDDGTALVTNFESDKSPAEFANIYKEDGLVGGHVIMLGGDPASRSAALEALHAYPGGLQVGGGINLENAMSYLNEGASHVIVTSYVFSDGKMNIERLTQLVELVGKQRLILDLSCRKKDGRYAIVTDRWQKFSDVFVDGPTLERLAAYADEFLVHGVDVEGKRLGIDEELVELLGSHSPIPTTYAGGVSTMDDLERIKKAGKGRVDVTVGSALDIFGGDLPYDTVVRWHKEQNLVSQR

SEQ ID NO: 62747 - protein, 307 aa, Triticum aestivum
  peptide (1)..(307): Ceres Seq. ID no. 13655195
  misc_feature (49)..(298): Pfam Name: Histidine biosynthesis protein Pfam Description: Histidine biosynthesis protein
  misc_feature (49)..(282): Homolog of NCBI NO: 2498448 NR Description: 1-(5-phosphoribosyl)-5-
  misc_feature (85)..(282): Homolog of NCBI NO: 15669727 NR Description: phosphoribosylformimino-5-aminoimidazole
  misc_feature (49)..(289): Homolog of NCBI NO: 20093802 NR Description: Phosphoribosylformimino-5-aminoimidazole
  misc_feature (47)..(212): Homolog of NCBI NO: 40745248 NR Description: hypothetical protein AN2293.2 [Aspergillus
  misc_feature (47)..(301): Homolog of NCBI NO: 6322169 NR Description:
  misc_feature (47)..(299): Homolog of NCBI NO: 10444341 NR Description: 5-proFAR isomerase [Candida albicans]
  misc_feature (47)..(301): Homolog of NCBI NO: 38105940 NR Description: hypothetical protein MG04998.4 [Magnaporthe
  misc_feature (47)..(301): Homolog of NCBI NO: 32403246 NR Description: hypothetical protein [Neurospora crassa]
  misc_feature (47)..(299): Homolog of NCBI NO: 19114853 NR Description: probable phosphoribosylformimino-5-aminoimidazole
  misc_feature (33)..(302): Homolog of NCBI NO: 15227607 NR Description: phosphoribosylformimino-5-aminoimidazole
MASRCAARLPHPPCAAPQHGWASSRVSARPAQSGASRGRAVACAVSFRPCIDIHKGKVKQIVGSTLRDASDDGTALVTNFESDKSPAEFANIYKEDGLVGGHVIMLGGDPASRSAALEALHAYPGGLQVGGGINLENAMSYLNEGASHVIVTSYVFSDGKMNIERLTQLVELVGKQRLILDLSCRKKDGRYAIVTDRWQKFSDVFVDGPTLERLAAYADEFLVHGVDVEGKRLGIDEELVELLGSHSPIPTTYAGGVSTMDDLERIKKAGKGRVDVTVGSALDIFGGDLPYDTVVRWHKEQNLVSQR

SEQ ID NO: 62748 - protein, 203 aa, Triticum aestivum
  peptide (1)..(203): Ceres Seq. ID no. 13655196
  misc_feature (1)..(194): Pfam Name: Histidine biosynthesis protein Pfam Description: Histidine biosynthesis protein
  misc_feature (1)..(178): Homolog of NCBI NO: 2498448 NR Description: 1-(5-phosphoribosyl)-5-
  misc_feature (1)..(178): Homolog of NCBI NO: 15669727 NR Description: phosphoribosylformimino-5-aminoimidazole
  misc_feature (1)..(185): Homolog of NCBI NO: 20093802 NR Description: Phosphoribosylformimino-5-aminoimidazole
  misc_feature (1)..(108): Homolog of NCBI NO: 40745248 NR Description: hypothetical protein AN2293.2 [Aspergillus
  misc_feature (1)..(197): Homolog of NCBI NO: 6322169 NR Description:
  misc_feature (1)..(195): Homolog of NCBI NO: 10444341 NR Description: 5-proFAR isomerase [Candida albicans]
  misc_feature (1)..(197): Homolog of NCBI NO: 38105940 NR Description: hypothetical protein MG04998.4 [Magnaporthe
  misc_feature (1)..(197): Homolog of NCBI NO: 32403246 NR Description: hypothetical protein [Neurospora crassa]
  misc_feature (1)..(195): Homolog of NCBI NO: 19114853 NR Description: probable phosphoribosylformimino-5-aminoimidazole
  misc_feature (1)..(198): Homolog of NCBI NO: 15227607 NR Description: phosphoribosylformimino-5-aminoimidazole
MLGGDPASRSAALEALHAYPGGLQVGGGINLENAMSYLNEGASHVIVTSYVFSDGKMNIERLTQLVELVGKQRLILDLSCRKKDGRYAIVTDRWQKFSDVFVDGPTLERLAAYADEFLVHGVDVEGKRLGIDEELVELLGSHSPIPTTYAGGVSTMDDLERIKKAGKGRVDVTVGSALDIFGGDLPYDTVVRWHKEQNLVSQR

SEQ ID NO: 62749 - DNA, 1647 bp, Triticum aestivum
  misc_feature (1)..(1647): Ceres Seq. ID no. 13598741
agaacatcctaatcgaaaaacaagcagagtctcttggctgcacccgtcaccggtgcccccttcttcgtcagcctgcaatctccactcacctcactcccactccccctcccaccccccactcttctacacatcgaggacgaaagggtggtgagggagccgggggcctgagggggctagctgctaggcggaggaggggatggagcgagggctcgcattgctgggtctggggctggcgcttcttctgctggcgccctctcgtcgtctcgcctcggccgctccggtggaggacggcctgctcatgaatggtgatttcgagacagcaccacctggcggtttcgtcaaatcggcttcagtttccgagggcgcggcgatcccaagctggacgatcaatggaacagttgagctcatttccgcaggccagcaccagggtggcatgatccttattgttccacaaggggatcatgctgtgcggctagggaatgatgcaggcattgggcaggtggtggaggttgagaagggctcagagtacgcgatcacattcagtgccgcccggacctgcgcgcagctggagtcactgaacatctccgccgggagcgtatcacagacagtcgacttgcagacactttacagcatagaaggctgggatgcatatgccctggctttccaagcagtggatgagcaggcgagcattgagtttaggaaccctggcatggaggacgacccgacctgcgggcctatccttgacaacgtggccatcaagaagctcttctcccccgacaaagcaaaggagaacatggtgatcaatggagactttgaggaggggccatggatgtttccaaacacaagcttcggtgtcctgctcccgacgaaccttgacgagcagacatcggccttgccagggtggatgatcgagtcgaaccgcgcagtccgcttcgtcgactccgaccagtacaccgtgccccaggggaagcgcgccatcgagcttctctccggcaaggagggcatcatctcgcagatggtggagacgacccctcagaaggcgtacaccctgacgttcacgctgggctcggcaggcgactcgtgccagccgccaatggctgtcatggcattcgccggcgaccaggcccagaacttccactactcccccatgggcaacgccacgagccaggccgtgaacgtgaacttcacggcgcgcgccgagaggacacgcgttgcgctctacagcgtctactacaacacgagaagcgacgaccacagctcgctctgcgggccggtgatagacgacgtccgtgtctggggcttgaatggggctgctgggttgaaggcaagtattgcgctgcttattgccatggctagtgtcatcgttctcgtgctgttctgatctcctgaatatacgtatgtaacctcccctgcaagggcgaggaggccactagttttgttagtaagcttgaggtttctatgagattgatgagtaatgtgagcttaggctaaagctaccagtagctataaatggttgttttgttgctttcttgtgtgattcagaaagtagcaaaccatgatgggattgagtggtcactgagccaagggcttgcaatgtgagatgtaagaattgttacaagttcatctcttcaatgcattagaaagtcc

SEQ ID NO: 62750 - protein, 394 aa, Triticum aestivum
  peptide (1)..(394): Ceres Seq. ID no. 13598742
  misc_feature (48)..(370): Pfam Name: Protein of unknown function, DUF642 Pfam Description: Protein of unknown function, DUF642
  misc_feature (9)..(366): Homolog of NCBI NO: 15239049 NR Description: expressed protein [Arabidopsis thaliana]
  misc_feature (9)..(366): Homolog of NCBI NO: 23397043 NR Description: unknown protein [Arabidopsis thaliana]
  misc_feature (12)..(366): Homolog of NCBI NO: 15220093 NR Description: expressed protein [Arabidopsis thaliana]
  misc_feature (10)..(366): Homolog of NCBI NO: 18418018 NR Description: expressed protein [Arabidopsis thaliana]
  misc_feature (9)..(366): Homolog of NCBI NO: 7488898 NR Description: hypothetical protein - castor bean
  misc_feature (5)..(392): Homolog of NCBI NO: 18397308 NR Description: expressed protein [Arabidopsis thaliana]
  misc_feature (5)..(390): Homolog of NCBI NO: 15226760 NR Description: expressed protein [Arabidopsis thaliana]
  misc_feature (3)..(86): Homolog of NCBI NO: 34913458 NR Description: P0702H08.18 [Oryza sativa (japonica
  misc_feature (147)..(394): Homolog of NCBI NO: 34913458 NR Description: P0702H08.18 [Oryza sativa (japonica
  misc_feature (3)..(394): Homolog of NCBI NO: 34909656 NR Description: OJ1414_E05.5 [Oryza sativa (japonica
MERGLALLGLGLALLLLAPSRRLASAAPVEDGLLMNGDFETAPPGGFVKSASVSEGAAIPSWTINGTVELISAGQHQGGMILIVPQGDHAVRLGNDAGIGQVVEVEKGSEYAITFSAARTCAQLESLNISAGSVSQTVDLQTLYSIEGWDAYALAFQAVDEQASIEFRNPGMEDDPTCGPILDNVAIKKLFSPDKAKENMVINGDFEEGPWMFPNTSFGVLLPTNLDEQTSALPGWMIESNRAVRFVDSDQYTVPQGKRAIELLSGKEGIISQMVETTPQKAYTLTFTLGSAGDSCQPPMAVMAFAGDQAQNFHYSPMGNATSQAVNVNFTARAERTRVALYSVYYNTRSDDHSSLCGPVIDDVRVWGLNGAAGLKASIALLIAMASVIVLVLF

SEQ ID NO: 62751 - protein, 360 aa, Triticum aestivum
  peptide (1)..(360): Ceres Seq. ID no. 13598743
  misc_feature (14)..(336): Pfam Name: Protein of unknown function, DUF642 Pfam Description: Protein of unknown function, DUF642
  misc_feature (1)..(332): Homolog of NCBI NO: 15239049 NR Description: expressed protein [Arabidopsis thaliana]
  misc_feature (1)..(332): Homolog of NCBI NO: 23397043 NR Description: unknown protein [Arabidopsis thaliana]
  misc_feature (1)..(332): Homolog of NCBI NO: 15220093 NR Description: expressed protein [Arabidopsis thaliana]
  misc_feature (1)..(332): Homolog of NCBI NO: 18418018 NR Description: expressed protein [Arabidopsis thaliana]
  misc_feature (1)..(332): Homolog of NCBI NO: 7488898 NR Description: hypothetical protein - castor bean
  misc_feature (1)..(358): Homolog of NCBI NO: 18397308 NR Description: expressed protein [Arabidopsis thaliana]
  misc_feature (1)..(356): Homolog of NCBI NO: 15226760 NR Description: expressed protein [Arabidopsis thaliana]
  misc_feature (1)..(52): Homolog of NCBI NO: 34913458 NR Description: P0702H08.18 [Oryza sativa (japonica
  misc_feature (113)..(360): Homolog of NCBI NO: 34913458 NR Description: P0702H08.18 [Oryza sativa (japonica
  misc_feature (1)..(360): Homolog of NCBI NO: 34909656 NR Description: OJ1414_E05.5 [Oryza sativa (japonica
MNGDFETAPPGGFVKSASVSEGAAIPSWTINGTVELISAGQHQGGMILIVPQGDHAVRLGNDAGIGQVVEVEKGSEYAITFSAARTCAQLESLNISAGSVSQTVDLQTLYSIEGWDAYALAFQAVDEQASIEFRNPGMEDDPTCGPILDNVAIKKLFSPDKAKENMVINGDFEEGPWMFPNTSFGVLLPTNLDEQTSALPGWMIESNRAVRFVDSDQYTVPQGKRAIELLSGKEGIISQMVETTPQKAYTLTFTLGSAGDSCQPPMAVMAFAGDQAQNFHYSPMGNATSQAVNVNFTARAERTRVALYSVYYNTRSDDHSSLCGPVIDDVRVWGLNGAAGLKASIALLIAMASVIVLVLF

SEQ ID NO: 62752 - protein, 315 aa, Triticum aestivum
  peptide (1)..(315): Ceres Seq. ID no. 13598744
  misc_feature (1)..(291): Pfam Name: Protein of unknown function, DUF642 Pfam Description: Protein of unknown function, DUF642
  misc_feature (1)..(287): Homolog of NCBI NO: 21554402 NR Description: unknown [Arabidopsis thaliana]
  misc_feature (1)..(287): Homolog of NCBI NO: 15239049 NR Description: expressed protein [Arabidopsis thaliana]
  misc_feature (1)..(287): Homolog of NCBI NO: 23397043 NR Description: unknown protein [Arabidopsis thaliana]
  misc_feature (1)..(287): Homolog of NCBI NO: 15220093 NR Description: expressed protein [Arabidopsis thaliana]
  misc_feature (1)..(287): Homolog of NCBI NO: 18418018 NR Description: expressed protein [Arabidopsis thaliana]
  misc_feature (1)..(287): Homolog of NCBI NO: 7488898 NR Description: hypothetical protein - castor bean
  misc_feature (1)..(313): Homolog of NCBI NO: 18397308 NR Description: expressed protein [Arabidopsis thaliana]
  misc_feature (1)..(311): Homolog of NCBI NO: 15226760 NR Description: expressed protein [Arabidopsis thaliana]
  misc_feature (68)..(315): Homolog of NCBI NO: 34913458 NR Description: P0702H08.18 [Oryza sativa (japonica
  misc_feature (1)..(315): Homolog of NCBI NO: 34909656 NR Description: OJ1414_E05.5 [Oryza sativa (japonica
MILIVPQGDHAVRLGNDAGIGQVVEVEKGSEYAITFSAARTCAQLESLNISAGSVSQTVDLQTLYSIEGWDAYALAFQAVDEQASIEFRNPGMEDDPTCGPILDNVAIKKLFSPDKAKENMVINGDFEEGPWMFPNTSFGVLLPTNLDEQTSALPGWMIESNRAVRFVDSDQYTVPQGKRAIELLSGKEGIISQMVETTPQKAYTLTFTLGSAGDSCQPPMAVMAFAGDQAQNFHYSPMGNATSQAVNVNFTARAERTRVALYSVYYNTRSDDHSSLCGPVIDDVRVWGLNGAAGLKASIALLIAMASVIVLVLF

SEQ ID NO: 62753 - DNA, 1055 bp, Triticum aestivum
  misc_feature (1)..(1055): Ceres Seq. ID no. 12627566
cccgactccgccgagctcatttccctcaccccctctctatcttcgtcgccgccgccggcgccgccgggacgccgtaccccgcctccctggacccgatagctcctcgcgtccacttcgttcgacgaggaaattctttgggtgactgcaggagatggcggcgttcctgaggtcaaagtgctcgtcagttgggcgtacgttgatgggaagcgttggaaacaatctgtatgggggtatcaattcgtctgctgaaacagtgacaagaccatctcactgtgacgctatcagccagcaaatcaggacattcatccagatgagaaccaacctcaaggtggtagacaactctggagccaagagggtcatgtgcatacagtccttgagggggaagaaaggagctaggcttggggacatgataattggttctgtgaaggaagcgcaacctcgtggcaaggtcaagaaaggtgatgtggtctacggtgtggttgtccgtgccgctatgaagaaaggacgcagtgacggcagcgaggtccagtttgatgacaacgctatcgtcatcgtgaacaacaaaggcgagctgattggcactcgcgtcttcggtcctgttcctcatgagctcaggaagaagaagcatctcaagatcttggcgttggctgaacacatagtttgagaccttaccctgcttagtcatatctcttttatttccacatggagcggaattaacattgctccagagatattttggttgcccctgctgccattccacctttcctttggtaatttgtgtttggaagaatgatgtaccctaaaaggagaatgtgtaccaaactatagggagccctcggcagatcaagttttgtagcacatttaatctgaatgttttgctgcaacggcgaaaatatgttccttatttgctctgttttacctggatcatcacgcgctgcctgtaattttctgcttattgatttagtacatttacagagtgtcctatcattacattcctggaacatgaggaggacagacttccattttcacaacatataacatttgctccctgcttc

SEQ ID NO: 62754 - protein, 170 aa, Triticum aestivum
  peptide (1)..(170): Ceres Seq. ID no. 12627567
  misc_feature (52)..(170): Pfam Name: Ribosomal protein L14p/L23e Pfam Description: Ribosomal protein L14p/L23e
  misc_feature (52)..(170): Homolog of NCBI NO: 15965119 NR Description: PROBABLE 50S RIBOSOMAL PROTEIN L14 [Sinorhizobium
  misc_feature (52)..(170): Homolog of NCBI NO: 15889233 NR Description: AGR_C_3539p [Agrobacterium tumefaciens]
  misc_feature (1)..(138): Homolog of NCBI NO: 18140858 NR Description: HUELLENLOS [Arabidopsis thaliana]
  misc_feature (1)..(138): Homolog of NCBI NO: 15220161 NR Description: ribosomal protein, putative
  misc_feature (1)..(138): Homolog of NCBI NO: 8778471 NR Description: F1L3.27 [Arabidopsis thaliana]
  misc_feature (54)..(169): Homolog of NCBI NO: 9757736 NR Description: 50S ribosomal protein L14 [Arabidopsis thaliana]
  misc_feature (1)..(169): Homolog of NCBI NO: 30694900 NR Description: ribosomal protein L14p family [Arabidopsis
  misc_feature (1)..(169): Homolog of NCBI NO: 20260394 NR Description: unknown protein [Arabidopsis thaliana]
  misc_feature (1)..(169): Homolog of NCBI NO: 30694896 NR Description: ribosomal protein L14p family [Arabidopsis
  misc_feature (1)..(170): Homolog of NCBI NO: 18140856 NR Description: HUELLENLOS-like protein [Oryza sativa]
MAAFLRSKCSSVGRTLMGSVGNNLYGGINSSAETVTRPSHCDAISQQIRTFIQMRTNLKVVDNSGAKRVMCIQSLRGKKGARLGDMIIGSVKEAQPRGKVKKGDVVYGVVVRAAMKKGRSDGSEVQFDDNAIVIVNNKGELIGTRVFGPVPHELRKKKHLKILALAEHIV

SEQ ID NO: 62755 - protein, 154 aa, Triticum aestivum
  peptide (1)..(154): Ceres Seq. ID no. 12627568
  misc_feature (36)..(154): Pfam Name: Ribosomal protein L14p/L23e Pfam Description: Ribosomal protein L14p/L23e
  misc_feature (36)..(154): Homolog of NCBI NO: 15965119 NR Description: PROBABLE 50S RIBOSOMAL PROTEIN L14 [Sinorhizobium
  misc_feature (36)..(154): Homolog of NCBI NO: 15889233 NR Description: AGR_C_3539p [Agrobacterium tumefaciens]
  misc_feature (1)..(122): Homolog of NCBI NO: 18140858 NR Description: HUELLENLOS [Arabidopsis thaliana]
  misc_feature (1)..(122): Homolog of NCBI NO: 15220161 NR Description: ribosomal protein, putative
  misc_feature (1)..(122): Homolog of NCBI NO: 8778471 NR Description: F1L3.27 [Arabidopsis thaliana]
  misc_feature (38)..(153): Homolog of NCBI NO: 9757736 NR Description: 50S ribosomal protein L14 [Arabidopsis thaliana]
  misc_feature (1)..(153): Homolog of NCBI NO: 30694900 NR Description: ribosomal protein L14p family [Arabidopsis
  misc_feature (1)..(153): Homolog of NCBI NO: 20260394 NR Description: unknown protein [Arabidopsis thaliana]
  misc_feature (1)..(153): Homolog of NCBI NO: 30694896 NR Description: ribosomal protein L14p family [Arabidopsis
  misc_feature (1)..(154): Homolog of NCBI NO: 18140856 NR Description: HUELLENLOS-like protein [Oryza sativa]
MGSVGNNLYGGINSSAETVTRPSHCDAISQQIRTFIQMRTNLKVVDNSGAKRVMCIQSLRGKKGARLGDMIIGSVKEAQPRGKVKKGDVVYGVVVRAAMKKGRSDGSEVQFDDNAIVIVNNKGELIGTRVFGPVPHELRKKKHLKILALAEHIV

SEQ ID NO: 62756 - protein, 117 aa, Triticum aestivum
  peptide (1)..(117): Ceres Seq. ID no. 12627569
  misc_feature (1)..(117): Pfam Name: Ribosomal protein L14p/L23e Pfam Description: Ribosomal protein L14p/L23e
  misc_feature (1)..(117): Homolog of NCBI NO: 15965119 NR Description: PROBABLE 50S RIBOSOMAL PROTEIN L14 [Sinorhizobium
  misc_feature (1)..(117): Homolog of NCBI NO: 15889233 NR Description: AGR_C_3539p [Agrobacterium tumefaciens]
  misc_feature (1)..(85): Homolog of NCBI NO: 18140858 NR Description: HUELLENLOS [Arabidopsis thaliana]
  misc_feature (1)..(85): Homolog of NCBI NO: 15220161 NR Description: ribosomal protein, putative
  misc_feature (1)..(85): Homolog of NCBI NO: 8778471 NR Description: F1L3.27 [Arabidopsis thaliana]
  misc_feature (1)..(116): Homolog of NCBI NO: 9757736 NR Description: 50S ribosomal protein L14 [Arabidopsis thaliana]
  misc_feature (1)..(116): Homolog of NCBI NO: 30694900 NR Description: ribosomal protein L14p family [Arabidopsis
  misc_feature (1)..(116): Homolog of NCBI NO: 20260394 NR Description: unknown protein [Arabidopsis thaliana]
  misc_feature (1)..(116): Homolog of NCBI NO: 30694896 NR Description: ribosomal protein L14p family [Arabidopsis
  misc_feature (1)..(117): Homolog of NCBI NO: 18140856 NR Description: HUELLENLOS-like protein [Oryza sativa]
MRTNLKVVDNSGAKRVMCIQSLRGKKGARLGDMIIGSVKEAQPRGKVKKGDVVYGVVVRAAMKKGRSDGSEVQFDDNAIVIVNNKGELIGTRVFGPVPHELRKKKHLKILALAEHIV

SEQ ID NO: 62757 - DNA, 1154 bp, Triticum aestivum
  misc_feature (1)..(1154): Ceres Seq. ID no. 13598387
agcctctccgagaggccaagcagaaatggcggcttcctgcacgctcaccgtccccgcccccttcgccgccgcctcctcctcctcctccacttcagcccgtcgctacaggcgattcggggtggttgccatggcgagcgcggggcagaaggtgtacgctcccggcgtggccgtctccgagggcaacggcggcctgcccaagatcagcctcaaatccccgcacgggagtgaggctgagatttatctgtttggagcatgcgtcacgtcttggaaggttcccaatggaaaggatctgctctttgtcagaccagatgctgtgttcaacggccagaaacccatcagcggtggaattccacattgttttccccagtttggccctggccccatgcagcagcatggattcgcaaggaatgtgaattggtctattactgattcagaagtcacagaaggagatccaactgtaactttggaactaaaagacgactcatacagccgttcaatgtgggattttagtttccaagctttatacaaggttgtgctgcactctacaagcctgtcaacgaccctcaaaataataaatacagacgataaacctttctcattcacctcagccctccacacttatttcagtgcttccattgctggtgtttcagtgaaaggtctcaaaggtagcaagactctcaataaggatcctgaccctaaaaatcctctggagggcaaagaagaaagggacgaggtgacctttccaggatttgtggactgtgtttaccttggcgcaccgagtgagcttaccctcgacaatggattgggtgacaaaattgtaatctcaaacacaaactggtcagatgcagtgttgtggaatcctcatttgcagatggaggcatgctacaaagattttgtttgtgttgaaaatgcaaagattgaaacagtacaactgggtccaaaagaatcttgggtggcagagcagaaaattgaacttatctgaagctaatgggttgagaacagtacagtgcggcgagtatgttgtcaaaggacctttttatgtgtctgccaatgtaaacatgtgccattccccaatgtacttcaacttatgccctcacatgagatgtacatcttataactattttatgttttatgagtaaataagtatttcagtc

SEQ ID NO: 62758 - protein, 326 aa, Triticum aestivum
  peptide (1)..(326): Ceres Seq. ID no. 13598388
  misc_feature (65)..(321): Pfam Name: Aldose 1-epimerase Pfam Description: Aldose 1-epimerase
  misc_feature (58)..(326): Homolog of NCBI NO: 16612258 NR Description: AT3g01590/F4P13_13 [Arabidopsis thaliana]
  misc_feature (58)..(317): Homolog of NCBI NO: 18416643 NR Description: aldose 1-epimerase family [Arabidopsis thaliana]
  misc_feature (58)..(317): Homolog of NCBI NO: 21593295 NR Description: possible apospory-associated like protein
  misc_feature (57)..(307): Homolog of NCBI NO: 15242099 NR Description: aldose 1-epimerase family [Arabidopsis thaliana]
  misc_feature (39)..(307): Homolog of NCBI NO: 2501555 NR Description: POSSIBLE APOSPORY-ASSOCIATED PROTEIN C
  misc_feature (27)..(307): Homolog of NCBI NO: 19387263 NR Description: putative apospory-associated protein C
  misc_feature (53)..(307): Homolog of NCBI NO: 40253263 NR Description: putative Aldose 1-epimerase
  misc_feature (52)..(307): Homolog of NCBI NO: 38344152 NR Description: OSJNBa0041A02.19 [Oryza sativa (japonica
  misc_feature (20)..(326): Homolog of NCBI NO: 6970044 NR Description: apospory-associated protein C; APOC
  misc_feature (28)..(325): Homolog of NCBI NO: 15240009 NR Description: aldose 1-epimerase family [Arabidopsis thaliana]
ASPRGQAEMAASCTLTVPAPFAAASSSSSTSARRYRRFGVVAMASAGQKVYAPGVAVSEGNGGLPKISLKSPHGSEAEIYLFGACVTSWKVPNGKDLLFVRPDAVFNGQKPISGGIPHCFPQFGPGPMQQHGFARNVNWSITDSEVTEGDPTVTLELKDDSYSRSMWDFSFQALYKVVLHSTSLSTTLKIINTDDKPFSFTSALHTYFSASIAGVSVKGLKGSKTLNKDPDPKNPLEGKEERDEVTFPGFVDCVYLGAPSELTLDNGLGDKIVISNTNWSDAVLWNPHLQMEACYKDFVCVENAKIETVQLGPKESWVAEQKIELI

SEQ ID NO: 62759 - protein, 318 aa, Triticum aestivum
  peptide (1)..(318): Ceres Seq. ID no. 13598389
  misc_feature (57)..(313): Pfam Name: Aldose 1-epimerase Pfam Description: Aldose 1-epimerase
  misc_feature (50)..(318): Homolog of NCBI NO: 16612258 NR Description: AT3g01590/F4P13_13 [Arabidopsis thaliana]
  misc_feature (50)..(309): Homolog of NCBI NO: 18416643 NR Description: aldose 1-epimerase family [Arabidopsis thaliana]
  misc_feature (50)..(309): Homolog of NCBI NO: 21593295 NR Description: possible apospory-associated like protein
  misc_feature (49)..(299): Homolog of NCBI NO: 15242099 NR Description: aldose 1-epimerase family [Arabidopsis thaliana]
  misc_feature (31)..(299): Homolog of NCBI NO: 2501555 NR Description: POSSIBLE APOSPORY-ASSOCIATED PROTEIN C
  misc_feature (19)..(299): Homolog of NCBI NO: 19387263 NR Description: putative apospory-associated protein C
  misc_feature (45)..(299): Homolog of NCBI NO: 40253263 NR Description: putative Aldose 1-epimerase
  misc_feature (44)..(299): Homolog of NCBI NO: 38344152 NR Description: OSJNBa0041A02.19 [Oryza sativa (japonica
  misc_feature (12)..(318): Homolog of NCBI NO: 6970044 NR Description: apospory-associated protein C; APOC
  misc_feature (20)..(317): Homolog of NCBI NO: 15240009 NR Description: aldose 1-epimerase family [Arabidopsis thaliana]
MAASCTLTVPAPFAAASSSSSTSARRYRRFGVVAMASAGQKVYAPGVAVSEGNGGLPKISLKSPHGSEAEIYLFGACVTSWKVPNGKDLLFVRPDAVFNGQKPISGGIPHCFPQFGPGPMQQHGFARNVNWSITDSEVTEGDPTVTLELKDDSYSRSMWDFSFQALYKVVLHSTSLSTTLKIINTDDKPFSFTSALHTYFSASIAGVSVKGLKGSKTLNKDPDPKNPLEGKEERDEVTFPGFVDCVYLGAPSELTLDNGLGDKIVISNTNWSDAVLWNPHLQMEACYKDFVCVENAKIETVQLGPKESWVAEQKIELI

SEQ ID NO: 62760 - protein, 284 aa, Triticum aestivum
  peptide (1)..(284): Ceres Seq. ID no. 13598390
  misc_feature (23)..(279): Pfam Name: Aldose 1-epimerase Pfam Description: Aldose 1-epimerase
  misc_feature (16)..(284): Homolog of NCBI NO: 16612258 NR Description: AT3g01590/F4P13_13 [Arabidopsis thaliana]
  misc_feature (16)..(275): Homolog of NCBI NO: 18416643 NR Description: aldose 1-epimerase family [Arabidopsis thaliana]
  misc_feature (16)..(275): Homolog of NCBI NO: 21593295 NR Description: possible apospory-associated like protein
  misc_feature (15)..(265): Homolog of NCBI NO: 15242099 NR Description: aldose 1-epimerase family [Arabidopsis thaliana]
  misc_feature (1)..(265): Homolog of NCBI NO: 2501555 NR Description: POSSIBLE APOSPORY-ASSOCIATED PROTEIN C
  misc_feature (1)..(265): Homolog of NCBI NO: 19387263 NR Description: putative apospory-associated protein C
  misc_feature (11)..(265): Homolog of NCBI NO: 40253263 NR Description: putative Aldose 1-epimerase
  misc_feature (10)..(265): Homolog of NCBI NO: 38344152 NR Description: OSJNBa0041A02.19 [Oryza sativa (japonica
  misc_feature (1)..(284): Homolog of NCBI NO: 6970044 NR Description: apospory-associated protein C; APOC
  misc_feature (1)..(283): Homolog of NCBI NO: 15240009 NR Description: aldose 1-epimerase family [Arabidopsis thaliana]
MASAGQKVYAPGVAVSEGNGGLPKISLKSPHGSEAEIYLFGACVTSWKVPNGKDLLFVRPDAVFNGQKPISGGIPHCFPQFGPGPMQQHGFARNVNWSITDSEVTEGDPTVTLELKDDSYSRSMWDFSFQALYKVVLHSTSLSTTLKIINTDDKPFSFTSALHTYFSASIAGVSVKGLKGSKTLNKDPDPKNPLEGKEERDEVTFPGFVDCVYLGAPSELTLDNGLGDKIVISNTNWSDAVLWNPHLQMEACYKDFVCVENAKIETVQLGPKESWVAEQKIELI

SEQ ID NO: 62761 - DNA, 1331 bp, Triticum aestivum
  misc_feature (1)..(1331): Ceres Seq. ID no. 12615466
aaaaccaacagcaagcaaccatggcttcttatgacaaacaattcaaggttctcgaggtacctccgatcgtgcaagagctggtgggcgccggcgtgcaggagccaccgagccagtacgtgcttcctgagcaagaccgtcccgccgcggcggtctccgagatgcccgagcccatccccatcatcgacctcagccggctgtctgccggcagcgccgaagagttcgacaagctgcggtccgccttggagaactgggacctcttcctggctgttggacatggaatggagcctagctttcttgccgaggcgatgaagtccacgatagagttcttcaacctcccactggaagagaaacagaagtactcaaacattgtcgacggcgagaagctgggcatggatggatacggtaacgacatggtcgtgaaagagaatcaggtccttgactggaacgaccggctcaatctcctagtggaacccgaggccctaagaacctacagactgtggccaacacaacccccttctttcagagacatcctgtctgagtacacggtcaggtgcaaagcggcggctaaccttgtctttcgaaacatggccaagatactcaatttacaagaggaacacctggtaaacatgatcggngagaactccatcacccaagctatattcaactattaccctcagtgtccaaggccggaccacgtcttgggcctcaaggcccataccgatggctccataatcacagtcaacttcgccgatgctgaggggctccagcttcagagaaacggcgtctggtacaacgtgcccatcgttccaaatgcattgattatgaacgtaggggatataatggagattgtgagcaatgggttcttcaagagcctggtgcatagggttgtgaccaacgcggagaaagagcgcttgtcgttggtgctggtctatacatcggagctagagacagagcttgagccggtgtcagacctggtggatgacaagagacctgcacgatacatgaagatcaagctccacgactacatggaaaaatatcatgacacttatgccacagggacaatatccatagtcggcgtgaagatctgaatatgattctgatgtgtgcaagtccgctatatgaacaactatgcatggtgaagtatcttccgtcgaccagtttgtaacgagtttatatttttcatgtacccttttccccaatttttgtgtgtgtactccttcatgtaaaatgttcggcagcttgtgtggctgcatgaaacattaaaataaaatgtatctgctgtgtgcaacatgcagatgcaaaggatggaataaaacttatcggtcgtgtgc

SEQ ID NO: 62762 - protein, 361 aa, Triticum aestivum
  peptide (1)..(361): Ceres Seq. ID no. 12615467
  misc_feature (216)..(310): Pfam Name: 2OG-Fe(II) oxygenase superfamily Pfam Description: 2OG-Fe(II) oxygenase superfamily
  misc_feature (282)..(361): Homolog of NCBI NO: 24413981 NR Description: contains EST
  misc_feature (22)..(261): Homolog of NCBI NO: 24413981 NR Description: contains EST
  misc_feature (19)..(361): Homolog of NCBI NO: 24413984 NR Description: ethylene-forming-enzyme-like dioxygenase-like
  misc_feature (22)..(361): Homolog of NCBI NO: 34898468 NR Description: Similar to Prunus armeniaca
  misc_feature (14)..(132): Homolog of NCBI NO: 24413983 NR Description: ethylene-forming-enzyme-like dioxygenase-like
  misc_feature (175)..(361): Homolog of NCBI NO: 24413983 NR Description: ethylene-forming-enzyme-like dioxygenase-like
  misc_feature (20)..(341): Homolog of NCBI NO: 24413982 NR Description: ethylene-forming-enzyme-like dioxygenase-like
  misc_feature (20)..(347): Homolog of NCBI NO: 34898470 NR Description: ESTs D47168(S12332),D46350(S10967) correspond to region of the predicted gene.~Similar to Prunus armeniaca
  misc_feature (21)..(352): Homolog of NCBI NO: 33115140 NR Description: iron/ascorbate-dependent oxidoreductase [Hordeum
  misc_feature (14)..(361): Homolog of NCBI NO: 34898472 NR Description: Similar to Prunus armeniaca
  misc_feature (211)..(211): Xaa is any aa, unknown or other
NQQQATMASYDKQFKVLEVPPIVQELVGAGVQEPPSQYVLPEQDRPAAAVSEMPEPIPIIDLSRLSAGSAEEFDKLRSALENWDLFLAVGHGMEPSFLAEAMKSTIEFFNLPLEEKQKYSNIVDGEKLGMDGYGNDMVVKENQVLDWNDRLNLLVEPEALRTYRLWPTQPPSFRDILSEYTVRCKAAANLVFRNMAKILNLQEEHLVNMIXENSITQAIFNYYPQCPRPDHVLGLKAHTDGSIITVNFADAEGLQLQRNGVWYNVPIVPNALIMNVGDIMEIVSNGFFKSLVHRVVTNAEKERLSLVLVYTSELETELEPVSDLVDDKRPARYMKIKLHDYMEKYHDTYATGTISIVGVKI

SEQ ID NO: 62763 - protein, 355 aa, Triticum aestivum
  peptide (1)..(355): Ceres Seq. ID no. 12615468
  misc_feature (210)..(304): Pfam Name: 2OG-Fe(II) oxygenase superfamily Pfam Description: 2OG-Fe(II) oxygenase superfamily
  misc_feature (276)..(355): Homolog of NCBI NO: 24413981 NR Description: contains EST
  misc_feature (16)..(255): Homolog of NCBI NO: 24413981 NR Description: contains EST
  misc_feature (13)..(355): Homolog of NCBI NO: 24413984 NR Description: ethylene-forming-enzyme-like dioxygenase-like
  misc_feature (16)..(355): Homolog of NCBI NO: 34898468 NR Description: Similar to Prunus armeniaca
  misc_feature (8)..(126): Homolog of NCBI NO: 24413983 NR Description: ethylene-forming-enzyme-like dioxygenase-like
  misc_feature (169)..(355): Homolog of NCBI NO: 24413983 NR Description: ethylene-forming-enzyme-like dioxygenase-like
  misc_feature (14)..(335): Homolog of NCBI NO: 24413982 NR Description: ethylene-forming-enzyme-like dioxygenase-like
  misc_feature (14)..(341): Homolog of NCBI NO: 34898470 NR Description: ESTs D47168(S12332),D46350(S10967) correspond to region of the predicted gene.~Similar to Prunus armeniaca
  misc_feature (15)..(346): Homolog of NCBI NO: 33115140 NR Description: iron/ascorbate-dependent oxidoreductase [Hordeum
  misc_feature (8)..(355): Homolog of NCBI NO: 34898472 NR Description: Similar to Prunus armeniaca
  misc_feature (205)..(205): Xaa is any aa, unknown or other
MASYDKQFKVLEVPPIVQELVGAGVQEPPSQYVLPEQDRPAAAVSEMPEPIPIIDLSRLSAGSAEEFDKLRSALENWDLFLAVGHGMEPSFLAEAMKSTIEFFNLPLEEKQKYSNIVDGEKLGMDGYGNDMVVKENQVLDWNDRLNLLVEPEALRTYRLWPTQPPSFRDILSEYTVRCKAAANLVFRNMAKILNLQEEHLVNMIXENSITQAIFNYYPQCPRPDHVLGLKAHTDGSIITVNFADAEGLQLQRNGVWYNVPIVPNALIMNVGDIMEIVSNGFFKSLVHRVVTNAEKERLSLVLVYTSELETELEPVSDLVDDKRPARYMKIKLHDYMEKYHDTYATGTISIVGVKI

SEQ ID NO: 62764 - protein, 309 aa, Triticum aestivum
  peptide (1)..(309): Ceres Seq. ID no. 12615469
  misc_feature (164)..(258): Pfam Name: 2OG-Fe(II) oxygenase superfamily Pfam Description: 2OG-Fe(II) oxygenase superfamily
  misc_feature (230)..(309): Homolog of NCBI NO: 24413981 NR Description: contains EST
  misc_feature (1)..(209): Homolog of NCBI NO: 24413981 NR Description: contains EST
  misc_feature (1)..(309): Homolog of NCBI NO: 24413984 NR Description: ethylene-forming-enzyme-like dioxygenase-like
  misc_feature (1)..(309): Homolog of NCBI NO: 34898468 NR Description: Similar to Prunus armeniaca
  misc_feature (1)..(80): Homolog of NCBI NO: 24413983 NR Description: ethylene-forming-enzyme-like dioxygenase-like
  misc_feature (123)..(309): Homolog of NCBI NO: 24413983 NR Description: ethylene-forming-enzyme-like dioxygenase-like
  misc_feature (1)..(289): Homolog of NCBI NO: 24413982 NR Description: ethylene-forming-enzyme-like dioxygenase-like
  misc_feature (1)..(295): Homolog of NCBI NO: 34898470 NR Description: ESTs D47168(S12332),D46350(S10967) correspond to region of the predicted gene.~Similar to Prunus armeniaca
  misc_feature (1)..(300): Homolog of NCBI NO: 33115140 NR Description: iron/ascorbate-dependent oxidoreductase [Hordeum
  misc_feature (1)..(309): Homolog of NCBI NO: 34898472 NR Description: Similar to Prunus armeniaca
  misc_feature (159)..(159): Xaa is any aa, unknown or other
MPEPIPIIDLSRLSAGSAEEFDKLRSALENWDLFLAVGHGMEPSFLAEAMKSTIEFFNLPLEEKQKYSNIVDGEKLGMDGYGNDMVVKENQVLDWNDRLNLLVEPEALRTYRLWPTQPPSFRDILSEYTVRCKAAANLVFRNMAKILNLQEEHLVNMIXENSITQAIFNYYPQCPRPDHVLGLKAHTDGSIITVNFADAEGLQLQRNGVWYNVPIVPNALIMNVGDIMEIVSNGFFKSLVHRVVTNAEKERLSLVLVYTSELETELEPVSDLVDDKRPARYMKIKLHDYMEKYHDTYATGTISIVGVKI

SEQ ID NO: 62765 - DNA, 1490 bp, Triticum aestivum
  misc_feature (1)..(1490): Ceres Seq. ID no. 13596744
gaacatcctaatcgaaaactccattttcctctccaccccgcaacccacgcagacgcagctcgaccgaccacaactgtgcgcagcagcggcggccggcggagaccgtatcgtaccatggcgatggagggctacgaccgcgagttctggcagttcggcgaccagctccgcctccagacggccaccttctccggcctctccctcggcgactccatctggtcccccgccgacgccgccccccgcgcccgcaacgccgaccccggcctcttctccccctcccaggcggcccacaacaacgccggaaccggattcgccgccgccaagatgaacggcagcctcaacgggcccggcctcatcggctccggcaagctcgccttcggcgccaccaccaccagcaaggccgaccgctacaacaacgtcagcctccccgccgccgccgacgccaagccctacgccaacgccaacggcctgtacggtgccaagcccaacaacaccaataacaacggcttcgggctcaacaagatggctgccggcggcgggggctacagcaacttcaacggcggcaacgagggggtgaagagctacttcaacaagtccatcgggaggccggccagcaacaacaacagcagcagcaacaacttcagcggctacggcggcaagaagggcgccgcggacggcaagaagaagcacgccaagaacgagcgaggggacaacaaccacggcgccgcgtcggagaagcggttcaagacgctgccggcgtccgaggcgctgccccggaacgagcccatcggcggctacatcttcgtctgcaacaacgacaccatggaggagaacctcaagaggcagctcttcgggttgccatccagatacagagattcagtgagggcgatcaggccagggctgcccctcttcctctacaactactccacccaccagctccacggcatcttcgaggctgcgagctttggcggagcgaacatcgacccggcggcctgggaggacaagaagtgcaacggcgagtctcgcttccctgcacaggtgagggtggccacaaggaagatctgcgacccactggaggaggacgccttccgccctatcctgcaccactacgacgggcccaagttccggctggagctcagcatcaccgaggctctctcccttcttgatatatttgaagacaaggacgatgcctgatcgagggctgatcagggattcttgaggaaggaatagcacaataagatcggatcggagaatatatacatacatatgattaatatcattatcaattaatggtgatatatacgtgagttttatgtattgggttttccatctcgcgggctatgaaattatgcgtcccccgttgtggtatcatgcgtggtgatggctgcacaagatgagccctcgtgaacataactaatctattgtcacggctatgtatgtataatattgagactttaaaaaaaaaaaaaaaaaagcttatcgataccgtcgac

SEQ ID NO: 62766 - protein, 396 aa, Triticum aestivum
  peptide (1)..(396): Ceres Seq. ID no. 15221969
  misc_feature (274)..(358): Homolog of NCBI NO: 7488804 NR Description: gda-1 protein - garden pea
  misc_feature (183)..(396): Homolog of NCBI NO: 21665866 NR Description: GDA2 protein [Pisum sativum]
  misc_feature (129)..(396): Homolog of NCBI NO: 21592623 NR Description: gda-1, putative [Arabidopsis thaliana]
  misc_feature (129)..(396): Homolog of NCBI NO: 15232081 NR Description: gda-1 -related [Arabidopsis thaliana]
  misc_feature (191)..(394): Homolog of NCBI NO: 9757950 NR Description: gene_id:MJC20.15~similar to unknown
  misc_feature (129)..(396): Homolog of NCBI NO: 2369766 NR Description: hypothetical protein [Citrus x paradisi]
  misc_feature (192)..(392): Homolog of NCBI NO: 584825 NR Description: B2 PROTEIN
  misc_feature (46)..(394): Homolog of NCBI NO: 18422167 NR Description: expressed protein [Arabidopsis thaliana]
  misc_feature (41)..(382): Homolog of NCBI NO: 34913876 NR Description: B1156H12.22 [Oryza sativa (japonica
EHPNRKLHFPLHPATHADAARPTTTVRSSGGRRRPYRTMAMEGYDREFWQFGDQLRLQTATFSGLSLGDSIWSPADAAPRARNADPGLFSPSQAAHNNAGTGFAAAKMNGSLNGPGLIGSGKLAFGATTTSKADRYNNVSLPAAADAKPYANANGLYGAKPNNTNNNGFGLNKMAAGGGGYSNFNGGNEGVKSYFNKSIGRPASNNNSSSNNFSGYGGKKGAADGKKKHAKNERGDNNHGAASEKRFKTLPASEALPRNEPIGGYIFVCNNDTMEENLKRQLFGLPSRYRDSVRAIRPGLPLFLYNYSTHQLHGIFEAASFGGANIDPAAWEDKKCNGESRFPAQVRVATRKICDPLEEDAFRPILHHYDGPKFRLELSITEALSLLDIFEDKDDA

SEQ ID NO: 62767 - protein, 358 aa, Triticum aestivum
  peptide (1)..(358): Ceres Seq. ID no. 15221970
  misc_feature (236)..(320): Homolog of NCBI NO: 7488804 NR Description: gda-1 protein - garden pea
  misc_feature (145)..(358): Homolog of NCBI NO: 21665866 NR Description: GDA2 protein [Pisum sativum]
  misc_feature (91)..(358): Homolog of NCBI NO: 21592623 NR Description: gda-1, putative [Arabidopsis thaliana]
  misc_feature (91)..(358): Homolog of NCBI NO: 15232081 NR Description: gda-1 -related [Arabidopsis thaliana]
  misc_feature (153)..(356): Homolog of NCBI NO: 9757950 NR Description: gene_id:MJC20.15~similar to unknown
  misc_feature (91)..(358): Homolog of NCBI NO: 2369766 NR Description: hypothetical protein [Citrus x paradisi]
  misc_feature (154)..(354): Homolog of NCBI NO: 584825 NR Description: B2 PROTEIN
  misc_feature (8)..(356): Homolog of NCBI NO: 18422167 NR Description: expressed protein [Arabidopsis thaliana]
  misc_feature (3)..(344): Homolog of NCBI NO: 34913876 NR Description: B1156H12.22 [Oryza sativa (japonica
MAMEGYDREFWQFGDQLRLQTATFSGLSLGDSIWSPADAAPRARNADPGLFSPSQAAHNNAGTGFAAAKMNGSLNGPGLIGSGKLAFGATTTSKADRYNNVSLPAAADAKPYANANGLYGAKPNNTNNNGFGLNKMAAGGGGYSNFNGGNEGVKSYFNKSIGRPASNNNSSSNNFSGYGGKKGAADGKKKHAKNERGDNNHGAASEKRFKTLPASEALPRNEPIGGYIFVCNNDTMEENLKRQLFGLPSRYRDSVRAIRPGLPLFLYNYSTHQLHGIFEAASFGGANIDPAAWEDKKCNGESRFPAQVRVATRKICDPLEEDAFRPILHHYDGPKFRLELSITEALSLLDIFEDKDDA

SEQ ID NO: 62768 - protein, 356 aa, Triticum aestivum
  peptide (1)..(356): Ceres Seq. ID no. 15221971
  misc_feature (234)..(318): Homolog of NCBI NO: 7488804 NR Description: gda-1 protein - garden pea
  misc_feature (143)..(356): Homolog of NCBI NO: 21665866 NR Description: GDA2 protein [Pisum sativum]
  misc_feature (89)..(356): Homolog of NCBI NO: 21592623 NR Description: gda-1, putative [Arabidopsis thaliana]
  misc_feature (89)..(356): Homolog of NCBI NO: 15232081 NR Description: gda-1 -related [Arabidopsis thaliana]
  misc_feature (151)..(354): Homolog of NCBI NO: 9757950 NR Description: gene_id:MJC20.15~similar to unknown
  misc_feature (89)..(356): Homolog of NCBI NO: 2369766 NR Description: hypothetical protein [Citrus x paradisi]
  misc_feature (152)..(352): Homolog of NCBI NO: 584825 NR Description: B2 PROTEIN
  misc_feature (6)..(354): Homolog of NCBI NO: 18422167 NR Description: expressed protein [Arabidopsis thaliana]
  misc_feature (1)..(342): Homolog of NCBI NO: 34913876 NR Description: B1156H12.22 [Oryza sativa (japonica
MEGYDREFWQFGDQLRLQTATFSGLSLGDSIWSPADAAPRARNADPGLFSPSQAAHNNAGTGFAAAKMNGSLNGPGLIGSGKLAFGATTTSKADRYNNVSLPAAADAKPYANANGLYGAKPNNTNNNGFGLNKMAAGGGGYSNFNGGNEGVKSYFNKSIGRPASNNNSSSNNFSGYGGKKGAADGKKKHAKNERGDNNHGAASEKRFKTLPASEALPRNEPIGGYIFVCNNDTMEENLKRQLFGLPSRYRDSVRAIRPGLPLFLYNYSTHQLHGIFEAASFGGANIDPAAWEDKKCNGESRFPAQVRVATRKICDPLEEDAFRPILHHYDGPKFRLELSITEALSLLDIFEDKDDA

SEQ ID NO: 62769 - DNA, 1416 bp, Triticum aestivum
  misc_feature (1)..(1416): Ceres Seq. ID no. 13598391
cgaagtcccaaatcaatccatttcatttcggtttcgaatcccctggggacgagctcgcgtcgccttccctctccgcccgccccgtcgccatccgccccttcgaatctgcagggcggcgccgcctggcctcgttgtcgccacgggaggcgcgcgggatggggcggttgtttgcggtggacgccgcggcggcctcgtcggccgcggccgcggcggcgctgaacggcgcggtggactggtggaaagacgtgaacgactcgccgatgtggcaggaccgcatcttccacgccctcgccgtgctctacggcatcgtctccgtcgtcgcgcttgtccaattgatcagaatcgagtgtagggtgcccgagtacgggtggacgacgcagaaggtgttccatttccttaacttcatcgtgaatggcgtgcgggctatcgtatttgtgctgcggcgaaacgtgcagctgatacaaccagagatacttcaacatgtggttcttgacatgcctgggcttgcgttcttcactacatacgcgcttttggtgctattctgggccgatatttactatcaggcacgtgcgatgtcgactgatgggctgaggccaactttctattggatcaatggggtggtgtatgcaattcagataattctgtggttggttttgtggtggaaaccagttcgaattatggtcatattgtccaagatgttctttgcaggcgtatcactgtttgcagcttttgggttccttctgtatggtgggaggctattcctcatgttgcaacgttttcccgtagaatcaaaaggaagacggaagaaattgcaggaggttggctatgtcactaccatctgctttacttgtttcttgatcagatgtgtcatgatgtgtctcaatgcatttgataaagcagctgatcttgatgttctgagccatccgattctgaatttcttttattacctgctggtcgagatcgtaccttcagctatggttctgtttatactaaggaaactgcccccaaaacgtgggatcacgcagtaccatcctatccattagagcagagcagccctggtaccaggctggtacagacgaatgctccttacagagttcgtaaatacatgagaggcaatgtgaagatcaccgcacttgcactgaagcttgcccaggttttaaatgaggaagcctttaggatttcaggttactattgcttgtaaaagagatttgcaatgtagttcaaaaaaagaagagatttgcaatatcatgctgtttacaggtctagaaaaatgcaagttttatataatgtatgtatacctttgttcttctcagtactttcaccctgtagtctgcaccgcgcgacagcaatcacggctggaatcgcatatttgatttttgactgtttaaacacaataaagttggaactggagggggg

SEQ ID NO: 62770 - protein, 346 aa, Triticum aestivum
  peptide (1)..(346): Ceres Seq. ID no. 13598392
  misc_feature (212)..(345): Homolog of NCBI NO: 25402773 NR Description: protein T5E21.3 [imported] - Arabidopsis thaliana
  misc_feature (63)..(214): Homolog of NCBI NO: 25402773 NR Description: protein T5E21.3 [imported] - Arabidopsis thaliana
  misc_feature (63)..(345): Homolog of NCBI NO: 27754346 NR Description: unknown protein [Arabidopsis thaliana]
  misc_feature (63)..(345): Homolog of NCBI NO: 21537116 NR Description: unknown [Arabidopsis thaliana]
  misc_feature (63)..(345): Homolog of NCBI NO: 18394129 NR Description: THH1 protein [Arabidopsis thaliana]
  misc_feature (63)..(345): Homolog of NCBI NO: 7262697 NR Description: Contains similarity to an unknown protein from
  misc_feature (60)..(345): Homolog of NCBI NO: 21537264 NR Description: unknown [Arabidopsis thaliana]
  misc_feature (56)..(345): Homolog of NCBI NO: 18395323 NR Description: TOM3 protein [Arabidopsis thaliana]
  misc_feature (62)..(346): Homolog of NCBI NO: 34902220 NR Description: Putative transmembrane protein
  misc_feature (52)..(346): Homolog of NCBI NO: 37536460 NR Description: putative transmembrane protein
KSQINPFHFGFESPGDELASPSLSARPVAIRPFESAGRRRLASLSPREARGMGRLFAVDAAAASSAAAAAALNGAVDWWKDVNDSPMWQDRIFHALAVLYGIVSVVALVQLIRIECRVPEYGWTTQKVFHFLNFIVNGVRAIVFVLRRNVQLIQPEILQHVVLDMPGLAFFTTYALLVLFWADIYYQARAMSTDGLRPTFYWINGVVYAIQIILWLVLWWKPVRIMVILSKMFFAGVSLFAAFGFLLYGGRLFLMLQRFPVESKGRRKKLQEVGYVTTICFTCFLIRCVMMCLNAFDKAADLDVLSHPILNFFYYLLVEIVPSAMVLFILRKLPPKRGITQYHPIH

SEQ ID NO: 62771 - protein, 295 aa, Triticum aestivum
  peptide (1)..(295): Ceres Seq. ID no. 13598393
  misc_feature (161)..(294): Homolog of NCBI NO: 25402773 NR Description: protein T5E21.3 [imported] - Arabidopsis thaliana
  misc_feature (12)..(163): Homolog of NCBI NO: 25402773 NR Description: protein T5E21.3 [imported] - Arabidopsis thaliana
  misc_feature (12)..(294): Homolog of NCBI NO: 27754346 NR Description: unknown protein [Arabidopsis thaliana]
  misc_feature (12)..(294): Homolog of NCBI NO: 18394129 NR Description: THH1 protein [Arabidopsis thaliana]
  misc_feature (12)..(294): Homolog of NCBI NO: 21537116 NR Description: unknown [Arabidopsis thaliana]
  misc_feature (12)..(294): Homolog of NCBI NO: 7262697 NR Description: Contains similarity to an unknown protein from
  misc_feature (9)..(294): Homolog of NCBI NO: 21537264 NR Description: unknown [Arabidopsis thaliana]
  misc_feature (5)..(294): Homolog of NCBI NO: 18395323 NR Description: TOM3 protein [Arabidopsis thaliana]
  misc_feature (11)..(295): Homolog of NCBI NO: 34902220 NR Description: Putative transmembrane protein
  misc_feature (1)..(295): Homolog of NCBI NO: 37536460 NR Description: putative transmembrane protein
MGRLFAVDAAAASSAAAAAALNGAVDWWKDVNDSPMWQDRIFHALAVLYGIVSVVALVQLIRIECRVPEYGWTTQKVFHFLNFIVNGVRAIVFVLRRNVQLIQPEILQHVVLDMPGLAFFTTYALLVLFWADIYYQARAMSTDGLRPTFYWINGVVYAIQIILWLVLWWKPVRIMVILSKMFFAGVSLFAAFGFLLYGGRLFLMLQRFPVESKGRRKKLQEVGYVTTICFTCFLIRCVMMCLNAFDKAADLDVLSHPILNFFYYLLVEIVPSAMVLFILRKLPPKRGITQYHPIH

SEQ ID NO: 62772 - protein, 260 aa, Triticum aestivum
  peptide (1)..(260): Ceres Seq. ID no. 13598394
  misc_feature (126)..(259): Homolog of NCBI NO: 25402773 NR Description: protein T5E21.3 [imported] - Arabidopsis thaliana
  misc_feature (1)..(128): Homolog of NCBI NO: 25402773 NR Description: protein T5E21.3 [imported] - Arabidopsis thaliana
  misc_feature (1)..(259): Homolog of NCBI NO: 27754346 NR Description: unknown protein [Arabidopsis thaliana]
  misc_feature (1)..(259): Homolog of NCBI NO: 18394129 NR Description: THH1 protein [Arabidopsis thaliana]
  misc_feature (1)..(259): Homolog of NCBI NO: 21537116 NR Description: unknown [Arabidopsis thaliana]
  misc_feature (1)..(259): Homolog of NCBI NO: 7262697 NR Description: Contains similarity to an unknown protein from
  misc_feature (1)..(259): Homolog of NCBI NO: 21537264 NR Description: unknown [Arabidopsis thaliana]
  misc_feature (1)..(259): Homolog of NCBI NO: 18395323 NR Description: TOM3 protein [Arabidopsis thaliana]
  misc_feature (1)..(260): Homolog of NCBI NO: 34902220 NR Description: Putative transmembrane protein
  misc_feature (1)..(260): Homolog of NCBI NO: 37536460 NR Description: putative transmembrane protein
MWQDRIFHALAVLYGIVSVVALVQLIRIECRVPEYGWTTQKVFHFLNFIVNGVRAIVFVLRRNVQLIQPEILQHVVLDMPGLAFFTTYALLVLFWADIYYQARAMSTDGLRPTFYWINGVVYAIQIILWLVLWWKPVRIMVILSKMFFAGVSLFAAFGFLLYGGRLFLMLQRFPVESKGRRKKLQEVGYVTTICFTCFLIRCVMMCLNAFDKAADLDVLSHPILNFFYYLLVEIVPSAMVLFILRKLPPKRGITQYHPIH

SEQ ID NO: 62773 - DNA, 1430 bp, Triticum aestivum
  misc_feature (1)..(1430): Ceres Seq. ID no. 12624849
ctgtcacagaatcccgcagattcccctgaacccggcgagggcgagcagagcaaccccgccatggccgcggcgatcctccgccgcctcagcccggtggcctcccagcgcgtgccccctcgcctcctgccgccgacgctcgcccgcggggtctccgactccacggagccgctcaccgtggagacctcgatccccttcacgtcccacgtcgtggacccgccgtcgcgcgaggtgaccaccacgccgcgggagctcgccgcggccttccgcgacatggcgctcatgcggcgcgcggagatcgccgccgactcgctctacaaggccaagctcatccggggcttctgccacctctacgacggccaggaggcggtcgccgtgggcatggaggccgccatcacccgccgcgacgccatcatcaccgcctaccgcgaccactgcctctacctcgcgcgcggcgggggcctcgtcgccgccttcgccgagctcatgggccgcgtcgacggctgctccaggggcaagggcggctccatgcacttctacaagaaggacgccaacttctacggcgggcacggcatcgtcggcgcgcaggtgcccctcggctgcggcctcgccttcgcgcagaggtaccggaaggagggcaccgtcaccttcgacctctacggcgacggcgccgccaaccagggccagctcttcgaggcgctcaacatggccgcgctctggaagctgcccgtcatactcgtctgcgagaacaaccactatgggatggggacggccgagtggaaggcctccaagagcnccgcgtactacaagcgcggggactatgtgcccggattgaaggttgatggtatggattttcttgcagtgaagcaggcttgtaaatttgccaaagaacatgttctggaaattggaccgattattcttgagatggacacatatagataccatggacactctatgtcagatccaggcagcacttaccgcactagagatgagattgcaggaataagacaggagcgtgatccgattgagcgggtcagaaagctattattgacccatgacttggcaacagcccaggagctcaaggacatggagaaggaaatcaggaaggaagttgacactgcaattgccaaagcaaaggaaagcccaatgccggatacatccgaactgttcaagaatgtatatgtcaatgactgcggtctggagtcttttggggtggacaggaaggtggtgagaaccgtccttccataggctgccaaacgagaagcttggctctgtcagactgttcgcctggtgtatggtacgtgctggggagacataatagagtccaaggaattcgtagttagctgtattgtggacgtttctgtccctaaataagtctgtatatagagacgcgtgaccattcggactctgtaccgcattgcgctagtcattcc

SEQ ID NO: 62774 - protein, 414 aa, Triticum aestivum
  peptide (1)..(414): Ceres Seq. ID no. 12624850
  misc_feature (89)..(386): Pfam Name: Dehydrogenase E1 component Pfam Description: Dehydrogenase E1 component
  misc_feature (26)..(414): Homolog of NCBI NO: 2117533 NR Description: pyruvate dehydrogenase (lipoamide) (EC 1.2.4.1)
  misc_feature (51)..(414): Homolog of NCBI NO: 1709453 NR Description: Pyruvate dehydrogenase E1 component alpha
  misc_feature (26)..(414): Homolog of NCBI NO: 13430788 NR Description: putative pyruvate dehydrogenase e1 alpha subunit
  misc_feature (26)..(414): Homolog of NCBI NO: 15218940 NR Description: pyruvate dehydrogenase e1 alpha subunit, putative
  misc_feature (26)..(414): Homolog of NCBI NO: 1709449 NR Description: Pyruvate dehydrogenase E1 component alpha
  misc_feature (26)..(414): Homolog of NCBI NO: 23306664 NR Description: pyruvate dehydrogenase E1a-like subunit IAR4
  misc_feature (26)..(414): Homolog of NCBI NO: 15221692 NR Description: pyruvate dehydrogenase E1 alpha subunit
  misc_feature (51)..(414): Homolog of NCBI NO: 28465345 NR Description: pyruvate dehydrogenase E1 alpha subunit [Beta
  misc_feature (51)..(414): Homolog of NCBI NO: 28465343 NR Description: pyruvate dehydrogenase E1alpha subunit [Beta
  misc_feature (22)..(414): Homolog of NCBI NO: 3851005 NR Description: pyruvate dehydrogenase E1 alpha subunit [Zea mays]
  misc_feature (265)..(265): Xaa is any aa, unknown or other
LSQNPADSPEPGEGEQSNPAMAAAILRRLSPVASQRVPPRLLPPTLARGVSDSTEPLTVETSIPFTSHVVDPPSREVTTTPRELAAAFRDMALMRRAEIAADSLYKAKLIRGFCHLYDGQEAVAVGMEAAITRRDAIITAYRDHCLYLARGGGLVAAFAELMGRVDGCSRGKGGSMHFYKKDANFYGGHGIVGAQVPLGCGLAFAQRYRKEGTVTFDLYGDGAANQGQLFEALNMAALWKLPVILVCENNHYGMGTAEWKASKSXAYYKRGDYVPGLKVDGMDFLAVKQACKFAKEHVLEIGPIILEMDTYRYHGHSMSDPGSTYRTRDEIAGIRQERDPIERVRKLLLTHDLATAQELKDMEKEIRKEVDTAIAKAKESPMPDTSELFKNVYVNDCGLESFGVDRKVVRTVLP

SEQ ID NO: 62775 - protein, 394 aa, Triticum aestivum
  peptide (1)..(394): Ceres Seq. ID no. 12624851
  misc_feature (69)..(366): Pfam Name: Dehydrogenase E1 component Pfam Description: Dehydrogenase E1 component
  misc_feature (6)..(394): Homolog of NCBI NO: 2117533 NR Description: pyruvate dehydrogenase (lipoamide) (EC 1.2.4.1)
  misc_feature (31)..(394): Homolog of NCBI NO: 1709453 NR Description: Pyruvate dehydrogenase E1 component alpha
  misc_feature (6)..(394): Homolog of NCBI NO: 13430788 NR Description: putative pyruvate dehydrogenase e1 alpha subunit
  misc_feature (6)..(394): Homolog of NCBI NO: 15218940 NR Description: pyruvate dehydrogenase e1 alpha subunit, putative
  misc_feature (6)..(394): Homolog of NCBI NO: 1709449 NR Description: Pyruvate dehydrogenase E1 component alpha
  misc_feature (6)..(394): Homolog of NCBI NO: 23306664 NR Description: pyruvate dehydrogenase E1a-like subunit IAR4
  misc_feature (6)..(394): Homolog of NCBI NO: 15221692 NR Description: pyruvate dehydrogenase E1 alpha subunit
  misc_feature (31)..(394): Homolog of NCBI NO: 28465345 NR Description: pyruvate dehydrogenase E1 alpha subunit [Beta
  misc_feature (31)..(394): Homolog of NCBI NO: 28465343 NR Description: pyruvate dehydrogenase E1alpha subunit [Beta
  misc_feature (2)..(394): Homolog of NCBI NO: 3851005 NR Description: pyruvate dehydrogenase E1 alpha subunit [Zea mays]
  misc_feature (245)..(245): Xaa is any aa, unknown or other
MAAAILRRLSPVASQRVPPRLLPPTLARGVSDSTEPLTVETSIPFTSHVVDPPSREVTTTPRELAAAFRDMALMRRAEIAADSLYKAKLIRGFCHLYDGQEAVAVGMEAAITRRDAIITAYRDHCLYLARGGGLVAAFAELMGRVDGCSRGKGGSMHFYKKDANFYGGHGIVGAQVPLGCGLAFAQRYRKEGTVTFDLYGDGAANQGQLFEALNMAALWKLPVILVCENNHYGMGTAEWKASKSXAYYKRGDYVPGLKVDGMDFLAVKQACKFAKEHVLEIGPIILEMDTYRYHGHSMSDPGSTYRTRDEIAGIRQERDPIERVRKLLLTHDLATAQELKDMEKEIRKEVDTAIAKAKESPMPDTSELFKNVYVNDCGLESFGVDRKVVRTVLP

SEQ ID NO: 62776 - protein, 324 aa, Triticum aestivum
  peptide (1)..(324): Ceres Seq. ID no. 12624852
  misc_feature (1)..(296): Pfam Name: Dehydrogenase E1 component Pfam Description: Dehydrogenase E1 component
  misc_feature (1)..(324): Homolog of NCBI NO: 2117533 NR Description: pyruvate dehydrogenase (lipoamide) (EC 1.2.4.1)
  misc_feature (1)..(324): Homolog of NCBI NO: 1709453 NR Description: Pyruvate dehydrogenase E1 component alpha
  misc_feature (1)..(324): Homolog of NCBI NO: 13430788 NR Description: putative pyruvate dehydrogenase e1 alpha subunit
  misc_feature (1)..(324): Homolog of NCBI NO: 15218940 NR Description: pyruvate dehydrogenase e1 alpha subunit, putative
  misc_feature (1)..(324): Homolog of NCBI NO: 1709449 NR Description: Pyruvate dehydrogenase E1 component alpha
  misc_feature (1)..(324): Homolog of NCBI NO: 23306664 NR Description: pyruvate dehydrogenase E1a-like subunit IAR4
  misc_feature (1)..(324): Homolog of NCBI NO: 15221692 NR Description: pyruvate dehydrogenase E1 alpha subunit
  misc_feature (1)..(324): Homolog of NCBI NO: 28465345 NR Description: pyruvate dehydrogenase E1 alpha subunit [Beta
  misc_feature (1)..(324): Homolog of NCBI NO: 28465343 NR Description: pyruvate dehydrogenase E1alpha subunit [Beta
  misc_feature (1)..(324): Homolog of NCBI NO: 3851005 NR Description: pyruvate dehydrogenase E1 alpha subunit [Zea mays]
  misc_feature (175)..(175): Xaa is any aa, unknown or other
MALMRRAEIAADSLYKAKLIRGFCHLYDGQEAVAVGMEAAITRRDAIITAYRDHCLYLARGGGLVAAFAELMGRVDGCSRGKGGSMHFYKKDANFYGGHGIVGAQVPLGCGLAFAQRYRKEGTVTFDLYGDGAANQGQLFEALNMAALWKLPVILVCENNHYGMGTAEWKASKSXAYYKRGDYVPGLKVDGMDFLAVKQACKFAKEHVLEIGPIILEMDTYRYHGHSMSDPGSTYRTRDEIAGIRQERDPIERVRKLLLTHDLATAQELKDMEKEIRKEVDTAIAKAKESPMPDTSELFKNVYVNDCGLESFGVDRKVVRTVLP

SEQ ID NO: 62777 - DNA, 1251 bp, Triticum aestivum
  misc_feature (1)..(1251): Ceres Seq. ID no. 13596550
aaaaaacaaaataaaagaaatcgtcccctcctcgtcgtcgctgccgtcgctgagtgcgaactccgtcgtgtcctcccctctccctctctctatcccctctctctctctctctctctctctctgctaatctgagttcctcgttgagaagaggaaccgaggggcgcggcagcgactccgcccgtgatggtcgcccgccgcgctctgtggcggacgcggacatgcacagctcctccccctcctccgccgccgtcgcgtattcttcctcgtctccatcacacctctccccagtagacggcttcctctgcgtgaaggagggggtcgacgagatgatcaagcacgtcgccaatgagccctccctcgggctctacttcgtccagcagcacgctcaggcatccatgcccatcctccttgacgtcaagggcaaggttacagaaaagactcgtgagataacattacacactgaagatatagaggattctatttgtgctgtgaggtccatggctgagtttggacttccaattgctgatgatatgataaaggacataaataaatctctaaagataatgtcgaagacccaaccaaagaaagggttaacccagaaccccatttgggggttccaatcagacaaaagctcggaagcatggaacgatttggacgcaactaatggtggaagtagcaagaactatttgtcttccatgttgaacaccgcaaagcaaaaggcatcgagtctcagatggccacagactgatttcgctatgaacgatggcgttagtgagaagtcagtgtcatctacagctcaggagtcgtcacaagccggaggacatggtgcgtcaacaccctcggatgcagaaagggatgaagtctccatttcaagccgattgttggaaaataaaaatgcaggtactatgaaccagggcctgtctgcttctgatatctcccacacggcggagagctacaacaagttcaaagaagaacaggaactgaaactgcaagagtggctcagggagtcgaaagaagctgacgataatagaggttgagactgttgtaccagctccggtgttttccaccgctgtcggagcacgtcagaaatgaaaaacatgtccaaaccttggaatatgtttatgaccacagatctttttgtattgatgatcagtgtacatgtgcggcgtctctgtaaacattcgtgttcactttgcagctgttacattgatattcacaaggcagagagatctctctcgagtgtattgttgc

SEQ ID NO: 62778 - protein, 272 aa, Triticum aestivum
  peptide (1)..(272): Ceres Seq. ID no. 15221923
  misc_feature (22)..(203): Homolog of NCBI NO: 15225042 NR Description: expressed protein [Arabidopsis thaliana]
MHSSSPSSAAVAYSSSSPSHLSPVDGFLCVKEGVDEMIKHVANEPSLGLYFVQQHAQASMPILLDVKGKVTEKTREITLHTEDIEDSICAVRSMAEFGLPIADDMIKDINKSLKIMSKTQPKKGLTQNPIWGFQSDKSSEAWNDLDATNGGSSKNYLSSMLNTAKQKASSLRWPQTDFAMNDGVSEKSVSSTAQESSQAGGHGASTPSDAERDEVSISSRLLENKNAGTMNQGLSASDISHTAESYNKFKEEQELKLQEWLRESKEADDNRG

SEQ ID NO: 62779 - protein, 236 aa, Triticum aestivum
  peptide (1)..(236): Ceres Seq. ID no. 15221924
  misc_feature (1)..(167): Homolog of NCBI NO: 15225042 NR Description: expressed protein [Arabidopsis thaliana]
MIKHVANEPSLGLYFVQQHAQASMPILLDVKGKVTEKTREITLHTEDIEDSICAVRSMAEFGLPIADDMIKDINKSLKIMSKTQPKKGLTQNPIWGFQSDKSSEAWNDLDATNGGSSKNYLSSMLNTAKQKASSLRWPQTDFAMNDGVSEKSVSSTAQESSQAGGHGASTPSDAERDEVSISSRLLENKNAGTMNQGLSASDISHTAESYNKFKEEQELKLQEWLRESKEADDNRG

SEQ ID NO: 62780 - protein, 213 aa, Triticum aestivum
  peptide (1)..(213): Ceres Seq. ID no. 15221925
  misc_feature (1)..(144): Homolog of NCBI NO: 15225042 NR Description: expressed protein [Arabidopsis thaliana]
MPILLDVKGKVTEKTREITLHTEDIEDSICAVRSMAEFGLPIADDMIKDINKSLKIMSKTQPKKGLTQNPIWGFQSDKSSEAWNDLDATNGGSSKNYLSSMLNTAKQKASSLRWPQTDFAMNDGVSEKSVSSTAQESSQAGGHGASTPSDAERDEVSISSRLLENKNAGTMNQGLSASDISHTAESYNKFKEEQELKLQEWLRESKEADDNRG

SEQ ID NO: 62781 - DNA, 1088 bp, Triticum aestivum
  misc_feature (1)..(1088): Ceres Seq. ID no. 14302415
agagcagagccgagcataccccatctattaccgtcttctcggaccgtgcttccctgccgccctcgctgctgctgcgagctccggtcggcaatcttttcccggttcaagatgaccatcatcatcgagcagcctcagttcgatgcggcggcggagaggaaggtcgccggcgacccggcggagctcgtgctcgacggcggcttcaccgtaccggactccaacgccttcggccacaccttcagggactacgacgcggagtcggagcggaagaagactgtggaggagttctaccgcgtgaaccacatcaaccagacgtacgagtttgtgcagcggatgcgggacgcatacgggcggctggacaagacggagatgagcatctgggagtgcatcgagcttctcaacgagttcatcgacgacagcgaccctgacctggacatgccgcagatcgagcacctcctccagaccgccgaggccatccgcaaggactaccccgatgaggactggctccacctcactggcctcatccatgatctgggcaaggtgctgctgcatcccagcttcggggagcttcctcagtgggcagtcgtaggtgacaccttccccgtcggctgcgcgttcgacgaatgcaacgtccacttcaagtacttcaaggagaaccctgactaccacaacccggagttcaacaccaagttcggggtctactccgaggggtgcgggctggacaacgtgctcatgtcatggggccatgacgactacatgtgcctggttgccaaggagaacaagaccacccttccttccgcagggctgttcatcatcagataccactccttctaccccctgcacaagcatggagcctacatgcacctgatgaacgaggaggacaaggagaacctcaaatggctgcacgtcttcaacaagtatgacctgtacagcaagagcagcgtcaggatcgacgtcgaggaagtgaagccctactacatgtcgctcatcgacaagtacttcccggggaagctgcgatggtgaggaggccgcacccagacagggaacggagcccagacaacatattatatagtttatttaccttcgaaagc

SEQ ID NO: 62782 - protein, 339 aa, Triticum aestivum
  peptide (1)..(339): Ceres Seq. ID no. 14302416
  misc_feature (83)..(339): Pfam Name: Family of unknown function (DUF706) Pfam Description: Family of unknown function (DUF706)
  misc_feature (98)..(339): Homolog of NCBI NO: 13877657 NR Description: Unknown protein [Arabidopsis thaliana]
  misc_feature (37)..(339): Homolog of NCBI NO: 15241891 NR Description: expressed protein [Arabidopsis thaliana]
  misc_feature (37)..(339): Homolog of NCBI NO: 21536858 NR Description: unknown [Arabidopsis thaliana]
  misc_feature (37)..(339): Homolog of NCBI NO: 21554393 NR Description: unknown [Arabidopsis thaliana]
  misc_feature (37)..(339): Homolog of NCBI NO: 18399158 NR Description: expressed protein [Arabidopsis thaliana]
  misc_feature (37)..(339): Homolog of NCBI NO: 7487428 NR Description: hypothetical protein T25K17.70 - Arabidopsis
  misc_feature (37)..(339): Homolog of NCBI NO: 30687167 NR Description: expressed protein [Arabidopsis thaliana]
  misc_feature (37)..(331): Homolog of NCBI NO: 7262695 NR Description: Strong similarity to an unknown protein from
  misc_feature (37)..(339): Homolog of NCBI NO: 26451656 NR Description: unknown protein [Arabidopsis thaliana]
  misc_feature (37)..(339): Homolog of NCBI NO: 30683840 NR Description: expressed protein [Arabidopsis thaliana]
RAEPSIPHLLPSSRTVLPCRPRCCCELRSAIFSRFKMTIIIEQPQFDAAAERKVAGDPAELVLDGGFTVPDSNAFGHTFRDYDAESERKKTVEEFYRVNHINQTYEFVQRMRDAYGRLDKTEMSIWECIELLNEFIDDSDPDLDMPQIEHLLQTAEAIRKDYPDEDWLHLTGLIHDLGKVLLHPSFGELPQWAVVGDTFPVGCAFDECNVHFKYFKENPDYHNPEFNTKFGVYSEGCGLDNVLMSWGHDDYMCLVAKENKTTLPSAGLFIIRYHSFYPLHKHGAYMHLMNEEDKENLKWLHVFNKYDLYSKSSVRIDVEEVKPYYMSLIDKYFPGKLRW

SEQ ID NO: 62783 - protein, 303 aa, Triticum aestivum
  peptide (1)..(303): Ceres Seq. ID no. 14302417
  misc_feature (47)..(303): Pfam Name: Family of unknown function (DUF706) Pfam Description: Family of unknown function (DUF706)
  misc_feature (62)..(303): Homolog of NCBI NO: 13877657 NR Description: Unknown protein [Arabidopsis thaliana]
  misc_feature (1)..(303): Homolog of NCBI NO: 15241891 NR Description: expressed protein [Arabidopsis thaliana]
  misc_feature (1)..(303): Homolog of NCBI NO: 21536858 NR Description: unknown [Arabidopsis thaliana]
  misc_feature (1)..(303): Homolog of NCBI NO: 21554393 NR Description: unknown [Arabidopsis thaliana]
  misc_feature (1)..(303): Homolog of NCBI NO: 18399158 NR Description: expressed protein [Arabidopsis thaliana]
  misc_feature (1)..(303): Homolog of NCBI NO: 7487428 NR Description: hypothetical protein T25K17.70 - Arabidopsis
  misc_feature (1)..(303): Homolog of NCBI NO: 30687167 NR Description: expressed protein [Arabidopsis thaliana]
  misc_feature (1)..(295): Homolog of NCBI NO: 7262695 NR Description: Strong similarity to an unknown protein from
  misc_feature (1)..(303): Homolog of NCBI NO: 26451656 NR Description: unknown protein [Arabidopsis thaliana]
  misc_feature (1)..(303): Homolog of NCBI NO: 30683840 NR Description: expressed protein [Arabidopsis thaliana]
MTIIIEQPQFDAAAERKVAGDPAELVLDGGFTVPDSNAFGHTFRDYDAESERKKTVEEFYRVNHINQTYEFVQRMRDAYGRLDKTEMSIWECIELLNEFIDDSDPDLDMPQIEHLLQTAEAIRKDYPDEDWLHLTGLIHDLGKVLLHPSFGELPQWAVVGDTFPVGCAFDECNVHFKYFKENPDYHNPEFNTKFGVYSEGCGLDNVLMSWGHDDYMCLVAKENKTTLPSAGLFIIRYHSFYPLHKHGAYMHLMNEEDKENLKWLHVFNKYDLYSKSSVRIDVEEVKPYYMSLIDKYFPGKLRW

SEQ ID NO: 62784 - protein, 229 aa, Triticum aestivum
  peptide (1)..(229): Ceres Seq. ID no. 14302418
  misc_feature (1)..(229): Pfam Name: Family of unknown function (DUF706) Pfam Description: Family of unknown function (DUF706)
  misc_feature (1)..(229): Homolog of NCBI NO: 13877657 NR Description: Unknown protein [Arabidopsis thaliana]
  misc_feature (1)..(229): Homolog of NCBI NO: 15241891 NR Description: expressed protein [Arabidopsis thaliana]
  misc_feature (1)..(229): Homolog of NCBI NO: 21536858 NR Description: unknown [Arabidopsis thaliana]
  misc_feature (1)..(229): Homolog of NCBI NO: 21554393 NR Description: unknown [Arabidopsis thaliana]
  misc_feature (1)..(229): Homolog of NCBI NO: 18399158 NR Description: expressed protein [Arabidopsis thaliana]
  misc_feature (1)..(229): Homolog of NCBI NO: 7487428 NR Description: hypothetical protein T25K17.70 - Arabidopsis
  misc_feature (1)..(229): Homolog of NCBI NO: 30687167 NR Description: expressed protein [Arabidopsis thaliana]
  misc_feature (1)..(221): Homolog of NCBI NO: 7262695 NR Description: Strong similarity to an unknown protein from
  misc_feature (1)..(229): Homolog of NCBI NO: 26451656 NR Description: unknown protein [Arabidopsis thaliana]
  misc_feature (1)..(229): Homolog of NCBI NO: 30683840 NR Description: expressed protein [Arabidopsis thaliana]
MRDAYGRLDKTEMSIWECIELLNEFIDDSDPDLDMPQIEHLLQTAEAIRKDYPDEDWLHLTGLIHDLGKVLLHPSFGELPQWAVVGDTFPVGCAFDECNVHFKYFKENPDYHNPEFNTKFGVYSEGCGLDNVLMSWGHDDYMCLVAKENKTTLPSAGLFIIRYHSFYPLHKHGAYMHLMNEEDKENLKWLHVFNKYDLYSKSSVRIDVEEVKPYYMSLIDKYFPGKLRW

SEQ ID NO: 62785 - DNA, 1570 bp, Triticum aestivum
  misc_feature (1)..(1570): Ceres Seq. ID no. 13596872
aaaaccctagagaaaccccgagccaagcacgacaccagatggcctccgccggcggcaagcccaacgccaacaccggcggcgacaccaaggggaggaagcgcaagttcctgccccacggcaagccggtgcggaagggcgcgtacccgctgcgccccggcgtgcagggcttcttcatcacctgcgacggcggccgcgagcaccaggccacccgtgaggcgatctccctcctggacaccttttacgaggacctggttgacgggaaagtatttgatgagaagcccaagagcatccctgacaagccgctgaacaaaaaaataaagtttgaggactctgattcctctgatgatgaggatgaaggtcattcagtggaggaggctgacaatggaaatgatgtagaaaaaggtgaagcaaagtcatctgagcagcaacaagaggtacctggtgccttggaagttgtcagcaaggaggatgaagaacaagttgaaactgccgacggatcagcgccaaagaaacaacgtatagaagatcctttggtttctgaacagacagaaccaaaagtgcccactgatgaaccaacagagactactgatgataagccaaaggagtccactgataaaccagcagagactactgatgataagccaaaagagtccactgataagccagcagagactactgatgataagccaaaagagtccactgataaaccaacagagactagtgataaaccaaaagcgtccaacgataaaccaaaagagttcactggtaaaccaaaagcgtccaatgacatacctattgatgatttaattgatgaggacctgaaacaactgggggacaggaaaaagaggctgtttgcaagcgtcgattccggttgcaatggttgcatcttcattcaaatgcacaaaagaggtggagaccctggtccagttgagattgtacaaaacatgatgtcttcggctgcttcaactcgtaaacatatgtccaggtttattctgagggtgttgcctgctgaggtggtatgttatgcttcagaagaggaaataacaagagccgttactccacttgttgaaaagtacttccccaaagaatctccttcgggacataagtttgctgtgttatacgaagcaaggtcaaacacaggaatcgatagaatgaaaattataaatgcagtagcaaaatctatacctcaacctcacaaagttgacctcagcaaccccgacaagactattattgtccagattgccaagactatatgcatgattggagtggtggagagatacaaagagctttcgaagttcaacctaaggcagctgacctcgccaccggagaagtagtttctgcgtgacaaattcttcctcctggttgagttttaagcagatgcagcatcagttggttactacgagtagctaccgtgaaagtcattgccaaatgattcaggtgtattatgccgttaaaacagatggccattgtcgtgtggatgcatcctgaatcgcttgcttaatgccgtatggtgcaattttggaacctgttgaatttcctacagcgatcgttggaataaagggttaattag

SEQ ID NO: 62786 - protein, 443 aa, Triticum aestivum
  peptide (1)..(443): Ceres Seq. ID no. 13596873
  misc_feature (332)..(424): Pfam Name: THUMP domain Pfam Description: THUMP domain
  misc_feature (250)..(442): Homolog of NCBI NO: 34365206 NR Description: hypothetical protein [Homo sapiens]
  misc_feature (243)..(437): Homolog of NCBI NO: 21704176 NR Description: RIKEN cDNA 6330575P11 [Mus musculus]
  misc_feature (243)..(437): Homolog of NCBI NO: 34859071 NR Description: similar to RIKEN cDNA 6330575P11 [Rattus
  misc_feature (282)..(442): Homolog of NCBI NO: 2988398 NR Description: Unknown gene product [Homo sapiens]
  misc_feature (271)..(443): Homolog of NCBI NO: 38174056 NR Description: Unknown (protein for MGC:75804) [Silurana
  misc_feature (250)..(442): Homolog of NCBI NO: 12653357 NR Description: hypothetical protein FLJ20274 [Homo sapiens]
  misc_feature (250)..(442): Homolog of NCBI NO: 8923247 NR Description: hypothetical protein FLJ20274 [Homo sapiens]
  misc_feature (227)..(443): Homolog of NCBI NO: 24657540 NR Description: CG15014-PA [Drosophila melanogaster]
  misc_feature (24)..(244): Homolog of NCBI NO: 18416857 NR Description: expressed protein [Arabidopsis thaliana]
  misc_feature (155)..(439): Homolog of NCBI NO: 18416857 NR Description: expressed protein [Arabidopsis thaliana]
NPRETPSQARHQMASAGGKPNANTGGDTKGRKRKFLPHGKPVRKGAYPLRPGVQGFFITCDGGREHQATREAISLLDTFYEDLVDGKVFDEKPKSIPDKPLNKKIKFEDSDSSDDEDEGHSVEEADNGNDVEKGEAKSSEQQQEVPGALEVVSKEDEEQVETADGSAPKKQRIEDPLVSEQTEPKVPTDEPTETTDDKPKESTDKPAETTDDKPKESTDKPAETTDDKPKESTDKPTETSDKPKASNDKPKEFTGKPKASNDIPIDDLIDEDLKQLGDRKKRLFASVDSGCNGCIFIQMHKRGGDPGPVEIVQNMMSSAASTRKHMSRFILRVLPAEVVCYASEEEITRAVTPLVEKYFPKESPSGHKFAVLYEARSNTGIDRMKIINAVAKSIPQPHKVDLSNPDKTIIVQIAKTICMIGVVERYKELSKFNLRQLTSPPEK

SEQ ID NO: 62787 - protein, 431 aa, Triticum aestivum
  peptide (1)..(431): Ceres Seq. ID no. 13596874
  misc_feature (320)..(412): Pfam Name: THUMP domain Pfam Description: THUMP domain
  misc_feature (238)..(430): Homolog of NCBI NO: 34365206 NR Description: hypothetical protein [Homo sapiens]
  misc_feature (231)..(425): Homolog of NCBI NO: 21704176 NR Description: RIKEN cDNA 6330575P11 [Mus musculus]
  misc_feature (231)..(425): Homolog of NCBI NO: 34859071 NR Description: similar to RIKEN cDNA 6330575P11 [Rattus
  misc_feature (270)..(430): Homolog of NCBI NO: 2988398 NR Description: Unknown gene product [Homo sapiens]
  misc_feature (259)..(431): Homolog of NCBI NO: 38174056 NR Description: Unknown (protein for MGC:75804) [Silurana
  misc_feature (238)..(430): Homolog of NCBI NO: 12653357 NR Description: hypothetical protein FLJ20274 [Homo sapiens]
  misc_feature (238)..(430): Homolog of NCBI NO: 8923247 NR Description: hypothetical protein FLJ20274 [Homo sapiens]
  misc_feature (215)..(431): Homolog of NCBI NO: 24657540 NR Description: CG15014-PA [Drosophila melanogaster]
  misc_feature (12)..(232): Homolog of NCBI NO: 18416857 NR Description: expressed protein [Arabidopsis thaliana]
  misc_feature (143)..(427): Homolog of NCBI NO: 18416857 NR Description: expressed protein [Arabidopsis thaliana]
MASAGGKPNANTGGDTKGRKRKFLPHGKPVRKGAYPLRPGVQGFFITCDGGREHQATREAISLLDTFYEDLVDGKVFDEKPKSIPDKPLNKKIKFEDSDSSDDEDEGHSVEEADNGNDVEKGEAKSSEQQQEVPGALEVVSKEDEEQVETADGSAPKKQRIEDPLVSEQTEPKVPTDEPTETTDDKPKESTDKPAETTDDKPKESTDKPAETTDDKPKESTDKPTETSDKPKASNDKPKEFTGKPKASNDIPIDDLIDEDLKQLGDRKKRLFASVDSGCNGCIFIQMHKRGGDPGPVEIVQNMMSSAASTRKHMSRFILRVLPAEVVCYASEEEITRAVTPLVEKYFPKESPSGHKFAVLYEARSNTGIDRMKIINAVAKSIPQPHKVDLSNPDKTIIVQIAKTICMIGVVERYKELSKFNLRQLTSPPEK

SEQ ID NO: 62788 - DNA, 1478 bp, Triticum aestivum
  misc_feature (1)..(1478): Ceres Seq. ID no. 14314092
ctcacccacactcacgctcgcacccacaccaccggccggccgcccgcgtctgtcaaccgaaagcagcacagcgcccccacggtcggtctacatctactacccaccgcctggttctcctccgaaaccacgcccgtctactagttgtgtgccgatcgaactagcgcgtacgtgaaaaatgcaccgccagatggccgcgccggtggctgccgctgtggcgtgggcgccgctgctgctggtgctgctctgggcggcggggtgcgcgggccaggcgctggtgccgggcgtgatgatcttcggggactcggtggtggacgccggcaacaacaaccggctggccacgctggtgcgcgccgacttcccgccctacggccgcgacttcccggccacccacgcgcccaccggccgcttctgcaacggcaagctcgccaccgactacaccgtggagagcctggggctcagctcgtacccgccggcgtacctgagcgaggaggcgcagagcgacaacaggaccctcctccacggcgccaacttcgcctccggcgccgccggctacctcgacgccaccgccgcgctctacggcgccatctcgctggggcggcagctggactacttcaaggagtaccagtccaaggtggcggcggtggccggcgagaagcgcgcggcggcgctcacgtccgggtccatctacgtggtgagcgccgggacgagcgactacgtgcagaactactacgtgaacgccatgctggccgccgcctacacccccgaccagttcgccgacgcgctcatgcagccattcacggccttcgtcgagaggctgtacgggctgggagcgcggcggatcggggtgacgtcgctgccgcccatggggtgcctgccggcgtccgtcaccctcttcggcggcggcggcgggggcggctgcgtggagcggctcaacaacgactccctcaccttcaacgccaagctgcaggcggcgtcggacgcggccaagaagcgccactcggacctcaagctcgtcgtcttcgacatctacaacccgctcctcaacctcgtcgccgaccccatgagcgccgggttcttcgagtctcggcgcgcgtgctgtgggacggggaccatcgagacgtcggtgctgtgccaccagggggcgccggggacgtgcgccaacgccaccggctacgtcttctgggacggcttccaccccaccgacgccgccaacaaggtgctcgccgacgcgctgctcctccagggactccagctcatctcctagctagctgctcagtccttcctcgccgctccaatggcgctctgacaccgcaccgaccgtcttgtgcatgtctgtccgtttacctcctggcttttcttgcttgtcatctctactaccggatcatctctcctgctgttttgtttgctttcaactactactgtgtttccgtgcttttgtgtgatgtgaatgtgatccgtaatgtgatatagcggcactc

SEQ ID NO: 62789 - protein, 362 aa, Triticum aestivum
  peptide (1)..(362): Ceres Seq. ID no. 14314093
  misc_feature (37)..(353): Pfam Name: GDSL-like Lipase/Acylhydrolase Pfam Description: GDSL-like Lipase/Acylhydrolase
  misc_feature (18)..(300): Homolog of NCBI NO: 11280580 NR Description: hypothetical protein T4D2.30 - Arabidopsis
  misc_feature (18)..(362): Homolog of NCBI NO: 10638955 NR Description: putative proline-rich protein APG isolog [Cicer
  misc_feature (38)..(361): Homolog of NCBI NO: 2062167 NR Description: Proline-rich protein APG isolog [Arabidopsis
  misc_feature (33)..(361): Homolog of NCBI NO: 15228189 NR Description: GDSL-motif lipase/hydrolase protein [Arabidopsis
  misc_feature (18)..(362): Homolog of NCBI NO: 30693763 NR Description: GDSL-motif lipase/hydrolase protein [Arabidopsis
  misc_feature (31)..(362): Homolog of NCBI NO: 15237137 NR Description: lipase, putative [Arabidopsis thaliana]
  misc_feature (41)..(362): Homolog of NCBI NO: 15237528 NR Description: GDSL-motif lipase/hydrolase protein [Arabidopsis
  misc_feature (19)..(362): Homolog of NCBI NO: 15237531 NR Description: GDSL-motif lipase/hydrolase protein [Arabidopsis
  misc_feature (18)..(362): Homolog of NCBI NO: 9758010 NR Description: proline-rich protein APG-like [Arabidopsis
  misc_feature (9)..(362): Homolog of NCBI NO: 13174242 NR Description: putative proline-rich protein [Oryza sativa]
MHRQMAAPVAAAVAWAPLLLVLLWAAGCAGQALVPGVMIFGDSVVDAGNNNRLATLVRADFPPYGRDFPATHAPTGRFCNGKLATDYTVESLGLSSYPPAYLSEEAQSDNRTLLHGANFASGAAGYLDATAALYGAISLGRQLDYFKEYQSKVAAVAGEKRAAALTSGSIYVVSAGTSDYVQNYYVNAMLAAAYTPDQFADALMQPFTAFVERLYGLGARRIGVTSLPPMGCLPASVTLFGGGGGGGCVERLNNDSLTFNAKLQAASDAAKKRHSDLKLVVFDIYNPLLNLVADPMSAGFFESRRACCGTGTIETSVLCHQGAPGTCANATGYVFWDGFHPTDAANKVLADALLLQGLQLIS

SEQ ID NO: 62790 - protein, 358 aa, Triticum aestivum
  peptide (1)..(358): Ceres Seq. ID no. 14314094
  misc_feature (33)..(349): Pfam Name: GDSL-like Lipase/Acylhydrolase Pfam Description: GDSL-like Lipase/Acylhydrolase
  misc_feature (14)..(296): Homolog of NCBI NO: 11280580 NR Description: hypothetical protein T4D2.30 - Arabidopsis
  misc_feature (14)..(358): Homolog of NCBI NO: 10638955 NR Description: putative proline-rich protein APG isolog [Cicer
  misc_feature (34)..(357): Homolog of NCBI NO: 2062167 NR Description: Proline-rich protein APG isolog [Arabidopsis
  misc_feature (29)..(357): Homolog of NCBI NO: 15228189 NR Description: GDSL-motif lipase/hydrolase protein [Arabidopsis
  misc_feature (14)..(358): Homolog of NCBI NO: 30693763 NR Description: GDSL-motif lipase/hydrolase protein [Arabidopsis
  misc_feature (27)..(358): Homolog of NCBI NO: 15237137 NR Description: lipase, putative [Arabidopsis thaliana]
  misc_feature (37)..(358): Homolog of NCBI NO: 15237528 NR Description: GDSL-motif lipase/hydrolase protein [Arabidopsis
  misc_feature (15)..(358): Homolog of NCBI NO: 15237531 NR Description: GDSL-motif lipase/hydrolase protein [Arabidopsis
  misc_feature (14)..(358): Homolog of NCBI NO: 9758010 NR Description: proline-rich protein APG-like [Arabidopsis
  misc_feature (5)..(358): Homolog of NCBI NO: 13174242 NR Description: putative proline-rich protein [Oryza sativa]
MAAPVAAAVAWAPLLLVLLWAAGCAGQALVPGVMIFGDSVVDAGNNNRLATLVRADFPPYGRDFPATHAPTGRFCNGKLATDYTVESLGLSSYPPAYLSEEAQSDNRTLLHGANFASGAAGYLDATAALYGAISLGRQLDYFKEYQSKVAAVAGEKRAAALTSGSIYVVSAGTSDYVQNYYVNAMLAAAYTPDQFADALMQPFTAFVERLYGLGARRIGVTSLPPMGCLPASVTLFGGGGGGGCVERLNNDSLTFNAKLQAASDAAKKRHSDLKLVVFDIYNPLLNLVADPMSAGFFESRRACCGTGTIETSVLCHQGAPGTCANATGYVFWDGFHPTDAANKVLADALLLQGLQLIS

SEQ ID NO: 62791 - protein, 325 aa, Triticum aestivum
  peptide (1)..(325): Ceres Seq. ID no. 14314095
  misc_feature (1)..(316): Pfam Name: GDSL-like Lipase/Acylhydrolase Pfam Description: GDSL-like Lipase/Acylhydrolase
  misc_feature (1)..(263): Homolog of NCBI NO: 11280580 NR Description: hypothetical protein T4D2.30 - Arabidopsis
  misc_feature (1)..(325): Homolog of NCBI NO: 10638955 NR Description: putative proline-rich protein APG isolog [Cicer
  misc_feature (1)..(324): Homolog of NCBI NO: 2062167 NR Description: Proline-rich protein APG isolog [Arabidopsis
  misc_feature (1)..(324): Homolog of NCBI NO: 15228189 NR Description: GDSL-motif lipase/hydrolase protein [Arabidopsis
  misc_feature (1)..(325): Homolog of NCBI NO: 30693763 NR Description: GDSL-motif lipase/hydrolase protein [Arabidopsis
  misc_feature (1)..(325): Homolog of NCBI NO: 15237137 NR Description: lipase, putative [Arabidopsis thaliana]
  misc_feature (4)..(325): Homolog of NCBI NO: 15237528 NR Description: GDSL-motif lipase/hydrolase protein [Arabidopsis
  misc_feature (1)..(325): Homolog of NCBI NO: 15237531 NR Description: GDSL-motif lipase/hydrolase protein [Arabidopsis
  misc_feature (1)..(325): Homolog of NCBI NO: 9758010 NR Description: proline-rich protein APG-like [Arabidopsis
  misc_feature (1)..(325): Homolog of NCBI NO: 13174242 NR Description: putative proline-rich protein [Oryza sativa]
MIFGDSVVDAGNNNRLATLVRADFPPYGRDFPATHAPTGRFCNGKLATDYTVESLGLSSYPPAYLSEEAQSDNRTLLHGANFASGAAGYLDATAALYGAISLGRQLDYFKEYQSKVAAVAGEKRAAALTSGSIYVVSAGTSDYVQNYYVNAMLAAAYTPDQFADALMQPFTAFVERLYGLGARRIGVTSLPPMGCLPASVTLFGGGGGGGCVERLNNDSLTFNAKLQAASDAAKKRHSDLKLVVFDIYNPLLNLVADPMSAGFFESRRACCGTGTIETSVLCHQGAPGTCANATGYVFWDGFHPTDAANKVLADALLLQGLQLIS

SEQ ID NO: 62792 - DNA, 1534 bp, Triticum aestivum
  misc_feature (1)..(1534): Ceres Seq. ID no. 12778345
ataccgctcccatctcacacaacccccttaaaccccagaagcctccatccgcggcgcccccaacgaaaaccctagcccgccatggccctcgcgctccgcctccgtcgggccctcgccgccgcctccacctccgcatccctcctccgtccgactgcctccgccgcggcatccccccatcgggctcccctcctcgcccctttcgtcgcgccgctgccgcgcccgttcctccccgggggcgccgccggcttccggtcgacggcggcggcagcggcacggggaaactacggcggtggggcggacgacgccaaaatcgaccccgacgagatcctcttcgaggggtgcgactacaaccactggctcatcaccatggagttccccgaccccaagccctcccgcgaggagatgatcgagacctacctgcagaccctcgccaaggtcgtcggaagttatgaggaggctaagaagaggatgtatgctcttagtacaacaacatatgttgggtttcaagctgtaatgactgaggaaatgtcagaaaagtttcgcggattgcctggagttgtttttatcttgcctgattcatatttatacccagagacaaaggagtatggaggagacaaatacgagaatggtgtcataactccaagaccaccacctgttcagtatagcaaaccgtcaaggaatgatagaaaccgcaactgtcgtggaaattacgaaaacagtcctccaccgcaaggtaattaccagaacaggtcgccaccacaaggaaacttccaagggtcccgcccacagcaagacgtaagaggctacgctccacagcagaattacgcacaagctgggcaagatggtagaggttatgggaggaatgattctgccgaccatccaggttacaatgcgcctggtgggtaccaagggcgtgtaaatgaagccggtcaaggtttccaagatccacaagagcgcaggagtttctcgcaaggacaggaaggagatctcaggcctggtggcccttcagcacctggaaattatggtcaaccgcctgcacctggaaattatggtcaaccacctgcacctggaaattacggtcaaccgcctgcacctggaaattatggtcaaccacctgctcctggatcctatgggaagccatctggacctccagcttatggacaaccgtctgggtcgagatatcctggaggtaaccaagggggtcctggttatggtggagacaacagacagggtgcagcgcctgcatatggaggggataacttgcaaggggtttctggtcagtatcctagcccaggtgaaggacaacaagggaactggcagggtaggcagtaaggacctgatgagaagtagcttcacttaagaacaaggcattagttcctctacttgaaatgtagaaatttccacctgtaaaataaacagctgaactactttattttgtcttgttgcctgcattcacatcagacttattattgatgtgcgttactatctcttgtagccatatatttgacgtttggaaaggcttgtggagtctggc

SEQ ID NO: 62793 - protein, 416 aa, Triticum aestivum
  peptide (1)..(416): Ceres Seq. ID no. 12778346
  misc_feature (208)..(416): Pfam Name: High molecular weight glutenin subunit Pfam Description: High molecular weight glutenin subunit
  misc_feature (1)..(207): Homolog of NCBI NO: 34897972 NR Description: putative plastid protein [Oryza sativa (japonica
  misc_feature (79)..(229): Homolog of NCBI NO: 15230785 NR Description: DAG protein, putative; protein id: At3g06790.1
  misc_feature (79)..(229): Homolog of NCBI NO: 27754695 NR Description: putative DAG protein [Arabidopsis thaliana]
  misc_feature (14)..(227): Homolog of NCBI NO: 6014904 NR Description: DAG PROTEIN, CHLOROPLAST PRECURSOR
  misc_feature (1)..(391): Homolog of NCBI NO: 18400602 NR Description: expressed protein
  misc_feature (15)..(226): Homolog of NCBI NO: 21593052 NR Description: DAG protein, putative [Arabidopsis thaliana]
  misc_feature (15)..(226): Homolog of NCBI NO: 15220382 NR Description: DAG protein, putative
  misc_feature (39)..(416): Homolog of NCBI NO: 15241580 NR Description: unknown protein; protein id: At5g44780.1
  misc_feature (10)..(216): Homolog of NCBI NO: 38636775 NR Description: putative DAG protein [Oryza sativa (japonica
  misc_feature (6)..(383): Homolog of NCBI NO: 15235263 NR Description: DAG-like protein; protein id: At4g20020.1
MALALRLRRALAAASTSASLLRPTASAAASPHRAPLLAPFVAPLPRPFLPGGAAGFRSTAAAAARGNYGGGADDAKIDPDEILFEGCDYNHWLITMEFPDPKPSREEMIETYLQTLAKVVGSYEEAKKRMYALSTTTYVGFQAVMTEEMSEKFRGLPGVVFILPDSYLYPETKEYGGDKYENGVITPRPPPVQYSKPSRNDRNRNCRGNYENSPPPQGNYQNRSPPQGNFQGSRPQQDVRGYAPQQNYAQAGQDGRGYGRNDSADHPGYNAPGGYQGRVNEAGQGFQDPQERRSFSQGQEGDLRPGGPSAPGNYGQPPAPGNYGQPPAPGNYGQPPAPGNYGQPPAPGSYGKPSGPPAYGQPSGSRYPGGNQGGPGYGGDNRQGAAPAYGGDNLQGVSGQYPSPGEGQQGNWQGRQ

SEQ ID NO: 62794 - protein, 321 aa, Triticum aestivum
  peptide (1)..(321): Ceres Seq. ID no. 12778347
  misc_feature (113)..(321): Pfam Name: High molecular weight glutenin subunit Pfam Description: High molecular weight glutenin subunit
  misc_feature (1)..(112): Homolog of NCBI NO: 34897972 NR Description: putative plastid protein [Oryza sativa (japonica
  misc_feature (1)..(134): Homolog of NCBI NO: 15230785 NR Description: DAG protein, putative; protein id: At3g06790.1
  misc_feature (1)..(134): Homolog of NCBI NO: 27754695 NR Description: putative DAG protein [Arabidopsis thaliana]
  misc_feature (1)..(132): Homolog of NCBI NO: 6014904 NR Description: DAG PROTEIN, CHLOROPLAST PRECURSOR
  misc_feature (1)..(296): Homolog of NCBI NO: 18400602 NR Description: expressed protein
  misc_feature (1)..(131): Homolog of NCBI NO: 21593052 NR Description: DAG protein, putative [Arabidopsis thaliana]
  misc_feature (1)..(131): Homolog of NCBI NO: 15220382 NR Description: DAG protein, putative
  misc_feature (1)..(321): Homolog of NCBI NO: 15241580 NR Description: unknown protein; protein id: At5g44780.1
  misc_feature (1)..(121): Homolog of NCBI NO: 38636775 NR Description: putative DAG protein [Oryza sativa (japonica
  misc_feature (1)..(288): Homolog of NCBI NO: 15235263 NR Description: DAG-like protein; protein id: At4g20020.1
MEFPDPKPSREEMIETYLQTLAKVVGSYEEAKKRMYALSTTTYVGFQAVMTEEMSEKFRGLPGVVFILPDSYLYPETKEYGGDKYENGVITPRPPPVQYSKPSRNDRNRNCRGNYENSPPPQGNYQNRSPPQGNFQGSRPQQDVRGYAPQQNYAQAGQDGRGYGRNDSADHPGYNAPGGYQGRVNEAGQGFQDPQERRSFSQGQEGDLRPGGPSAPGNYGQPPAPGNYGQPPAPGNYGQPPAPGNYGQPPAPGSYGKPSGPPAYGQPSGSRYPGGNQGGPGYGGDNRQGAAPAYGGDNLQGVSGQYPSPGEGQQGNWQGRQ

SEQ ID NO: 62795 - protein, 309 aa, Triticum aestivum
  peptide (1)..(309): Ceres Seq. ID no. 12778348
  misc_feature (101)..(309): Pfam Name: High molecular weight glutenin subunit Pfam Description: High molecular weight glutenin subunit
  misc_feature (1)..(100): Homolog of NCBI NO: 34897972 NR Description: putative plastid protein [Oryza sativa (japonica
  misc_feature (1)..(122): Homolog of NCBI NO: 15230785 NR Description: DAG protein, putative; protein id: At3g06790.1
  misc_feature (1)..(122): Homolog of NCBI NO: 27754695 NR Description: putative DAG protein [Arabidopsis thaliana]
  misc_feature (1)..(120): Homolog of NCBI NO: 6014904 NR Description: DAG PROTEIN, CHLOROPLAST PRECURSOR
  misc_feature (1)..(284): Homolog of NCBI NO: 18400602 NR Description: expressed protein
  misc_feature (1)..(119): Homolog of NCBI NO: 21593052 NR Description: DAG protein, putative [Arabidopsis thaliana]
  misc_feature (1)..(119): Homolog of NCBI NO: 15220382 NR Description: DAG protein, putative
  misc_feature (1)..(309): Homolog of NCBI NO: 15241580 NR Description: unknown protein; protein id: At5g44780.1
  misc_feature (1)..(109): Homolog of NCBI NO: 38636775 NR Description: putative DAG protein [Oryza sativa (japonica
  misc_feature (1)..(276): Homolog of NCBI NO: 15235263 NR Description: DAG-like protein; protein id: At4g20020.1
MIETYLQTLAKVVGSYEEAKKRMYALSTTTYVGFQAVMTEEMSEKFRGLPGVVFILPDSYLYPETKEYGGDKYENGVITPRPPPVQYSKPSRNDRNRNCRGNYENSPPPQGNYQNRSPPQGNFQGSRPQQDVRGYAPQQNYAQAGQDGRGYGRNDSADHPGYNAPGGYQGRVNEAGQGFQDPQERRSFSQGQEGDLRPGGPSAPGNYGQPPAPGNYGQPPAPGNYGQPPAPGNYGQPPAPGSYGKPSGPPAYGQPSGSRYPGGNQGGPGYGGDNRQGAAPAYGGDNLQGVSGQYPSPGEGQQGNWQGRQ

SEQ ID NO: 62796 - DNA, 1236 bp, Triticum aestivum
  misc_feature (1)..(1236): Ceres Seq. ID no. 13654922
acctaccccagtggccagccctatagacgacttcctgtctccttccggcggccacctccgtccatcgctctccgccgccgccgccacccggactctaaatcccttgctcctctccaccggaaaccttgaccggccgaggaggcagcacattcacaccggcggcgtgatctggtctggtctgctagattgatcgttcattcactccattgatgacgctctctgcttccccgcactccccgccgccgtctacctcccggcccccgctcctctcctggcccagctagccagccggcgcgagcgagcgagctccccgtccaccgtccagctattagccaagctccttcgaggccggcaatggcggcgcccaggcccaagtccccgctcgacccctgcggccgccaccggctgcagctcgccgtcgacgcgctccaccgccagatcagcttcctcgagggggagatcagttccattgaagggctccatgctgcctccatatgctgcaaagaggtcgatgagttcataggaaagaatgccgatccattcatcacgatttcatctgagaagggaaatgctgatcaatctcatcgcttcccaaagaagattcgaacccggtgggcgtgtttgagctgcttcccgtggatctgcggcggcgggtgctccgccgtccagctcaaggggccgagctgctgctgcggatgcccccgttgctgcgtggggagcgggggctgcggcggcggaccctcgtgtggctgctcatgctcctgcgccggttgctcctcctcttgcgcgtgccctgcctgcgccggctgcggcgccgcgtgctgcggcggtgcccctcgccctcgctgctgcctgtgttcatgaggcgccctattgagatttttcctcttctttgttcttgctgtgtgcgttgcctgtaggctcaggctcggctggtgtttttgacgggcatgatgatgatgatgtatttctggctcagttggcgctgtggatttgcctggttttacttgccacagcgatggatcccttgtgctttcgtccttgctatagtctcctatgttgtaattaaaggtttggagataactgcagaatgaacggttcttctcnnaaaaaaaaaaaaaaaaaaaaaaaaaaaaaaaaaaaaaaaaaaaaaaaaaaaaaaaaaaaaaaaaaaaaaaaacccaaaaaaaaaaaaaaaaagttttttgaatcgggggaacttggggggggggcggg

SEQ ID NO: 62797 - protein, 169 aa, Triticum aestivum
  peptide (1)..(169): Ceres Seq. ID no. 13654923
  misc_feature (92)..(156): Pfam Name: Chorion protein Pfam Description: Chorion protein
  misc_feature (96)..(168): Homolog of NCBI NO: 116295 NR Description: CHORION CLASS HIGH-CYSTEINE HCA PROTEIN 12
  misc_feature (96)..(168): Homolog of NCBI NO: 102922 NR Description: high-cysteine chorion A 12 protein precursor -
  misc_feature (96)..(169): Homolog of NCBI NO: 225150 NR Description: chorion protein B11
  misc_feature (89)..(166): Homolog of NCBI NO: 225150 NR Description: chorion protein B11
  misc_feature (97)..(166): Homolog of NCBI NO: 20853287 NR Description: hypothetical protein XP_147288 [Mus musculus]
  misc_feature (88)..(168): Homolog of NCBI NO: 34147131 NR Description: RIKEN cDNA A030003K21 [Mus musculus]
  misc_feature (92)..(159): Homolog of NCBI NO: 6015487 NR Description: Hc-B chorion protein [Bombyx mori]
  misc_feature (92)..(159): Homolog of NCBI NO: 116298 NR Description: CHORION CLASS HIGH-CYSTEINE HCB PROTEIN 13
  misc_feature (96)..(168): Homolog of NCBI NO: 225134 NR Description: chorion protein A14
  misc_feature (2)..(51): Homolog of NCBI NO: 30017557 NR Description: hypothetical protein [Oryza sativa (japonica
MAAPRPKSPLDPCGRHRLQLAVDALHRQISFLEGEISSIEGLHAASICCKEVDEFIGKNADPFITISSEKGNADQSHRFPKKIRTRWACLSCFPWICGGGCSAVQLKGPSCCCGCPRCCVGSGGCGGGPSCGCSCSCAGCSSSCACPACAGCGAACCGGAPRPRCCLCS

SEQ ID NO: 62798 - DNA, 1534 bp, Triticum aestivum
  misc_feature (1)..(1534): Ceres Seq. ID no. 13654809
gtcctcccctccctcgcgagtccgaagtcaaggcgaaaaccctcgaggcgaagcgagagtcagataggataccgcgagagacgagagtcgagtgagagggtggaagggaagccgagatgaagctcaacgtgaagaccctcaagggcacaagcttcgagatcgaggcgacccccgaggcctcggtgggtgaggtcaagagaatcatcgagagtgctcaggggcagaatgtgtaccctgcggatcagctgatgatcatatatcaaggaaaaattcttaaggatgataccactctggaagttaataaggttgcagagaacagcttccttgttataatgctgtctaagccgaaggcgtcgtctagtggtgcttctactgcttcaaagacacctgttagtcagtctcaacctgccactccacctgcccctgttacctcagctgcaagatcaccaccttcacaggcacctgttgctgcatctgaaccggcgcctcccagtgcacagccttcagctgtctctgatactccatctcctgcagtaactgcatcaggcgatgctgatgtatacagtcaggctgcatcaaaccttgtctctggcggcagtctagaacagacagtccaacaaattcttgacatgggcggtggaacctgggaacgtgatatggttgtccgtgcattacgtgctgcatataacaaccctgagagggctattgactatctgtattctggaatacctgaatctgtagaggccycacctgtggctcgagcacctgctcctgctcaacaggcaccaaacctgcaggctcctcaggctcaggctgcacctctaccaccagtgcagccatctggtggcgtctctgcagggcctaatgcaaatcctctaaaccttttcccgcagggtattccaagtggcggggcaaatgctggtgccggtgtgggtgccggtgctggtgcccttgatgcattgcgacagcttccacagttccaagcactgcttgcattggtccaggctaatccccaaatcctgcagccaatgcttcaagagctggggaaacaaaatccgcagatcctgcggttgattcaggaaaatcaggctgagtttctccgcctggtaaatgaaacacctgagagtggtgctggcggaaatatactaggcgcactcgcagctcaaatgccacaggcagttcaagttactccagaagaacgggaggccatccagcggctcgaggcgatggggttcaaccgtgagcttgtgttggaggtcttctttgcatgcaacagggatgaagaactggctgccaactatcttttggatcatggccacgagtttgaggaacaacaatagatgttagattggtgttaccgtcgaaagacagaagagtcagtgacataagcagtacagtttggtgtcgttcttatatcttgctgctgaatatcactactagtacttgtcattagtgcgatgctgctgactttaaatttcttgtatcctggaaattctttctaagtacatatcaatatcaatattcaaacctcatg

SEQ ID NO: 62799 - protein, 407 aa, Triticum aestivum
  peptide (1)..(407): Ceres Seq. ID no. 15219694
  misc_feature (1)..(78): Pfam Name: Ubiquitin family Pfam Description: Ubiquitin family
  misc_feature (83)..(406): Homolog of NCBI NO: 7446462 NR Description: RAD23 protein homolog - rice
  misc_feature (1)..(405): Homolog of NCBI NO: 7446460 NR Description: RAD23 protein, isoform II - carrot
  misc_feature (1)..(345): Homolog of NCBI NO: 7446459 NR Description: RAD23 protein, isoform I - carrot
  misc_feature (80)..(405): Homolog of NCBI NO: 15232924 NR Description: RAD23 -related [Arabidopsis thaliana]
  misc_feature (1)..(82): Homolog of NCBI NO: 30409726 NR Description: RAD23-like protein [Arabidopsis thaliana]
  misc_feature (122)..(405): Homolog of NCBI NO: 30409726 NR Description: RAD23-like protein [Arabidopsis thaliana]
  misc_feature (1)..(406): Homolog of NCBI NO: 14335004 NR Description: unknown protein [Arabidopsis thaliana]
  misc_feature (1)..(406): Homolog of NCBI NO: 15240922 NR Description: DNA repair protein RAD23, putative [Arabidopsis
  misc_feature (1)..(405): Homolog of NCBI NO: 38175472 NR Description: putative osRAD23 [Oryza sativa (japonica
  misc_feature (1)..(405): Homolog of NCBI NO: 5640111 NR Description: RAD23 protein [Lycopersicon esculentum]
  misc_feature (211)..(211): Xaa is any aa, unknown or other
MKLNVKTLKGTSFEIEATPEASVGEVKRIIESAQGQNVYPADQLMIIYQGKILKDDTTLEVNKVAENSFLVIMLSKPKASSSGASTASKTPVSQSQPATPPAPVTSAARSPPSQAPVAASEPAPPSAQPSAVSDTPSPAVTASGDADVYSQAASNLVSGGSLEQTVQQILDMGGGTWERDMVVRALRAAYNNPERAIDYLYSGIPESVEAXPVARAPAPAQQAPNLQAPQAQAAPLPPVQPSGGVSAGPNANPLNLFPQGIPSGGANAGAGVGAGAGALDALRQLPQFQALLALVQANPQILQPMLQELGKQNPQILRLIQENQAEFLRLVNETPESGAGGNILGALAAQMPQAVQVTPEEREAIQRLEAMGFNRELVLEVFFACNRDEELAANYLLDHGHEFEEQQ

SEQ ID NO: 62800 - protein, 363 aa, Triticum aestivum
  peptide (1)..(363): Ceres Seq. ID no. 15219695
  misc_feature (117)..(159): Pfam Name: UBA/TS-N domain Pfam Description: UBA/TS-N domain
  misc_feature (39)..(362): Homolog of NCBI NO: 7446462 NR Description: RAD23 protein homolog - rice
  misc_feature (1)..(361): Homolog of NCBI NO: 7446460 NR Description: RAD23 protein, isoform II - carrot
  misc_feature (1)..(301): Homolog of NCBI NO: 7446459 NR Description: RAD23 protein, isoform I - carrot
  misc_feature (36)..(361): Homolog of NCBI NO: 15232924 NR Description: RAD23 -related [Arabidopsis thaliana]
  misc_feature (1)..(38): Homolog of NCBI NO: 30409726 NR Description: RAD23-like protein [Arabidopsis thaliana]
  misc_feature (78)..(361): Homolog of NCBI NO: 30409726 NR Description: RAD23-like protein [Arabidopsis thaliana]
  misc_feature (1)..(362): Homolog of NCBI NO: 14335004 NR Description: unknown protein [Arabidopsis thaliana]
  misc_feature (1)..(362): Homolog of NCBI NO: 15240922 NR Description: DNA repair protein RAD23, putative [Arabidopsis
  misc_feature (1)..(361): Homolog of NCBI NO: 38175472 NR Description: putative osRAD23 [Oryza sativa (japonica
  misc_feature (1)..(361): Homolog of NCBI NO: 5640111 NR Description: RAD23 protein [Lycopersicon esculentum]
  misc_feature (167)..(167): Xaa is any aa, unknown or other
MIIYQGKILKDDTTLEVNKVAENSFLVIMLSKPKASSSGASTASKTPVSQSQPATPPAPVTSAARSPPSQAPVAASEPAPPSAQPSAVSDTPSPAVTASGDADVYSQAASNLVSGGSLEQTVQQILDMGGGTWERDMVVRALRAAYNNPERAIDYLYSGIPESVEAXPVARAPAPAQQAPNLQAPQAQAAPLPPVQPSGGVSAGPNANPLNLFPQGIPSGGANAGAGVGAGAGALDALRQLPQFQALLALVQANPQILQPMLQELGKQNPQILRLIQENQAEFLRLVNETPESGAGGNILGALAAQMPQAVQVTPEEREAIQRLEAMGFNRELVLEVFFACNRDEELAANYLLDHGHEFEEQQ

SEQ ID NO: 62801 - protein, 335 aa, Triticum aestivum
  peptide (1)..(335): Ceres Seq. ID no. 15219696
  misc_feature (89)..(131): Pfam Name: UBA/TS-N domain Pfam Description: UBA/TS-N domain
  misc_feature (1)..(258): Homolog of NCBI NO: 30409730 NR Description: RAD23-like protein [Arabidopsis thaliana]
  misc_feature (11)..(334): Homolog of NCBI NO: 7446462 NR Description: RAD23 protein homolog - rice
  misc_feature (1)..(333): Homolog of NCBI NO: 7446460 NR Description: RAD23 protein, isoform II - carrot
  misc_feature (1)..(273): Homolog of NCBI NO: 7446459 NR Description: RAD23 protein, isoform I - carrot
  misc_feature (8)..(333): Homolog of NCBI NO: 15232924 NR Description: RAD23 -related [Arabidopsis thaliana]
  misc_feature (50)..(333): Homolog of NCBI NO: 30409726 NR Description: RAD23-like protein [Arabidopsis thaliana]
  misc_feature (1)..(334): Homolog of NCBI NO: 14335004 NR Description: unknown protein [Arabidopsis thaliana]
  misc_feature (1)..(334): Homolog of NCBI NO: 15240922 NR Description: DNA repair protein RAD23, putative [Arabidopsis
  misc_feature (1)..(333): Homolog of NCBI NO: 38175472 NR Description: putative osRAD23 [Oryza sativa (japonica
  misc_feature (1)..(333): Homolog of NCBI NO: 5640111 NR Description: RAD23 protein [Lycopersicon esculentum]
  misc_feature (139)..(139): Xaa is any aa, unknown or other
MLSKPKASSSGASTASKTPVSQSQPATPPAPVTSAARSPPSQAPVAASEPAPPSAQPSAVSDTPSPAVTASGDADVYSQAASNLVSGGSLEQTVQQILDMGGGTWERDMVVRALRAAYNNPERAIDYLYSGIPESVEAXPVARAPAPAQQAPNLQAPQAQAAPLPPVQPSGGVSAGPNANPLNLFPQGIPSGGANAGAGVGAGAGALDALRQLPQFQALLALVQANPQILQPMLQELGKQNPQILRLIQENQAEFLRLVNETPESGAGGNILGALAAQMPQAVQVTPEEREAIQRLEAMGFNRELVLEVFFACNRDEELAANYLLDHGHEFEEQQ

SEQ ID NO: 62802 - DNA, 1382 bp, Triticum aestivum
  misc_feature (1)..(1382): Ceres Seq. ID no. 12615622
aaaaaaccaagtctcgcacgccatcttggcaagcactctctcctcccccaccgcgccgccgagctccgcctccggcagacgcaagcaggccacctcggacgaattcttcttcccctactcctcgtatctaccgcgatggcgtcgggtggagatctcccatccgggtttgctgatgagagcaaaagtacgaaaacagaaggatcatccaacgaacgtcaaggggttcctccagctgccgctgcaggcttgtcgggtcctttcgatttttcttctatgcaaagtttgctcaatgatccatctataaaggagatggcagaccagattgcaagggaccctgcattcaatcagatggctgagcagctacagaaaggtgctcagactgcaggagaacagggcatgcctccattggatcctcatcaatacatggaaacaatgcaaaaggtcatggaaaaccctcagtttatgacaatggcagagcgcctcgggactgctcttatgcaggatcctgctatgtccagtatgctggaaaatttgactagtccaacacataaggaggagcttgaagagcgcatgtctcggattaaggaagatccagccttgaagccaattcttgatgagttagagaatggtggtcctgctgcaatgataaagtactggaatgaccctgaaactcttcaaaagattggccaggcaatgggaactaccatgccgtttagcactgtctctactgctgaaccttctggtactgaagaaactgaagaagaaggtgaagatgaagacgaatccattgtccaccacactgccagtgttggtgacggtgagggtctgaagaaggctctagatggtggagcagacaaggatgaagaagactctgagggaagaagggccttgcactttgcatgtggatatggtgagttcaagtgtgcggaaatcctccttgaggcgggtgctgctgtagatgccatggataagaacaagaacaccccactgcattacgctgctggctatggccggaaagagtgtgtggatcttctgttgaagcacggtgctgctgtcactctccaaaacatggatgggaagacgcccatcgacgtcgccaagctcaacaaccaggacgaggtcctcaagctgctcgagaaggacgtgttcctgtaaatcacttcacttggcccccatgaagagacatcatgttttacatcccttggcattggttttatatagtcatacacgaatcggcattttattcgttgtgtaagaatctactgttagctagcctgcaggccgactggctgaggttagaactgcatgttactgtatatggagacctgtgtatcgtccactttgtttctgttgattccactagagtaatccaagatgtactc

SEQ ID NO: 62803 - protein, 384 aa, Triticum aestivum
  peptide (1)..(384): Ceres Seq. ID no. 12615623
  misc_feature (325)..(357): Pfam Name: Ankyrin repeat Pfam Description: Ankyrin repeat
  misc_feature (82)..(384): Homolog of NCBI NO: 30690372 NR Description: ankyrin repeat-containing protein 2 [Arabidopsis
  misc_feature (58)..(384): Homolog of NCBI NO: 4205079 NR Description: ankyrin repeat-containing protein 2 [Arabidopsis
  misc_feature (58)..(384): Homolog of NCBI NO: 3478700 NR Description: AFT protein [Arabidopsis thaliana]
  misc_feature (58)..(384): Homolog of NCBI NO: 15237008 NR Description: ankyrin repeat-containing protein 2
  misc_feature (46)..(384): Homolog of NCBI NO: 27573339 NR Description: unknown protein [Oryza sativa (japonica
  misc_feature (60)..(384): Homolog of NCBI NO: 29826244 NR Description: TGB12K interacting protein 3 [Nicotiana tabacum]
  misc_feature (60)..(384): Homolog of NCBI NO: 29826242 NR Description: TGB12K interacting protein 2 [Nicotiana tabacum]
  misc_feature (48)..(384): Homolog of NCBI NO: 13310811 NR Description: ankyrin-repeat protein HBP1 [Nicotiana tabacum]
  misc_feature (48)..(384): Homolog of NCBI NO: 24637568 NR Description: ankyrin domain protein [Nicotiana tabacum]
  misc_feature (58)..(384): Homolog of NCBI NO: 38175562 NR Description: putative ankyrin domain protein
KKPSLARHLGKHSLLPHRAAELRLRQTQAGHLGRILLPLLLVSTAMASGGDLPSGFADESKSTKTEGSSNERQGVPPAAAAGLSGPFDFSSMQSLLNDPSIKEMADQIARDPAFNQMAEQLQKGAQTAGEQGMPPLDPHQYMETMQKVMENPQFMTMAERLGTALMQDPAMSSMLENLTSPTHKEELEERMSRIKEDPALKPILDELENGGPAAMIKYWNDPETLQKIGQAMGTTMPFSTVSTAEPSGTEETEEEGEDEDESIVHHTASVGDGEGLKKALDGGADKDEEDSEGRRALHFACGYGEFKCAEILLEAGAAVDAMDKNKNTPLHYAAGYGRKECVDLLLKHGAAVTLQNMDGKTPIDVAKLNNQDEVLKLLEKDVFL

SEQ ID NO: 62804 - protein, 339 aa, Triticum aestivum
  peptide (1)..(339): Ceres Seq. ID no. 12615624
  misc_feature (280)..(312): Pfam Name: Ankyrin repeat Pfam Description: Ankyrin repeat
  misc_feature (37)..(339): Homolog of NCBI NO: 30690372 NR Description: ankyrin repeat-containing protein 2 [Arabidopsis
  misc_feature (13)..(339): Homolog of NCBI NO: 4205079 NR Description: ankyrin repeat-containing protein 2 [Arabidopsis
  misc_feature (13)..(339): Homolog of NCBI NO: 3478700 NR Description: AFT protein [Arabidopsis thaliana]
  misc_feature (13)..(339): Homolog of NCBI NO: 15237008 NR Description: ankyrin repeat-containing protein 2
  misc_feature (1)..(339): Homolog of NCBI NO: 27573339 NR Description: unknown protein [Oryza sativa (japonica
  misc_feature (15)..(339): Homolog of NCBI NO: 29826244 NR Description: TGB12K interacting protein 3 [Nicotiana tabacum]
  misc_feature (15)..(339): Homolog of NCBI NO: 29826242 NR Description: TGB12K interacting protein 2 [Nicotiana tabacum]
  misc_feature (3)..(339): Homolog of NCBI NO: 13310811 NR Description: ankyrin-repeat protein HBP1 [Nicotiana tabacum]
  misc_feature (3)..(339): Homolog of NCBI NO: 24637568 NR Description: ankyrin domain protein [Nicotiana tabacum]
  misc_feature (13)..(339): Homolog of NCBI NO: 38175562 NR Description: putative ankyrin domain protein
MASGGDLPSGFADESKSTKTEGSSNERQGVPPAAAAGLSGPFDFSSMQSLLNDPSIKEMADQIARDPAFNQMAEQLQKGAQTAGEQGMPPLDPHQYMETMQKVMENPQFMTMAERLGTALMQDPAMSSMLENLTSPTHKEELEERMSRIKEDPALKPILDELENGGPAAMIKYWNDPETLQKIGQAMGTTMPFSTVSTAEPSGTEETEEEGEDEDESIVHHTASVGDGEGLKKALDGGADKDEEDSEGRRALHFACGYGEFKCAEILLEAGAAVDAMDKNKNTPLHYAAGYGRKECVDLLLKHGAAVTLQNMDGKTPIDVAKLNNQDEVLKLLEKDVFL

SEQ ID NO: 62805 - protein, 293 aa, Triticum aestivum
  peptide (1)..(293): Ceres Seq. ID no. 12615625
  misc_feature (234)..(266): Pfam Name: Ankyrin repeat Pfam Description: Ankyrin repeat
  misc_feature (1)..(293): Homolog of NCBI NO: 30690372 NR Description: ankyrin repeat-containing protein 2 [Arabidopsis
  misc_feature (1)..(293): Homolog of NCBI NO: 4205079 NR Description: ankyrin repeat-containing protein 2 [Arabidopsis
  misc_feature (1)..(293): Homolog of NCBI NO: 3478700 NR Description: AFT protein [Arabidopsis thaliana]
  misc_feature (1)..(293): Homolog of NCBI NO: 15237008 NR Description: ankyrin repeat-containing protein 2
  misc_feature (1)..(293): Homolog of NCBI NO: 27573339 NR Description: unknown protein [Oryza sativa (japonica
  misc_feature (1)..(293): Homolog of NCBI NO: 29826244 NR Description: TGB12K interacting protein 3 [Nicotiana tabacum]
  misc_feature (1)..(293): Homolog of NCBI NO: 29826242 NR Description: TGB12K interacting protein 2 [Nicotiana tabacum]
  misc_feature (1)..(293): Homolog of NCBI NO: 13310811 NR Description: ankyrin-repeat protein HBP1 [Nicotiana tabacum]
  misc_feature (1)..(293): Homolog of NCBI NO: 24637568 NR Description: ankyrin domain protein [Nicotiana tabacum]
  misc_feature (1)..(293): Homolog of NCBI NO: 38175562 NR Description: putative ankyrin domain protein
MQSLLNDPSIKEMADQIARDPAFNQMAEQLQKGAQTAGEQGMPPLDPHQYMETMQKVMENPQFMTMAERLGTALMQDPAMSSMLENLTSPTHKEELEERMSRIKEDPALKPILDELENGGPAAMIKYWNDPETLQKIGQAMGTTMPFSTVSTAEPSGTEETEEEGEDEDESIVHHTASVGDGEGLKKALDGGADKDEEDSEGRRALHFACGYGEFKCAEILLEAGAAVDAMDKNKNTPLHYAAGYGRKECVDLLLKHGAAVTLQNMDGKTPIDVAKLNNQDEVLKLLEKDVFL

SEQ ID NO: 62806 - DNA, 1415 bp, Triticum aestivum
  misc_feature (1)..(1415): Ceres Seq. ID no. 13596868
attaaaccgagcgccagtggatctctcctcgggcatcggcatcggagcggagagagagagagagagagccacccagccatgagatggtatgcatcggtaggctgagggcgctggtgcttcgtgcggcggcgggcgcgggcgcgggcaggcgccggtgggccagggtcctgtgcggtcgggcggtcgatgtgtgcgtgacaccccgtccgcgcgggcacggttggcgtggattccgggcggtggctggcgccaggacgaagatgatgctcgattcctccgactctgactccggcgctccggcggggcagctgcagctgcagcgccgcgcggttgctgctgggacccagccgcaggatggagggtacgccagtgcggggtggcagagggaagatggtaaactgaaatgtgggtattcaagttttagagggaaaagggctacaatggaggatttctatgatgtaaaactaactgaaattgatggacacgctgttagcctatttggtgtattcgatggtcatggggggtcacgtgctgctgagtatttgaaggagcatttgttcgagaaccttatgaaacaccccaagttcttgactgatacaaagcttgctataagtgaaacatatcagaagacagatgcagatttcttagaatcagaatcaagtgctttcagggatgatggttccacagcttcgactgcggttttagtgggtggccatctatatgtagcaaatgttggtgactcccgtgctgttatttcaaaagccgggaaagctagggcactctcagtagatcacaaacctaacaggtctgatgaacgcaagagaattgaaaatgctggaggtgttgtcatctgggctggtacttggagggtaggtggcgtactggcaatgtcccgtgcgtttggtaatcgtctactgaagccatttgtggtggcagaacctgaaattcaggaagaattgattaatggagaattggagagcctggttcttgccagtgatgggctttgggatgccgtagaaaatgaggaagctgtgtcccttgcaaaaacagaagatgtgccagagtctgcggccaggaaactgacggagattgcctactctcgtggcagcgctgacaatattacatgcatcgtggtgcaattccaccatgataaaattacaggatgagatggactacagctgatttaaggtttctctgcttcaggcctctttttatcctgcaagcggagtggggtttctcccacatctatttttgcctctgtggcaactgctcaggacttcctctattgattctttcctttgtgtggcagaccttttctcttttgagaattgtaatgggaatttttgagtttgatgtatccatgtctatgtctgtactaatacttgttatatttaatataaaaagagtgagttacg

SEQ ID NO: 62807 - protein, 360 aa, Triticum aestivum
  peptide (1)..(360): Ceres Seq. ID no. 13596869
  misc_feature (106)..(346): Pfam Name: Protein phosphatase 2C Pfam Description: Protein phosphatase 2C
  misc_feature (102)..(289): Homolog of NCBI NO: 7486331 NR Description: hypothetical protein F28M20.60 - Arabidopsis
  misc_feature (89)..(355): Homolog of NCBI NO: 38345197 NR Description: OSJNBa0015K02.7 [Oryza sativa (japonica
  misc_feature (95)..(360): Homolog of NCBI NO: 15238651 NR Description: protein phosphatase 2C (PP2C), putative
  misc_feature (88)..(353): Homolog of NCBI NO: 20146110 NR Description: protein phosphatase 2C [Mesembryanthemum
  misc_feature (82)..(357): Homolog of NCBI NO: 18416366 NR Description: protein phosphatase 2C (PP2C) -related
  misc_feature (91)..(360): Homolog of NCBI NO: 30689144 NR Description: protein phosphatase 2C (PP2C), putative
  misc_feature (120)..(358): Homolog of NCBI NO: 34912708 NR Description: putative protein phosphatase 2C-like protein
  misc_feature (120)..(357): Homolog of NCBI NO: 9757995 NR Description: protein phosphatase 2C-like [Arabidopsis thaliana]
  misc_feature (1)..(357): Homolog of NCBI NO: 18086420 NR Description: AT5g53140/MFH8_8 [Arabidopsis thaliana]
  misc_feature (1)..(357): Homolog of NCBI NO: 18423476 NR Description: protein phosphatase 2C (PP2C), putative
MVCIGRLRALVLRAAAGAGAGRRRWARVLCGRAVDVCVTPRPRGHGWRGFRAVAGARTKMMLDSSDSDSGAPAGQLQLQRRAVAAGTQPQDGGYASAGWQREDGKLKCGYSSFRGKRATMEDFYDVKLTEIDGHAVSLFGVFDGHGGSRAAEYLKEHLFENLMKHPKFLTDTKLAISETYQKTDADFLESESSAFRDDGSTASTAVLVGGHLYVANVGDSRAVISKAGKARALSVDHKPNRSDERKRIENAGGVVIWAGTWRVGGVLAMSRAFGNRLLKPFVVAEPEIQEELINGELESLVLASDGLWDAVENEEAVSLAKTEDVPESAARKLTEIAYSRGSADNITCIVVQFHHDKITG

SEQ ID NO: 62808 - protein, 301 aa, Triticum aestivum
  peptide (1)..(301): Ceres Seq. ID no. 13596870
  misc_feature (47)..(287): Pfam Name: Protein phosphatase 2C Pfam Description: Protein phosphatase 2C
  misc_feature (43)..(230): Homolog of NCBI NO: 7486331 NR Description: hypothetical protein F28M20.60 - Arabidopsis
  misc_feature (30)..(296): Homolog of NCBI NO: 38345197 NR Description: OSJNBa0015K02.7 [Oryza sativa (japonica
  misc_feature (36)..(301): Homolog of NCBI NO: 15238651 NR Description: protein phosphatase 2C (PP2C), putative
  misc_feature (29)..(294): Homolog of NCBI NO: 20146110 NR Description: protein phosphatase 2C [Mesembryanthemum
  misc_feature (23)..(298): Homolog of NCBI NO: 18416366 NR Description: protein phosphatase 2C (PP2C) -related
  misc_feature (32)..(301): Homolog of NCBI NO: 30689144 NR Description: protein phosphatase 2C (PP2C), putative
  misc_feature (61)..(299): Homolog of NCBI NO: 34912708 NR Description: putative protein phosphatase 2C-like protein
  misc_feature (61)..(298): Homolog of NCBI NO: 9757995 NR Description: protein phosphatase 2C-like [Arabidopsis thaliana]
  misc_feature (1)..(298): Homolog of NCBI NO: 18086420 NR Description: AT5g53140/MFH8_8 [Arabidopsis thaliana]
  misc_feature (1)..(298): Homolog of NCBI NO: 18423476 NR Description: protein phosphatase 2C (PP2C), putative
MMLDSSDSDSGAPAGQLQLQRRAVAAGTQPQDGGYASAGWQREDGKLKCGYSSFRGKRATMEDFYDVKLTEIDGHAVSLFGVFDGHGGSRAAEYLKEHLFENLMKHPKFLTDTKLAISETYQKTDADFLESESSAFRDDGSTASTAVLVGGHLYVANVGDSRAVISKAGKARALSVDHKPNRSDERKRIENAGGVVIWAGTWRVGGVLAMSRAFGNRLLKPFVVAEPEIQEELINGELESLVLASDGLWDAVENEEAVSLAKTEDVPESAARKLTEIAYSRGSADNITCIVVQFHHDKITG

SEQ ID NO: 62809 - protein, 300 aa, Triticum aestivum
  peptide (1)..(300): Ceres Seq. ID no. 13596871
  misc_feature (46)..(286): Pfam Name: Protein phosphatase 2C Pfam Description: Protein phosphatase 2C
  misc_feature (42)..(229): Homolog of NCBI NO: 7486331 NR Description: hypothetical protein F28M20.60 - Arabidopsis
  misc_feature (29)..(295): Homolog of NCBI NO: 38345197 NR Description: OSJNBa0015K02.7 [Oryza sativa (japonica
  misc_feature (35)..(300): Homolog of NCBI NO: 15238651 NR Description: protein phosphatase 2C (PP2C), putative
  misc_feature (28)..(293): Homolog of NCBI NO: 20146110 NR Description: protein phosphatase 2C [Mesembryanthemum
  misc_feature (22)..(297): Homolog of NCBI NO: 18416366 NR Description: protein phosphatase 2C (PP2C) -related
  misc_feature (31)..(300): Homolog of NCBI NO: 30689144 NR Description: protein phosphatase 2C (PP2C), putative
  misc_feature (60)..(298): Homolog of NCBI NO: 34912708 NR Description: putative protein phosphatase 2C-like protein
  misc_feature (60)..(297): Homolog of NCBI NO: 9757995 NR Description: protein phosphatase 2C-like [Arabidopsis thaliana]
  misc_feature (1)..(297): Homolog of NCBI NO: 18086420 NR Description: AT5g53140/MFH8_8 [Arabidopsis thaliana]
  misc_feature (1)..(297): Homolog of NCBI NO: 18423476 NR Description: protein phosphatase 2C (PP2C), putative
MLDSSDSDSGAPAGQLQLQRRAVAAGTQPQDGGYASAGWQREDGKLKCGYSSFRGKRATMEDFYDVKLTEIDGHAVSLFGVFDGHGGSRAAEYLKEHLFENLMKHPKFLTDTKLAISETYQKTDADFLESESSAFRDDGSTASTAVLVGGHLYVANVGDSRAVISKAGKARALSVDHKPNRSDERKRIENAGGVVIWAGTWRVGGVLAMSRAFGNRLLKPFVVAEPEIQEELINGELESLVLASDGLWDAVENEEAVSLAKTEDVPESAARKLTEIAYSRGSADNITCIVVQFHHDKITG

SEQ ID NO: 62810 - DNA, 1113 bp, Triticum aestivum
  misc_feature (1)..(1113): Ceres Seq. ID no. 15224290
gagccgcagagacgttcgcaccaactcctctgaactctgaagcctgaacggagcggcggagaggaaggggagagatcacccaccggcggcgaggggagatggccggaggcgaggaagggtggaggaggagcggcatcgaggtgagcaccctgcagttcggctacgacggggaggcgccgctcttcgcgcgcttcaacctccgcgtcgcccccggctcgcgctgcctcctcgtcggcgccaacggatccggcaagactactctcttgaagattcttgcaggaaaacatatggttggaggaaaggatgttgtccgtgttcttaatggttctgcttttcatgacacacaattcgtgtgcagtggtgacctttcctacttgggtggttcttggagtcggaatgtcagttcagttggtgatgttccactacaaggcgatttctctgctgagcacatgatatttggagttgatggggttgatcctgttaggcgagagaagctgattgatctactggatattgatctgcaatggcgcatgcataaagtttcagatggacagcgccgcagggtacaaatttgcatgggtcttcttcatccatacaaggtactcttactcgatgagatcaccgtggatctcgatgtcgtgaccaggatggatctcctcgacttcttcaaggaagaatgcgagcagagggaagccacgatcgtctacgccacccacatattcgacgggctggagacatgggccaccgacatcgcgtacatccaagagggcgagctgaaaaagtcggcgaaatactcggacatcgaagagctgaagacggccaagaacctgctgtcggtcgttgagtcatggctgaaatccgagaccaagctcccgaagaaagaacccgcccgcgtcgagagccagcccaggcgcccttccccgttcgacgcctcccctttccgggcgtcgcgccacatggcctactaccgatgatgaccgtgtaaaacctctgcacccattccggtgccatgcaactctggagtctgtatcttccttttttttgttccccatccatccctgtatacggcaatgtatctatctaaatctaaataataaacaagtcgagcgtgcc

SEQ ID NO: 62811 - protein, 291 aa, Triticum aestivum; identical to SEQ ID NO: 51319
  peptide (1)..(291): Ceres Seq. ID no. 15224291
  misc_feature (39)..(224): Pfam Name: ABC transporter Pfam Description: ABC transporter
  misc_feature (90)..(271): Homolog of NCBI NO: 40738662 NR Description: hypothetical protein AN6512.2 [Aspergillus
  misc_feature (13)..(242): Homolog of NCBI NO: 14318491 NR Description: CCR4 associated factor; Caf16p [Saccharomyces
  misc_feature (13)..(248): Homolog of NCBI NO: 32405648 NR Description: hypothetical protein [Neurospora crassa]
  misc_feature (1)..(257): Homolog of NCBI NO: 38107624 NR Description: hypothetical protein MG09520.4 [Magnaporthe
  misc_feature (39)..(257): Homolog of NCBI NO: 19115648 NR Description: probable ATP-dependent transporter
  misc_feature (5)..(261): Homolog of NCBI NO: 15241744 NR Description: ABC transporter family protein [Arabidopsis
  misc_feature (13)..(291): Homolog of NCBI NO: 25406749 NR Description: hypothetical protein [imported] - Arabidopsis
  misc_feature (13)..(291): Homolog of NCBI NO: 21592901 NR Description: NBD-like protein [Arabidopsis thaliana]
  misc_feature (13)..(291): Homolog of NCBI NO: 15240093 NR Description: ABC transporter family protein [Arabidopsis
  misc_feature (13)..(291): Homolog of NCBI NO: 18379174 NR Description: ABC transporter family protein [Arabidopsis

SEQ ID NO: 62812 - protein, 228 aa, Triticum aestivum; identical to SEQ ID NO: 51320
  peptide (1)..(228): Ceres Seq. ID no. 15224292
  misc_feature (1)..(161): Pfam Name: ABC transporter Pfam Description: ABC transporter
  misc_feature (27)..(208): Homolog of NCBI NO: 40738662 NR Description: hypothetical protein AN6512.2 [Aspergillus
  misc_feature (1)..(179): Homolog of NCBI NO: 14318491 NR Description: CCR4 associated factor; Caf16p [Saccharomyces
  misc_feature (1)..(185): Homolog of NCBI NO: 32405648 NR Description: hypothetical protein [Neurospora crassa]
  misc_feature (1)..(194): Homolog of NCBI NO: 38107624 NR Description: hypothetical protein MG09520.4 [Magnaporthe
  misc_feature (1)..(194): Homolog of NCBI NO: 19115648 NR Description: probable ATP-dependent transporter
  misc_feature (1)..(198): Homolog of NCBI NO: 15241744 NR Description: ABC transporter family protein [Arabidopsis
  misc_feature (1)..(228): Homolog of NCBI NO: 25406749 NR Description: hypothetical protein [imported] - Arabidopsis
  misc_feature (1)..(228): Homolog of NCBI NO: 21592901 NR Description: NBD-like protein [Arabidopsis thaliana]
  misc_feature (1)..(228): Homolog of NCBI NO: 15240093 NR Description: ABC transporter family protein [Arabidopsis
  misc_feature (1)..(228): Homolog of NCBI NO: 18379174 NR Description: ABC transporter family protein [Arabidopsis

SEQ ID NO: 62813 - protein, 174 aa, Triticum aestivum; identical to SEQ ID NO: 51321
  peptide (1)..(174): Ceres Seq. ID no. 15224293
  misc_feature (1)..(107): Pfam Name: ABC transporter Pfam Description: ABC transporter
  misc_feature (1)..(154): Homolog of NCBI NO: 40738662 NR Description: hypothetical protein AN6512.2 [Aspergillus
  misc_feature (1)..(125): Homolog of NCBI NO: 14318491 NR Description: CCR4 associated factor; Caf16p [Saccharomyces
  misc_feature (1)..(131): Homolog of NCBI NO: 32405648 NR Description: hypothetical protein [Neurospora crassa]
  misc_feature (1)..(140): Homolog of NCBI NO: 38107624 NR Description: hypothetical protein MG09520.4 [Magnaporthe
  misc_feature (1)..(140): Homolog of NCBI NO: 19115648 NR Description: probable ATP-dependent transporter
  misc_feature (1)..(144): Homolog of NCBI NO: 15241744 NR Description: ABC transporter family protein [Arabidopsis
  misc_feature (1)..(174): Homolog of NCBI NO: 25406749 NR Description: hypothetical protein [imported] - Arabidopsis
  misc_feature (1)..(174): Homolog of NCBI NO: 21592901 NR Description: NBD-like protein [Arabidopsis thaliana]
  misc_feature (1)..(174): Homolog of NCBI NO: 15240093 NR Description: ABC transporter family protein [Arabidopsis
  misc_feature (1)..(174): Homolog of NCBI NO: 18379174 NR Description: ABC transporter family protein [Arabidopsis

SEQ ID NO: 62814 - DNA, 1372 bp, Triticum aestivum
  misc_feature (1)..(1372): Ceres Seq. ID no. 12585444
catctcaacgaagaaaaggagcggccgaatctccagccccacgatttccccacgcgcacccaccaccgacccggcccccaaaaccctacgccgcgcaaaccctagcggcggccgccgcccccctcctcatcagcaatgtccggcatcctgcggctcgccggcgccgccagatccttctcccgcgcgttggctccggccgcgccgcaccaccgcaggctcgcggcatcggcggccgccctggcggaggacgatgcgtgctggaccgagtgggaggaggaggaggaggaggcgcggcggcagcgcgcccgcgcatcggcgaccgccgcggagtcttgcccggcggacggcggtcccaggggcgtgcagtgggtggtgatgggccgccccggcccgcagaagcacgcccacgccgcgcgcctcgccgaggtcctcgccgtgccgtacatctccatgggcacgctcgtcaggcaggagctcagccccacatcctcgctctacaagaagattgctaattcggtgaatgaagggaagcttgtgccagaggatatcatatttgggttgctgactaagcgtctcgaggagggatactacaagggtgaaaatggatttatccttgacggaatcccacgtacccgtgtgcaagctgagattcttgatgagatcgttgacatcgacttggttctgaacttcaaatgtgctggtaactgtttcatgaagaagcgatctggaggcgacatatgttcccactgtgggcagcattttggtgtcagcagtctggtgtctagggagcgtaatctctcccttggaagctctacatggcctgctcaggcacaacatgcttctgttataggcctggaaaacccaaggatggagaagctgcgtgcttatgctgagcagaccaagcagctggaagattactacaagaagcacaggaaacttgtggagttgaagacatccgctcgccctggtgaaacctggcaggggctcgtagctgcccttcacctccagcatctagacccatccccaacaccacacaaactcaccgtgtaattatcatccactgagtctaaggatctacattgtgatcctcacctgcgacatacgtagtatgtttctaagttttgtgagttctggctgaggagtcagtcggctgtggtgctttggtctttatctgttataggtataatgtaaggctctggtctttactgttatagataaaatgtaagcgattttgtagacccgcttgcttatatgtttgtaacggagagctttgaacttgcaagtgcaagtgtgcggtgtgccaggctccgctgtgctgttgttttgagtaccagttttgatcaatatataagttactgtgaatgttgtgcgc

SEQ ID NO: 62815 - protein, 304 aa, Triticum aestivum
  peptide (1)..(304): Ceres Seq. ID no. 12585445
  misc_feature (65)..(292): Homolog of NCBI NO: 27370911 NR Description: Similar to Adenylate kinase 2 [Xenopus laevis]
  misc_feature (79)..(288): Homolog of NCBI NO: 11498284 NR Description: adenylate kinase (adk) [Archaeoglobus fulgidus]
  misc_feature (29)..(129): Homolog of NCBI NO: 6063552 NR Description: ESTs AU065232(E60855),C23624(S1554), correspond to a region of the predicted gene.~similar to putative
  misc_feature (124)..(291): Homolog of NCBI NO: 6063552 NR Description: ESTs AU065232(E60855),C23624(S1554), correspond to a region of the predicted gene.~similar to putative
  misc_feature (26)..(290): Homolog of NCBI NO: 32488408 NR Description: OSJNBa0043A12.38 [Oryza sativa (japonica
  misc_feature (66)..(299): Homolog of NCBI NO: 29427816 NR Description: Adenylate kinase, chloroplast precursor (ATP-AMP
  misc_feature (63)..(290): Homolog of NCBI NO: 15228109 NR Description: putative adenylate kinase
  misc_feature (50)..(291): Homolog of NCBI NO: 30687836 NR Description: adenylate kinase -related [Arabidopsis thaliana]
  misc_feature (27)..(188): Homolog of NCBI NO: 30678433 NR Description: adenylate kinase -related [Arabidopsis thaliana]
  misc_feature (27)..(188): Homolog of NCBI NO: 6091724 NR Description: putative adenylate kinase [Arabidopsis thaliana]
MSGILRLAGAARSFSRALAPAAPHHRRLAASAAALAEDDACWTEWEEEEEEARRQRARASATAAESCPADGGPRGVQWVVMGRPGPQKHAHAARLAEVLAVPYISMGTLVRQELSPTSSLYKKIANSVNEGKLVPEDIIFGLLTKRLEEGYYKGENGFILDGIPRTRVQAEILDEIVDIDLVLNFKCAGNCFMKKRSGGDICSHCGQHFGVSSLVSRERNLSLGSSTWPAQAQHASVIGLENPRMEKLRAYAEQTKQLEDYYKKHRKLVELKTSARPGETWQGLVAALHLQHLDPSPTPHKLTV

SEQ ID NO: 62816 - protein, 224 aa, Triticum aestivum
  peptide (1)..(224): Ceres Seq. ID no. 12585446
  misc_feature (1)..(212): Homolog of NCBI NO: 27370911 NR Description: Similar to Adenylate kinase 2 [Xenopus laevis]
  misc_feature (1)..(208): Homolog of NCBI NO: 11498284 NR Description: adenylate kinase (adk) [Archaeoglobus fulgidus]
  misc_feature (1)..(49): Homolog of NCBI NO: 6063552 NR Description: ESTs AU065232(E60855),C23624(S1554), correspond to a region of the predicted gene.~similar to putative
  misc_feature (44)..(211): Homolog of NCBI NO: 6063552 NR Description: ESTs AU065232(E60855),C23624(S1554), correspond to a region of the predicted gene.~similar to putative
  misc_feature (1)..(210): Homolog of NCBI NO: 32488408 NR Description: OSJNBa0043A12.38 [Oryza sativa (japonica
  misc_feature (1)..(219): Homolog of NCBI NO: 29427816 NR Description: Adenylate kinase, chloroplast precursor (ATP-AMP
  misc_feature (1)..(210): Homolog of NCBI NO: 15228109 NR Description: putative adenylate kinase
  misc_feature (1)..(211): Homolog of NCBI NO: 30687836 NR Description: adenylate kinase -related [Arabidopsis thaliana]
  misc_feature (1)..(108): Homolog of NCBI NO: 30678433 NR Description: adenylate kinase -related [Arabidopsis thaliana]
  misc_feature (1)..(108): Homolog of NCBI NO: 6091724 NR Description: putative adenylate kinase [Arabidopsis thaliana]
MGRPGPQKHAHAARLAEVLAVPYISMGTLVRQELSPTSSLYKKIANSVNEGKLVPEDIIFGLLTKRLEEGYYKGENGFILDGIPRTRVQAEILDEIVDIDLVLNFKCAGNCFMKKRSGGDICSHCGQHFGVSSLVSRERNLSLGSSTWPAQAQHASVIGLENPRMEKLRAYAEQTKQLEDYYKKHRKLVELKTSARPGETWQGLVAALHLQHLDPSPTPHKLTV

SEQ ID NO: 62817 - protein, 199 aa, Triticum aestivum
  peptide (1)..(199): Ceres Seq. ID no. 12585447
  misc_feature (1)..(187): Homolog of NCBI NO: 27370911 NR Description: Similar to Adenylate kinase 2 [Xenopus laevis]
  misc_feature (1)..(183): Homolog of NCBI NO: 11498284 NR Description: adenylate kinase (adk) [Archaeoglobus fulgidus]
  misc_feature (1)..(24): Homolog of NCBI NO: 6063552 NR Description: ESTs AU065232(E60855),C23624(S1554), correspond to a region of the predicted gene.~similar to putative
  misc_feature (19)..(186): Homolog of NCBI NO: 6063552 NR Description: ESTs AU065232(E60855),C23624(S1554), correspond to a region of the predicted gene.~similar to putative
  misc_feature (1)..(185): Homolog of NCBI NO: 32488408 NR Description: OSJNBa0043A12.38 [Oryza sativa (japonica
  misc_feature (1)..(194): Homolog of NCBI NO: 29427816 NR Description: Adenylate kinase, chloroplast precursor (ATP-AMP
  misc_feature (1)..(185): Homolog of NCBI NO: 15228109 NR Description: putative adenylate kinase
  misc_feature (1)..(186): Homolog of NCBI NO: 30687836 NR Description: adenylate kinase -related [Arabidopsis thaliana]
  misc_feature (1)..(83): Homolog of NCBI NO: 30678433 NR Description: adenylate kinase -related [Arabidopsis thaliana]
  misc_feature (1)..(83): Homolog of NCBI NO: 6091724 NR Description: putative adenylate kinase [Arabidopsis thaliana]
MGTLVRQELSPTSSLYKKIANSVNEGKLVPEDIIFGLLTKRLEEGYYKGENGFILDGIPRTRVQAEILDEIVDIDLVLNFKCAGNCFMKKRSGGDICSHCGQHFGVSSLVSRERNLSLGSSTWPAQAQHASVIGLENPRMEKLRAYAEQTKQLEDYYKKHRKLVELKTSARPGETWQGLVAALHLQHLDPSPTPHKLTV

SEQ ID NO: 62818 - DNA, 1348 bp, Triticum aestivum
  misc_feature (1)..(1348): Ceres Seq. ID no. 13596554
ctcgaaccgaccgacaggccgtggtgcgcatctctcccactatctggctcaggtttcttgcctcggctctcgattttgtcatagcattcgctgttcccgtggtgtctgtagccgcgggcgggtgggcgagatccggttgcggcggccatggtgaaggagaccgcctactacgaaaccctgggggtcagcgtcgacgcctccccctccgacatcaagaaggcctactacgtccaggccaggctggtgcacccggacaagaatcccggcaaccccgacgcggcgcgcaaattccaggatctcggagaggcctaccaagtcctaagcgatccagcgaagaaggaggcttatgataagcatggaaaggagggtctttcccaggataacatggttgatcctgctgctgtatttgggatgctttttggaagcgactattttgaagattatgttggtcagcttgctctggcatccatcgcttcagtggaggttgatgaaggtttaagcagtcaagatgccagagcaaaggttcaagataagataaaagagttgcaaactgaaagagagaaaaagcttactcagagcctaaaggatcgacttcagccatatgtggatggtagaaaggatgattttgtgcactgggcgaatgcagaagccaagcgtttatcagaagcagcttttggtgaggctatgcttcacactgttggatatatttatgtaaggcaagcggcaagagaacttggaaagagtaaattgtatatgggtgtaccattcatagctgagtgggtaagagacaagggtcataccattaaatcacaagttcatgctgcttcaggtgctattgctctgatgcagctacaagaaggaatgaaaaaggtggaggagggtgccgacaaggaagagcagcttatgaagagttttgaggagaaaaaagaagccatgcttaattctctatggaaaattaatgtggtcgatatcgagtcaactctttcccgagtatgccaagcagttcttaaagatagcactgtctcaaaagatgttctgaagttgcgaggaaaagcgttgaaaaagcttggaacgatattccaaggcgcggaatctctgtaccatcgtgagaacagcctacgtgtggagtctccgatgaaagaggatggaacgacatcgtcgcactgaagactgataacatttttaacaatttgtgaattattcggatctctgtgcattattgtctgcttgtattattttgacacagcaggtttgctctggacgcaccctgtatgtatgggtttccttgttttctgtaaaaagggtgaatgctgagacacgaagcatctctgttattgacccggcattc

SEQ ID NO: 62819 - protein, 339 aa, Triticum aestivum
  peptide (1)..(339): Ceres Seq. ID no. 15221926
  misc_feature (6)..(71): Pfam Name: DnaJ domain Pfam Description: DnaJ domain
  misc_feature (1)..(290): Homolog of NCBI NO: 25406486 NR Description: hypothetical protein F22K20.12 [imported] -
  misc_feature (1)..(339): Homolog of NCBI NO: 2230757 NR Description: dnaJ-like protein [Arabidopsis thaliana]
  misc_feature (1)..(337): Homolog of NCBI NO: 30699227 NR Description: DnaJ protein family [Arabidopsis thaliana]
  misc_feature (1)..(339): Homolog of NCBI NO: 18394951 NR Description: DnaJ protein family [Arabidopsis thaliana]
  misc_feature (1)..(339): Homolog of NCBI NO: 26449747 NR Description: putative DnaJ protein [Arabidopsis thaliana]
  misc_feature (1)..(339): Homolog of NCBI NO: 15223142 NR Description: DnaJ protein family [Arabidopsis thaliana]
  misc_feature (1)..(338): Homolog of NCBI NO: 15226572 NR Description: DnaJ protein family [Arabidopsis thaliana]
  misc_feature (1)..(327): Homolog of NCBI NO: 15234962 NR Description: DnaJ protein family [Arabidopsis thaliana]
  misc_feature (229)..(312): Homolog of NCBI NO: 25458468 NR Description: dnaJ-like protein [imported] - rice
  misc_feature (1)..(201): Homolog of NCBI NO: 25458468 NR Description: dnaJ-like protein [imported] - rice
MVKETAYYETLGVSVDASPSDIKKAYYVQARLVHPDKNPGNPDAARKFQDLGEAYQVLSDPAKKEAYDKHGKEGLSQDNMVDPAAVFGMLFGSDYFEDYVGQLALASIASVEVDEGLSSQDARAKVQDKIKELQTEREKKLTQSLKDRLQPYVDGRKDDFVHWANAEAKRLSEAAFGEAMLHTVGYIYVRQAARELGKSKLYMGVPFIAEWVRDKGHTIKSQVHAASGAIALMQLQEGMKKVEEGADKEEQLMKSFEEKKEAMLNSLWKINVVDIESTLSRVCQAVLKDSTVSKDVLKLRGKALKKLGTIFQGAESLYHRENSLRVESPMKEDGTTSSH

SEQ ID NO: 62820 - protein, 260 aa, Triticum aestivum
  peptide (1)..(260): Ceres Seq. ID no. 15221927
  misc_feature (1)..(211): Homolog of NCBI NO: 25406486 NR Description: hypothetical protein F22K20.12 [imported] -
  misc_feature (1)..(260): Homolog of NCBI NO: 2230757 NR Description: dnaJ-like protein [Arabidopsis thaliana]
  misc_feature (1)..(258): Homolog of NCBI NO: 30699227 NR Description: DnaJ protein family [Arabidopsis thaliana]
  misc_feature (1)..(260): Homolog of NCBI NO: 18394951 NR Description: DnaJ protein family [Arabidopsis thaliana]
  misc_feature (1)..(260): Homolog of NCBI NO: 26449747 NR Description: putative DnaJ protein [Arabidopsis thaliana]
  misc_feature (1)..(260): Homolog of NCBI NO: 15223142 NR Description: DnaJ protein family [Arabidopsis thaliana]
  misc_feature (1)..(259): Homolog of NCBI NO: 15226572 NR Description: DnaJ protein family [Arabidopsis thaliana]
  misc_feature (1)..(248): Homolog of NCBI NO: 15234962 NR Description: DnaJ protein family [Arabidopsis thaliana]
  misc_feature (150)..(233): Homolog of NCBI NO: 25458468 NR Description: dnaJ-like protein [imported] - rice
  misc_feature (1)..(122): Homolog of NCBI NO: 25458468 NR Description: dnaJ-like protein [imported] - rice
MVDPAAVFGMLFGSDYFEDYVGQLALASIASVEVDEGLSSQDARAKVQDKIKELQTEREKKLTQSLKDRLQPYVDGRKDDFVHWANAEAKRLSEAAFGEAMLHTVGYIYVRQAARELGKSKLYMGVPFIAEWVRDKGHTIKSQVHAASGAIALMQLQEGMKKVEEGADKEEQLMKSFEEKKEAMLNSLWKINVVDIESTLSRVCQAVLKDSTVSKDVLKLRGKALKKLGTIFQGAESLYHRENSLRVESPMKEDGTTSSH

SEQ ID NO: 62821 - protein, 251 aa, Triticum aestivum
  peptide (1)..(251): Ceres Seq. ID no. 15221928
  misc_feature (1)..(202): Homolog of NCBI NO: 25406486 NR Description: hypothetical protein F22K20.12 [imported] -
  misc_feature (1)..(251): Homolog of NCBI NO: 2230757 NR Description: dnaJ-like protein [Arabidopsis thaliana]
  misc_feature (1)..(249): Homolog of NCBI NO: 30699227 NR Description: DnaJ protein family [Arabidopsis thaliana]
  misc_feature (1)..(251): Homolog of NCBI NO: 18394951 NR Description: DnaJ protein family [Arabidopsis thaliana]
  misc_feature (1)..(251): Homolog of NCBI NO: 26449747 NR Description: putative DnaJ protein [Arabidopsis thaliana]
  misc_feature (1)..(251): Homolog of NCBI NO: 15223142 NR Description: DnaJ protein family [Arabidopsis thaliana]
  misc_feature (1)..(250): Homolog of NCBI NO: 15226572 NR Description: DnaJ protein family [Arabidopsis thaliana]
  misc_feature (1)..(239): Homolog of NCBI NO: 15234962 NR Description: DnaJ protein family [Arabidopsis thaliana]
  misc_feature (141)..(224): Homolog of NCBI NO: 25458468 NR Description: dnaJ-like protein [imported] - rice
  misc_feature (1)..(113): Homolog of NCBI NO: 25458468 NR Description: dnaJ-like protein [imported] - rice
MLFGSDYFEDYVGQLALASIASVEVDEGLSSQDARAKVQDKIKELQTEREKKLTQSLKDRLQPYVDGRKDDFVHWANAEAKRLSEAAFGEAMLHTVGYIYVRQAARELGKSKLYMGVPFIAEWVRDKGHTIKSQVHAASGAIALMQLQEGMKKVEEGADKEEQLMKSFEEKKEAMLNSLWKINVVDIESTLSRVCQAVLKDSTVSKDVLKLRGKALKKLGTIFQGAESLYHRENSLRVESPMKEDGTTSSH

SEQ ID NO: 62822 - DNA, 1225 bp, Triticum aestivum
  misc_feature (1)..(1225): Ceres Seq. ID no. 12615485
atcctaaatcctccccaatccaggcgacaaggatctcgccatggcgccgccgcccaccgccgccgcggccgtccgttgccacccgcacatcctccgcaggggcctcctgcccgcttcgtcgccgctgctccccttcgcctcccgggtggcctcctccacgccgctccgcgcccagcccctgcgcttctcgctctcccccgtccccaagagcatctcctcctcctcgacctcccacatccccgtgcgctccctcttcaccgggatcgtcgaggaggtcggccgcgtgcgccgcatcggcccgccgcccacgcctcctgggggcgggggagacgcggctcccggtgtcgacctcgaggtcgagaccaagaacctcctcgccgggacgcagctgggcgacagcatcgccgtcgacgggacgtgcctcaccgtggcggccatcgacaccgctgcctccacgctcaccttcggcgtcgcgccggagaccctccggtgcacgtcactcggcgagcgcgtcgcgggcgacgacgttaacctcgagcgcgcgctcacgccggcgtctcgcatgggcgggcacttcgtccagggccacgtcgacggcaccggcgagatcgccgcgttccggcccgagggcgattctatctgggtcaccgtgcgtgcgccgccagagatcctcagcttgctcgtgcctaaggggttcgtcgccgtggacggaaccagcctcaccgtcgtcaatgtgaacgaggaggccgggtggttcgacttcatgcttgtgcgctacacgcaggacaatgttgtgctgccaaagaagaaggttggggataaggtgaaccttgaggctgacattcttgggaagtatgtagtgaagctacttgccgggagattggaggcaacatcaaaggcaaattcttgagttgtgcctgttggactgatgaactactatcagtattagtgcagcgtattcttgtccatcaataatagtgcattttttgcactaatgagtgaagctttttttcgtactaggggggtgatatagttcatgccattgcctgtttccatgtaaaagttatagcgtttccgcatggagaagcttttttcgggtgtgcatgatctgttaaccccattcaaatgaacaagatttgtttagttgttcataccaggagtccagcttttctgggacaacaatgaatgctagtgctcgtttgagtttatatttgatcattgcctg

SEQ ID NO: 62823 - protein, 289 aa, Triticum aestivum
  peptide (1)..(289): Ceres Seq. ID no. 12615486
  misc_feature (181)..(267): Pfam Name: Lumazine binding domain Pfam Description: Lumazine binding domain
  misc_feature (71)..(289): Homolog of NCBI NO: 6319733 NR Description: Riboflavin biosynthesis; Rib5p [Saccharomyces
  misc_feature (71)..(275): Homolog of NCBI NO: 18252608 NR Description: riboflavin synthase [Pichia guilliermondii]
  misc_feature (71)..(281): Homolog of NCBI NO: 19075812 NR Description: riboflavin synthase alpha chain
  misc_feature (71)..(277): Homolog of NCBI NO: 23020140 NR Description: hypothetical protein [Clostridium thermocellum
  misc_feature (71)..(288): Homolog of NCBI NO: 40740140 NR Description: hypothetical protein AN4231.2 [Aspergillus
  misc_feature (71)..(283): Homolog of NCBI NO: 22971150 NR Description: hypothetical protein [Chloroflexus aurantiacus]
  misc_feature (71)..(282): Homolog of NCBI NO: 32414525 NR Description: hypothetical protein [Neurospora crassa]
  misc_feature (101)..(277): Homolog of NCBI NO: 25287068 NR Description: probable riboflavin synthase alpha chain
  misc_feature (30)..(288): Homolog of NCBI NO: 18399445 NR Description: putative riboflavin synthase alpha chain
  misc_feature (29)..(288): Homolog of NCBI NO: 21593865 NR Description: putative riboflavin synthase alpha chain
MAPPPTAAAAVRCHPHILRRGLLPASSPLLPFASRVASSTPLRAQPLRFSLSPVPKSISSSSTSHIPVRSLFTGIVEEVGRVRRIGPPPTPPGGGGDAAPGVDLEVETKNLLAGTQLGDSIAVDGTCLTVAAIDTAASTLTFGVAPETLRCTSLGERVAGDDVNLERALTPASRMGGHFVQGHVDGTGEIAAFRPEGDSIWVTVRAPPEILSLLVPKGFVAVDGTSLTVVNVNEEAGWFDFMLVRYTQDNVVLPKKKVGDKVNLEADILGKYVVKLLAGRLEATSKANS

SEQ ID NO: 62824 - protein, 244 aa, Triticum aestivum
  peptide (1)..(244): Ceres Seq. ID no. 12615487
  misc_feature (1)..(154): Pfam Name: Formin Homology 2 Domain Pfam Description: Formin Homology 2 Domain
  misc_feature (3)..(244): Homolog of NCBI NO: 13592175 NR Description: ppg3 [Leishmania major]
  misc_feature (3)..(244): Homolog of NCBI NO: 13592175 NR Description: ppg3 [Leishmania major]
  misc_feature (2)..(183): Homolog of NCBI NO: 25143299 NR Description: pre-mRNA splicing SR protein related RSR-1 (68.2
  misc_feature (3)..(243): Homolog of NCBI NO: 11359723 NR Description: proteophosphoglycan, membrane-associated
  misc_feature (3)..(244): Homolog of NCBI NO: 13592175 NR Description: ppg3 [Leishmania major]
  misc_feature (31)..(244): Homolog of NCBI NO: 11359723 NR Description: proteophosphoglycan, membrane-associated
  misc_feature (3)..(244): Homolog of NCBI NO: 13592175 NR Description: ppg3 [Leishmania major]
  misc_feature (43)..(244): Homolog of NCBI NO: 11359723 NR Description: proteophosphoglycan, membrane-associated
  misc_feature (3)..(244): Homolog of NCBI NO: 13592175 NR Description: ppg3 [Leishmania major]
  misc_feature (1)..(244): Homolog of NCBI NO: 23017082 NR Description: hypothetical protein [Thermobifida fusca]
PKSSPIQATRISPWRRRPPPPRPSVATRTSSAGASCPLRRRCSPSPPGWPPPRRSAPSPCASRSPPSPRASPPPRPPTSPCAPSSPGSSRRSAACAASARRPRLLGAGETRLPVSTSRSRPRTSSPGRSWATASPSTGRASPWRPSTPLPPRSPSASRRRPSGARHSASASRATTLTSSARSRRRLAWAGTSSRATSTAPARSPRSGPRAILSGSPCVRRQRSSACSCLRGSSPWTEPASPSSM

SEQ ID NO: 62825 - protein, 176 aa, Triticum aestivum
  peptide (1)..(176): Ceres Seq. ID no. 12615488
ILNPPQSRRQGSRHGAAAHRRRGRPLPPAHPPQGPPARFVAAAPLRLPGGLLHAAPRPAPALLALPRPQEHLLLLDLPHPRALPLHRDRRGGRPRAPHRPAAHASWGRGRRGSRCRPRGRDQEPPRRDAAGRQHRRRRDVPHRGGHRHRCLHAHLRRRAGDPPVHVTRRARRGRRR

SEQ ID NO: 62826 - DNA, 907 bp, Triticum aestivum
  misc_feature (1)..(907): Ceres Seq. ID no. 12593115
cttctccccccttttgttcgtctcctaaaccgccgccagcatggacgccaagaagaggtcgccgcccgccccctcggccgccggagccgcgccccccgcggccaacggatacttcaactccgtcttctccgcgccggcgtcgcctgcggcaaatccaagagacgccaggcagatggacctgtacacgatactgaacaagcagaaccccaaagggcagagtggtgggggcattgcaggtaatgccaaatcccatggcagccctactataggtcgtgttgcttaccaagatggaaaacagttttatccaaacgagtcctcagagtcaccttattttggctcgtctgtgcattacggtggccgggacttctatgacagctctccacacaagcaagctgatgaatcacccagaaattataaggaggataatgcggatggctccctggctaccagaggtgattggtggcaaggttcgctttactactaaaaatactttgcaatggactctcctactgtgaacaaggaataaaaaggagtacgtcgagctggtaggctgtagagttgacatgagtcatcaggcataagaaaagtcatagtggaactacatctgttccgtcggtggtggcagtatttagatgcatcagtcacctaggcagacgtagacgtaccatgtgtctcttttctttgccttactagatttgagtgatgaaatgtaatgggactggtagggcagcagcaagtaggtcctacaaaaagttgctgctattttgcaactgacgagatcacttgctgtatgcgttatgtatcctagttcgtggttgtgttttggtaatatttggatttgcacatctgtttcggtctaccatttgtttgctgacagaaccatgatatgaacttgtgacaatggtct

SEQ ID NO: 62827 - protein, 147 aa, Triticum aestivum
  peptide (1)..(147): Ceres Seq. ID no. 12593116
  misc_feature (64)..(147): Homolog of NCBI NO: 22326622 NR Description: hypothetical protein; protein id: At5g05965.1
  misc_feature (12)..(147): Homolog of NCBI NO: 15241665 NR Description: putative protein
  misc_feature (1)..(147): Homolog of NCBI NO: 34908300 NR Description: P0005H10.22 [Oryza sativa (japonica
MDAKKRSPPAPSAAGAAPPAANGYFNSVFSAPASPAANPRDARQMDLYTILNKQNPKGQSGGGIAGNAKSHGSPTIGRVAYQDGKQFYPNESSESPYFGSSVHYGGRDFYDSSPHKQADESPRNYKEDNADGSLATRGDWWQGSLYY

SEQ ID NO: 62828 - protein, 103 aa, Triticum aestivum
  peptide (1)..(103): Ceres Seq. ID no. 12593117
  misc_feature (20)..(103): Homolog of NCBI NO: 22326622 NR Description: hypothetical protein; protein id: At5g05965.1
  misc_feature (1)..(103): Homolog of NCBI NO: 15241665 NR Description: putative protein
  misc_feature (1)..(103): Homolog of NCBI NO: 34908300 NR Description: P0005H10.22 [Oryza sativa (japonica
MDLYTILNKQNPKGQSGGGIAGNAKSHGSPTIGRVAYQDGKQFYPNESSESPYFGSSVHYGGRDFYDSSPHKQADESPRNYKEDNADGSLATRGDWWQGSLYY

SEQ ID NO: 62829 - protein, 79 aa, Triticum aestivum
  peptide (1)..(79): Ceres Seq. ID no. 12593118
LLPPFVRLLNRRQHGRQEEVAARPLGRRSRAPRGQRILQLRLLRAGVACGKSKRRQADGPVHDTEQAEPQRAEWWGHCR

SEQ ID NO: 62830 - DNA, 927 bp, Triticum aestivum
  misc_feature (1)..(927): Ceres Seq. ID no. 13662452
accaccctccctccatccacacctcagcctcagctcacctgctcctgctctccttgcctccctccatccgtcctccttgggattgggagagaagagaccacgagcaactcatccaaacaatgaagagcaggacgcagagcggccgcggaggagccatggtcgccgacgggggcagcaagatggagcgcaaggaggtggagaagaaccggcggctgcacatgaagggactctgcctcaagctctcctccctcctcccctcctcctcctcagcccaccacctccgccattattcttcctcgccgccgtccagcaacaaggacgcgacgacgcagctggaccagctggacagcgcggcggcgtacatcaagaagctcaagagccgggtcgacgaactcaagcgccgcaagcaggccgtcgtctccggcaccgctggctgctcgtcctccgtctccgccggcgactacaagggagcagcactgtccacaactgcgctgcctgtgatcgaggtgcggcaccaggacggaacgctggacgtggcgctggcgagcgaggccgggcggccgttccggctgcacgaggtgatcgccgtcctggagcaggagggcgccgaggtggtcagcgccagcttttcggtcgtgggtgacaagatcttctacacggtccattcccaggcattgtacccccgcatcggcctcgaggccggccgggtcgcccaccggctgcgcggcctcgccgcagccgcagccatctcgccgtcggtcctcctgacatgatctctttctctctttcttcgttgttttgccatggtgacagattagctgatctatgggcagcttagcttagtactgctctactctgctcgtgagtgagcttcaggtttgtctgaaatctactagtgtaggcacgtgcttgcgtatcctcctttct

SEQ ID NO: 62831 - protein, 256 aa, Triticum aestivum
  peptide (1)..(256): Ceres Seq. ID no. 13662453
  misc_feature (58)..(125): Pfam Name: Helix-loop-helix DNA-binding domain Pfam Description: Helix-loop-helix DNA-binding domain
  misc_feature (123)..(241): Homolog of NCBI NO: 18391177 NR Description: expressed protein [Arabidopsis thaliana]
  misc_feature (114)..(241): Homolog of NCBI NO: 5091553 NR Description: T10O24.22 [Arabidopsis thaliana]
  misc_feature (102)..(243): Homolog of NCBI NO: 25402607 NR Description: protein T10O24.23 [imported] - Arabidopsis
  misc_feature (56)..(221): Homolog of NCBI NO: 22328838 NR Description: bHLH protein family [Arabidopsis thaliana]
  misc_feature (56)..(221): Homolog of NCBI NO: 7486970 NR Description: hypothetical protein T13K14.130 - Arabidopsis
  misc_feature (27)..(243): Homolog of NCBI NO: 34894136 NR Description: P0482C06.16 [Oryza sativa (japonica
  misc_feature (47)..(243): Homolog of NCBI NO: 34894144 NR Description: P0482C06.20 [Oryza sativa (japonica
HPPSIHTSASAHLLLLSLPPSIRPPWDWERRDHEQLIQTMKSRTQSGRGGAMVADGGSKMERKEVEKNRRLHMKGLCLKLSSLLPSSSSAHHLRHYSSSPPSSNKDATTQLDQLDSAAAYIKKLKSRVDELKRRKQAVVSGTAGCSSSVSAGDYKGAALSTTALPVIEVRHQDGTLDVALASEAGRPFRLHEVIAVLEQEGAEVVSASFSVVGDKIFYTVHSQALYPRIGLEAGRVAHRLRGLAAAAAISPSVLLT

SEQ ID NO: 62832 - protein, 217 aa, Triticum aestivum
  peptide (1)..(217): Ceres Seq. ID no. 13662454
  misc_feature (19)..(86): Pfam Name: Helix-loop-helix DNA-binding domain Pfam Description: Helix-loop-helix DNA-binding domain
  misc_feature (84)..(202): Homolog of NCBI NO: 18391177 NR Description: expressed protein [Arabidopsis thaliana]
  misc_feature (75)..(202): Homolog of NCBI NO: 5091553 NR Description: T10O24.22 [Arabidopsis thaliana]
  misc_feature (63)..(204): Homolog of NCBI NO: 25402607 NR Description: protein T10O24.23 [imported] - Arabidopsis
  misc_feature (17)..(182): Homolog of NCBI NO: 22328838 NR Description: bHLH protein family [Arabidopsis thaliana]
  misc_feature (17)..(182): Homolog of NCBI NO: 7486970 NR Description: hypothetical protein T13K14.130 - Arabidopsis
  misc_feature (1)..(204): Homolog of NCBI NO: 34894136 NR Description: P0482C06.16 [Oryza sativa (japonica
  misc_feature (8)..(204): Homolog of NCBI NO: 34894144 NR Description: P0482C06.20 [Oryza sativa (japonica
MKSRTQSGRGGAMVADGGSKMERKEVEKNRRLHMKGLCLKLSSLLPSSSSAHHLRHYSSSPPSSNKDATTQLDQLDSAAAYIKKLKSRVDELKRRKQAVVSGTAGCSSSVSAGDYKGAALSTTALPVIEVRHQDGTLDVALASEAGRPFRLHEVIAVLEQEGAEVVSASFSVVGDKIFYTVHSQALYPRIGLEAGRVAHRLRGLAAAAAISPSVLLT

SEQ ID NO: 62833 - protein, 213 aa, Triticum aestivum
  peptide (1)..(213): Ceres Seq. ID no. 13662455
PPSLHPHLSLSSPAPALLASLHPSSLGLGEKRPRATHPNNEEQDAERPRRSHGRRRGQQDGAQGGGEEPAAAHEGTLPQALLPPPLLLLSPPPPPLFFLAAVQQQGRDDAAGPAGQRGGVHQEAQEPGRRTQAPQAGRRLRHRWLLVLRLRRRLQGSSTVHNCAACDRGAAPGRNAGRGAGERGRAAVPAARGDRRPGAGGRRGGQRQLFGRG

SEQ ID NO: 62834 - DNA, 1565 bp, Triticum aestivum
  misc_feature (1)..(1565): Ceres Seq. ID no. 14302306
gtgcccctcgcctccatcactcactctcacagccccccagctagctagtgccctctgcatctcgtgctcggagaacttagatcagcacagagcgagggtcgattagcagctgatcggcagatcatgggcgtggagggctgctgcaacaagaaggtgatggaggaggaggccctggtgaagaagatcaccggcctcgccgcggccatcggcgagctgccctcgctgagcccctcgccggcggtgaacgcgctcttcaccgagctggtgacgtcctgcatcccggcgagcaccgtcgacgtcgacgcgctgggcccggaggcgcaggagatgcgcgcccgcctcatccgcctctgcgccgacgccgagggccacctggaggcgcactactccgacctcctcgccgcgcacgacaacccgctcgaccacctcaccctcttcccctacttcaacaactacatcaagctcagccagctggagcacggcctcctcgcccgccacgtcccgggcccggccccggcccgcgtcgccttcctcggctccggcccgctgccgctcagctccctcgtgctcgccgcgcgccacctgcccgacgcctccttcgacaactacgacatctccggcgaggccaacgagcgcgccagccggctggtccgcaacgacgccgacgccggcgcgcgcatggcgttccgcacggcagacgtggccgacgtgacgaccgagctggcgggctacgacgtggtgttcctggcggcgctggtgggcatggcggccgaggagaaggcgcgcctggtggagcacctcgggaggcacatggcccccggcgcggcgctcgtggtgcggagcgcgcacggcgcgcgcgggttcctgtacccggtggtggaccccgaggagatccggcgaggcgggttcgaggtgctcaccgtgcaccacccggaggacgaggtgatcaactccgtcatcatcgcgcgcaaggcggcggcgccagcagccgtcgccgccgacggcgacgtgccggtgaacaacggcggcatgccggcccagtgcgcggtggcggtgagcagaccgtgcctgggctgcgcctgcgagctggggacgagggcgcaccagaagatgaaggagatggccatggaggagatggaggcgtaggccggccggcactccggcagacaccgtcaccgtcatcgcccagagcacggtgatgcatgaactcacccaccgattaatatttgcccgattaatcaccgaccgatacatacatgcatggtaataattggtttgtcctcatgcatggatggatggacgtggctacttatttaccataattattaatccttgcctgcgtatggctggctggattatttattttctaccgtaatcgtgccgtgtttgttttagcaatcgtctgacagctgctatatgcctccgggtttaacatagaggagggggatgatatgtgtcgtgttgtggtgtggtgagatcgagtcgagtcgagttgcctgcctgctagctgttgttgtaataagtgtttttgacactctatatgactcaagtgatccatcatcacc

SEQ ID NO: 62835 - protein, 340 aa, Triticum aestivum
  peptide (1)..(340): Ceres Seq. ID no. 14302307
  misc_feature (6)..(292): Pfam Name: Nicotianamine synthase protein Pfam Description: Nicotianamine synthase protein
  misc_feature (12)..(334): Homolog of NCBI NO: 19911064 NR Description: ZmNAS2 [Zea mays]
  misc_feature (13)..(338): Homolog of NCBI NO: 27151630 NR Description: Probable nicotianamine synthase 2
  misc_feature (13)..(334): Homolog of NCBI NO: 20387262 NR Description: ZmNAS3 [Zea mays]
  misc_feature (16)..(338): Homolog of NCBI NO: 27151641 NR Description: Probable nicotianamine synthase 3
  misc_feature (13)..(334): Homolog of NCBI NO: 27151634 NR Description: Probable nicotianamine synthase 1
  misc_feature (13)..(338): Homolog of NCBI NO: 27151640 NR Description: Probable nicotianamine synthase 2
  misc_feature (15)..(338): Homolog of NCBI NO: 11176988 NR Description: nicotianamine synthase 3 [Oryza sativa (indica
  misc_feature (15)..(338): Homolog of NCBI NO: 34898148 NR Description: nicotianamine synthase 3 [Oryza sativa (japonica
  misc_feature (14)..(338): Homolog of NCBI NO: 20387260 NR Description: nicotianamine synthase 1 [Zea mays]
  misc_feature (1)..(340): Homolog of NCBI NO: 27151636 NR Description: Nicotianamine synthase 9
MGVEGCCNKKVMEEEALVKKITGLAAAIGELPSLSPSPAVNALFTELVTSCIPASTVDVDALGPEAQEMRARLIRLCADAEGHLEAHYSDLLAAHDNPLDHLTLFPYFNNYIKLSQLEHGLLARHVPGPAPARVAFLGSGPLPLSSLVLAARHLPDASFDNYDISGEANERASRLVRNDADAGARMAFRTADVADVTTELAGYDVVFLAALVGMAAEEKARLVEHLGRHMAPGAALVVRSAHGARGFLYPVVDPEEIRRGGFEVLTVHHPEDEVINSVIIARKAAAPAAVAADGDVPVNNGGMPAQCAVAVSRPCLGCACELGTRAHQKMKEMAMEEMEA

SEQ ID NO: 62836 - protein, 329 aa, Triticum aestivum
  peptide (1)..(329): Ceres Seq. ID no. 14302308
  misc_feature (1)..(281): Pfam Name: Nicotianamine synthase protein Pfam Description: Nicotianamine synthase protein
  misc_feature (1)..(323): Homolog of NCBI NO: 19911064 NR Description: ZmNAS2 [Zea mays]
  misc_feature (2)..(327): Homolog of NCBI NO: 27151630 NR Description: Probable nicotianamine synthase 2
  misc_feature (2)..(323): Homolog of NCBI NO: 20387262 NR Description: ZmNAS3 [Zea mays]
  misc_feature (5)..(327): Homolog of NCBI NO: 27151641 NR Description: Probable nicotianamine synthase 3
  misc_feature (2)..(323): Homolog of NCBI NO: 27151634 NR Description: Probable nicotianamine synthase 1
  misc_feature (2)..(327): Homolog of NCBI NO: 27151640 NR Description: Probable nicotianamine synthase 2
  misc_feature (4)..(327): Homolog of NCBI NO: 11176988 NR Description: nicotianamine synthase 3 [Oryza sativa (indica
  misc_feature (4)..(327): Homolog of NCBI NO: 34898148 NR Description: nicotianamine synthase 3 [Oryza sativa (japonica
  misc_feature (3)..(327): Homolog of NCBI NO: 20387260 NR Description: nicotianamine synthase 1 [Zea mays]
  misc_feature (1)..(329): Homolog of NCBI NO: 27151636 NR Description: Nicotianamine synthase 9
MEEEALVKKITGLAAAIGELPSLSPSPAVNALFTELVTSCIPASTVDVDALGPEAQEMRARLIRLCADAEGHLEAHYSDLLAAHDNPLDHLTLFPYFNNYIKLSQLEHGLLARHVPGPAPARVAFLGSGPLPLSSLVLAARHLPDASFDNYDISGEANERASRLVRNDADAGARMAFRTADVADVTTELAGYDVVFLAALVGMAAEEKARLVEHLGRHMAPGAALVVRSAHGARGFLYPVVDPEEIRRGGFEVLTVHHPEDEVINSVIIARKAAAPAAVAADGDVPVNNGGMPAQCAVAVSRPCLGCACELGTRAHQKMKEMAMEEMEA

SEQ ID NO: 62837 - protein, 272 aa, Triticum aestivum
  peptide (1)..(272): Ceres Seq. ID no. 14302309
  misc_feature (1)..(224): Pfam Name: Nicotianamine synthase protein Pfam Description: Nicotianamine synthase protein
  misc_feature (1)..(266): Homolog of NCBI NO: 19911064 NR Description: ZmNAS2 [Zea mays]
  misc_feature (1)..(270): Homolog of NCBI NO: 27151630 NR Description: Probable nicotianamine synthase 2
  misc_feature (1)..(266): Homolog of NCBI NO: 20387262 NR Description: ZmNAS3 [Zea mays]
  misc_feature (1)..(270): Homolog of NCBI NO: 27151641 NR Description: Probable nicotianamine synthase 3
  misc_feature (1)..(266): Homolog of NCBI NO: 27151634 NR Description: Probable nicotianamine synthase 1
  misc_feature (1)..(270): Homolog of NCBI NO: 27151640 NR Description: Probable nicotianamine synthase 2
  misc_feature (1)..(270): Homolog of NCBI NO: 11176988 NR Description: nicotianamine synthase 3 [Oryza sativa (indica
  misc_feature (1)..(270): Homolog of NCBI NO: 34898148 NR Description: nicotianamine synthase 3 [Oryza sativa (japonica
  misc_feature (1)..(270): Homolog of NCBI NO: 20387260 NR Description: nicotianamine synthase 1 [Zea mays]
  misc_feature (1)..(272): Homolog of NCBI NO: 27151636 NR Description: Nicotianamine synthase 9
MRARLIRLCADAEGHLEAHYSDLLAAHDNPLDHLTLFPYFNNYIKLSQLEHGLLARHVPGPAPARVAFLGSGPLPLSSLVLAARHLPDASFDNYDISGEANERASRLVRNDADAGARMAFRTADVADVTTELAGYDVVFLAALVGMAAEEKARLVEHLGRHMAPGAALVVRSAHGARGFLYPVVDPEEIRRGGFEVLTVHHPEDEVINSVIIARKAAAPAAVAADGDVPVNNGGMPAQCAVAVSRPCLGCACELGTRAHQKMKEMAMEEMEA

SEQ ID NO: 62838 - DNA, 1263 bp, Triticum aestivum
  misc_feature (1)..(1263): Ceres Seq. ID no. 12615491
aatgaacatcttctccaaaggaggctctcccgttaggcccgttctctgatggagtcgcttgcctcgcaagcgaagccggctgccgtgctctggctcgccggcttcctccaggccgcgcgtctccaccgcgtcgtctccttctgcgtcagctcgagggctctgtcgatcagaatcgctcagtgcttcctgctcaacgggttcatcttcctggggagcttgctaaccttgaaatcagtggtcattccaactcttctatggatactgcccgagcaatgcgatcaatcatggggacaacatctatgtgaacacacaacagctgttgccttgtattcgttcttacgttcggggcttgtcgagattttctatgtattttggttttatcccctctacatcttcagctttataataagtacactttggtatggtgacattgctaagcatgctttggctgttgtgaaaagtaagaagctggatgcaagtcaagcacctgactctgaccctcacagcacatctgtatcagcagataggcctgaaggatttgatggggttgcgattggtgttggagagcaggtctattcgatacttcttttgactattttctttgctgaggttacagtgattggttacataccttaccttggtaaggcaatgaacttcatgttactgtctttgatgtatgcctactactgcttcgagtacaagtggaacttctttgcagtgagcctgaatcaccggcttgatttctttgagtcaaattgggctttctttgccggatttggtagtccatgtgtacttccgattttcttcttctctcctcttacaagttatggtgtgatggcaatactatacccactgtttgtcatgacagctgctggtacacaagaagagcaaaccattgatgaactgaaatctttgcatggagggaaactgaatagaatacccttgttctttgtcgcgaagcgactaacgacgcaagcgctgcagttgctcccagaggcacaaaaggagcaatgagtggtccacataatcacatgaactcagagttgcatagttctcatggaagtgatcatgtggaagctgcatctgagaggtgcatagttcacgcgaaagcgtggctgctcatgtgcgccacaccgcaatgtaaatattctgtaccattgccgctgtacatatacatatattgggccaataaaaaagaaactatggttgtccacgagatacatactgcaactgaagaaggaaatatacaaacatatactgtcc

SEQ ID NO: 62839 - protein, 321 aa, Triticum aestivum
  peptide (1)..(321): Ceres Seq. ID no. 12615492
  misc_feature (109)..(274): Homolog of NCBI NO: 31223768 NR Description: ENSANGP00000010382 [Anopheles gambiae]
  misc_feature (109)..(274): Homolog of NCBI NO: 6631104 NR Description: etoposide-induced mRNA [Homo sapiens]
  misc_feature (109)..(274): Homolog of NCBI NO: 6681289 NR Description: etoposide induced 2.4 mRNA [Mus musculus]
  misc_feature (109)..(274): Homolog of NCBI NO: 34863067 NR Description: similar to EI24 [Rattus norvegicus]
  misc_feature (109)..(274): Homolog of NCBI NO: 30585325 NR Description: Homo sapiens etoposide-induced mRNA [synthetic
  misc_feature (109)..(274): Homolog of NCBI NO: 12803171 NR Description: Similar to etoposide-induced mRNA [Homo sapiens]
  misc_feature (109)..(284): Homolog of NCBI NO: 19920698 NR Description: CG15626-PA [Drosophila melanogaster]
  misc_feature (4)..(55): Homolog of NCBI NO: 30680261 NR Description: predicted protein [Arabidopsis thaliana]
  misc_feature (125)..(216): Homolog of NCBI NO: 30680261 NR Description: predicted protein [Arabidopsis thaliana]
MESLASQAKPAAVLWLAGFLQAARLHRVVSFCVSSRALSIRIAQCFLLNGFIFLGSLLTLKSVVIPTLLWILPEQCDQSWGQHLCEHTTAVALYSFLRSGLVEIFYVFWFYPLYIFSFIISTLWYGDIAKHALAVVKSKKLDASQAPDSDPHSTSVSADRPEGFDGVAIGVGEQVYSILLLTIFFAEVTVIGYIPYLGKAMNFMLLSLMYAYYCFEYKWNFFAVSLNHRLDFFESNWAFFAGFGSPCVLPIFFFSPLTSYGVMAILYPLFVMTAAGTQEEQTIDELKSLHGGKLNRIPLFFVAKRLTTQALQLLPEAQKEQ

SEQ ID NO: 62840 - DNA, 1156 bp, Triticum aestivum
  misc_feature (1)..(1156): Ceres Seq. ID no. 13596555
gaaaaatctaggcatgcatctcgccgccgactacccccaccgcggcggtggccgcctcggcctagggccattcgcggcagcggtgctccgcaccgacaaccgtcgccgtgcgattgcaggcggcgcggtcctcgcctcggcgctgcttctcgtggccacaccacgactccgccactcgccggcgctccacctcttcgccgacatgcgcaacctcctcggcgtgcccaacaccctcaacgtgctcaccgcctacccgcttctccttgctggagtaccaggactcatcctgtgcctcttcggcggtggatgcttcggcataagcttaaggtgggaggccttgggatggttcctcttctatgtggggaatgtaggggcagcatttggctcagcttactatcacctcaagccagatgatgaccggttaatttgggacaggttgccgatgatgatgtcggcctcctcgcttttgtcgatattggtaattgaaagagttgatgagagggctgggttatcttgtttgatctcgctcttgtctcttttactggtgagcagtgcgtgtgaaaggattcttgatgatatgcgcctgtgggtagttttaaacctggttccttgtgttgccattcctgcaatgctattcttgttcgcgccaaagtatacacactcaagattttggtttcttgctacaggcttttaccttctggcaagattcgaaggccttgccgacagaaaggtttacagtgtgaatagatatttcattagcggtcattccttggagcacctttgcttcgccatggttacattgatacttactgtgatgctatccttcagaaatattaagatcaccagggactcgtgactacaactccaccattgcttgtttgtaacaaatggcaaatttcctgtcagaatttctatgttcggaagggcccctccagagtccggaagcacctgaagaaacataaataggtgatctatgtatcctatctttccactacctgggtgactgacgccctccatccctgggcggcatagacaagtcctgtgagattatttcaatgtgtgttcatgtcgtgagttatttgtgtttggagcttgttaactggaccagcagaaacattggacgactatattgcaatttatacagatttcagctgtc

SEQ ID NO: 62841 - protein, 284 aa, Triticum aestivum
  peptide (1)..(284): Ceres Seq. ID no. 13596556
  misc_feature (24)..(264): Homolog of NCBI NO: 27376099 NR Description: blr0988 [Bradyrhizobium japonicum]
  misc_feature (32)..(264): Homolog of NCBI NO: 23029224 NR Description: hypothetical protein [Microbulbifer degradans
  misc_feature (60)..(284): Homolog of NCBI NO: 29653854 NR Description: membrane protein, putative [Coxiella burnetii RSA
  misc_feature (34)..(284): Homolog of NCBI NO: 34905818 NR Description: P0483G10.13 [Oryza sativa (japonica
  misc_feature (40)..(284): Homolog of NCBI NO: 15223970 NR Description: expressed protein [Arabidopsis thaliana]
  misc_feature (34)..(282): Homolog of NCBI NO: 15239801 NR Description: expressed protein [Arabidopsis thaliana]
  misc_feature (177)..(280): Homolog of NCBI NO: 34903592 NR Description: P0419B01.9 [Oryza sativa (japonica
  misc_feature (5)..(106): Homolog of NCBI NO: 34903592 NR Description: P0419B01.9 [Oryza sativa (japonica
KNLGMHLAADYPHRGGGRLGLGPFAAAVLRTDNRRRAIAGGAVLASALLLVATPRLRHSPALHLFADMRNLLGVPNTLNVLTAYPLLLAGVPGLILCLFGGGCFGISLRWEALGWFLFYVGNVGAAFGSAYYHLKPDDDRLIWDRLPMMMSASSLLSILVIERVDERAGLSCLISLLSLLLVSSACERILDDMRLWVVLNLVPCVAIPAMLFLFAPKYTHSRFWFLATGFYLLARFEGLADRKVYSVNRYFISGHSLEHLCFAMVTLILTVMLSFRNIKITRDS

SEQ ID NO: 62842 - protein, 280 aa, Triticum aestivum
  peptide (1)..(280): Ceres Seq. ID no. 13596557
  misc_feature (20)..(260): Homolog of NCBI NO: 27376099 NR Description: blr0988 [Bradyrhizobium japonicum]
  misc_feature (28)..(260): Homolog of NCBI NO: 23029224 NR Description: hypothetical protein [Microbulbifer degradans
  misc_feature (56)..(280): Homolog of NCBI NO: 29653854 NR Description: membrane protein, putative [Coxiella burnetii RSA
  misc_feature (30)..(280): Homolog of NCBI NO: 34905818 NR Description: P0483G10.13 [Oryza sativa (japonica
  misc_feature (36)..(280): Homolog of NCBI NO: 15223970 NR Description: expressed protein [Arabidopsis thaliana]
  misc_feature (30)..(278): Homolog of NCBI NO: 15239801 NR Description: expressed protein [Arabidopsis thaliana]
  misc_feature (173)..(276): Homolog of NCBI NO: 34903592 NR Description: P0419B01.9 [Oryza sativa (japonica
  misc_feature (1)..(102): Homolog of NCBI NO: 34903592 NR Description: P0419B01.9 [Oryza sativa (japonica
MHLAADYPHRGGGRLGLGPFAAAVLRTDNRRRAIAGGAVLASALLLVATPRLRHSPALHLFADMRNLLGVPNTLNVLTAYPLLLAGVPGLILCLFGGGCFGISLRWEALGWFLFYVGNVGAAFGSAYYHLKPDDDRLIWDRLPMMMSASSLLSILVIERVDERAGLSCLISLLSLLLVSSACERILDDMRLWVVLNLVPCVAIPAMLFLFAPKYTHSRFWFLATGFYLLARFEGLADRKVYSVNRYFISGHSLEHLCFAMVTLILTVMLSFRNIKITRDS

SEQ ID NO: 62843 - protein, 217 aa, Triticum aestivum
  peptide (1)..(217): Ceres Seq. ID no. 13596558
  misc_feature (1)..(197): Homolog of NCBI NO: 27376099 NR Description: blr0988 [Bradyrhizobium japonicum]
  misc_feature (1)..(197): Homolog of NCBI NO: 23029224 NR Description: hypothetical protein [Microbulbifer degradans
  misc_feature (1)..(217): Homolog of NCBI NO: 29653854 NR Description: membrane protein, putative [Coxiella burnetii RSA
  misc_feature (1)..(217): Homolog of NCBI NO: 34905818 NR Description: P0483G10.13 [Oryza sativa (japonica
  misc_feature (1)..(217): Homolog of NCBI NO: 15223970 NR Description: expressed protein [Arabidopsis thaliana]
  misc_feature (1)..(215): Homolog of NCBI NO: 15239801 NR Description: expressed protein [Arabidopsis thaliana]
  misc_feature (110)..(213): Homolog of NCBI NO: 34903592 NR Description: P0419B01.9 [Oryza sativa (japonica
  misc_feature (1)..(39): Homolog of NCBI NO: 34903592 NR Description: P0419B01.9 [Oryza sativa (japonica
MRNLLGVPNTLNVLTAYPLLLAGVPGLILCLFGGGCFGISLRWEALGWFLFYVGNVGAAFGSAYYHLKPDDDRLIWDRLPMMMSASSLLSILVIERVDERAGLSCLISLLSLLLVSSACERILDDMRLWVVLNLVPCVAIPAMLFLFAPKYTHSRFWFLATGFYLLARFEGLADRKVYSVNRYFISGHSLEHLCFAMVTLILTVMLSFRNIKITRDS

SEQ ID NO: 62844 - DNA, 1120 bp, Triticum aestivum
  misc_feature (1)..(1120): Ceres Seq. ID no. 12587345
cattccattcccccattccccgctccaacaacctccatctctcctctcctctcctctcctctcgtctccacagcagcagcagctccggttcgagctcgagcgaggaagaagtataccatttggcccgtgaagatgttggccatcttccagaagcaggtggcgcacgcgccgcaggagctcaacagcccgcgcggcagcaccgccaagcccaggaaccccgacgagatcctccgcgacttccacgccgcccaccccgccgacgccttctccacctccttcggcggcggcgccgccctcgcctgcgtcgccgcgcagccccgctccctcgccgccggcgggtaccagcggatgttctgcgggctggacgacatctactgcgtgttcatgggcacgctggacaacctgagcagtctgatgcggcagtacggcctcaccggccgctccaccaacgaggcgctgctggtgatcgaggcctaccgcacgctgcgcgaccggggcccctacccggcggaccaggtggtgaaggacctctccggctccttcgccttcgtcgtcttcgacaaccgcggccggtccgggtcgggggcggcggtgttcgcggcgcagagcacggacggcggggtgccgctgcactggggcgtggcggcggacgggtcggtggtgatctgcgacgaccgcggcgtggccaaggccgggtgcgggcggtcgtacgcgccgttcccgcccgggtgcatgttccacagcgagggcgggctcaagagcttcgagcaccccatgaaccgcctcaaggcgctccccagggtggacagcgagggcgtcatgtgcggcgccaacttcaaggtcgacgccttcaccaagatcaactccatgccccgcgtcggcagcgccaccaactgggccgccgcctgggacgacgccgccatctgatcctcgccggcgccggcgttgctctccgtcgtggcctcgtcgggcttgggcttattgcattttacttgtttttctttccttggcaatgtacattctgatctgatctgatctgagccgtgtgtgggcgtgggcgcgctggcacgtacggctgtttgcttgtacgatggaggaataagactttgcttccagtcct

SEQ ID NO: 62845 - protein, 340 aa, Triticum aestivum
  peptide (1)..(340): Ceres Seq. ID no. 12587346
  misc_feature (21)..(318): Homolog of NCBI NO: 22960097 NR Description: hypothetical protein [Rhodobacter sphaeroides]
FHSPIPRSNNLHLSSPLLSSRLHSSSSSGSSSSEEEVYHLAREDVGHLPEAGGARAAGAQQPARQHRQAQEPRRDPPRLPRRPPRRRLLHLLRRRRRPRLRRRAAPLPRRRRVPADVLRAGRHLLRVHGHAGQPEQSDAAVRPHRPLHQRGAAGDRGLPHAARPGPLPGGPGGEGPLRLLRLRRLRQPRPVRVGGGGVRGAEHGRRGAAALGRGGGRVGGDLRRPRRGQGRVRAVVRAVPARVHVPQRGRAQELRAPHEPPQGAPQGGQRGRHVRRQLQGRRLHQDQLHAPRRQRHQLGRRLGRRRHLILAGAGVALRRGLVGLGLIAFYLFFFPWQCTF

SEQ ID NO: 62846 - protein, 308 aa, Triticum aestivum
  peptide (1)..(308): Ceres Seq. ID no. 12587347
  misc_feature (45)..(306): Homolog of NCBI NO: 542200 NR Description: hypothetical protein - garden asparagus
HSIPPFPAPTTSISPLLSSPLVSTAAAAPVRARARKKYTIWPVKMLAIFQKQVAHAPQELNSPRGSTAKPRNPDEILRDFHAAHPADAFSTSFGGGAALACVAAQPRSLAAGGYQRMFCGLDDIYCVFMGTLDNLSSLMRQYGLTGRSTNEALLVIEAYRTLRDRGPYPADQVVKDLSGSFAFVVFDNRGRSGSGAAVFAAQSTDGGVPLHWGVAADGSVVICDDRGVAKAGCGRSYAPFPPGCMFHSEGGLKSFEHPMNRLKALPRVDSEGVMCGANFKVDAFTKINSMPRVGSATNWAAAWDDAAI

SEQ ID NO: 62847 - protein, 264 aa, Triticum aestivum
  peptide (1)..(264): Ceres Seq. ID no. 12587348
  misc_feature (1)..(262): Homolog of NCBI NO: 542200 NR Description: hypothetical protein - garden asparagus
MLAIFQKQVAHAPQELNSPRGSTAKPRNPDEILRDFHAAHPADAFSTSFGGGAALACVAAQPRSLAAGGYQRMFCGLDDIYCVFMGTLDNLSSLMRQYGLTGRSTNEALLVIEAYRTLRDRGPYPADQVVKDLSGSFAFVVFDNRGRSGSGAAVFAAQSTDGGVPLHWGVAADGSVVICDDRGVAKAGCGRSYAPFPPGCMFHSEGGLKSFEHPMNRLKALPRVDSEGVMCGANFKVDAFTKINSMPRVGSATNWAAAWDDAAI

SEQ ID NO: 62848 - DNA, 697 bp, Triticum aestivum
  misc_feature (1)..(697): Ceres Seq. ID no. 15175129
acaccgcagcatcagcagcccgcctcacatcccacccaaacccagcctccccacacgctccaaccaccagcacgcatggcacccaaggcggcggagaagaagccggtggtggccgcggagaagaccccggcggggaagaagcccaaggcggagaagcgggcgccggcgtccaaggaggccggcggcgagggcaagacgaggggcaggaagaagggcagcaaggccaagaagggcgtggagacgtacaagatctacatcttcaaggtgctgaagcaggtgcacgagatcaaggacttcctgctgacggcgcgccggaaggacgcgcggtcggtgcggatcaagaggaccaaggacgccgtcaagttcaaggtgcgctgctccaggtacctctacacgctctgcgtcttcgacgccgacaaggccaacaagctcaagcagtccctcccaccaggtttgagcgtccaggaggtttaagcatcaagccagacaatgccttttctagtagcgggaatgttctatccatcttgctttagtaactgttagcaggctctccttgtttacccccattaagagagttttgatgtcccaagactggaatgtaatgttgggagctatgtggttgaacctgtgaggatttttgtgttattttcacttgctggagaaggagatccattatcttatcctaaattggtttagt

SEQ ID NO: 62849 - protein, 176 aa, Triticum aestivum
  peptide (1)..(176): Ceres Seq. ID no. 15175130
  misc_feature (14)..(155): Pfam Name: High molecular weight glutenin subunit Pfam Description: High molecular weight glutenin subunit
  misc_feature (96)..(160): Homolog of NCBI NO: 7489588 NR Description: ribosomal protein homolog - rice
TAASAARLTSHPNPASPHAPTTSTHGTQGGGEEAGGGRGEDPGGEEAQGGEAGAGVQGGRRRGQDEGQEEGQQGQEGRGDVQDLHLQGAEAGARDQGLPADGAPEGRAVGADQEDQGRRQVQGALLQVPLHALRLRRRQGQQAQAVPPTRFERPGGLSIKPDNAFSSSGNVLSILL

SEQ ID NO: 62850 - protein, 157 aa, Triticum aestivum
  peptide (1)..(157): Ceres Seq. ID no. 15175131
  misc_feature (91)..(157): Pfam Name: Ribosomal L38e protein family Pfam Description: Ribosomal L38e protein family
  misc_feature (17)..(94): Homolog of NCBI NO: 34895900 NR Description: putative histone H2B [Oryza sativa (japonica
  misc_feature (17)..(94): Homolog of NCBI NO: 399854 NR Description: Histone H2B.2
  misc_feature (27)..(155): Homolog of NCBI NO: 34875039 NR Description: similar to tweety homolog 2 [Rattus norvegicus]
  misc_feature (91)..(157): Homolog of NCBI NO: 27497793 NR Description: 60S ribosomal protein L38 [Chlamydomonas
  misc_feature (91)..(157): Homolog of NCBI NO: 15825507 NR Description: ribosomal protein L38 [Branchiostoma belcheri]
  misc_feature (30)..(94): Homolog of NCBI NO: 122033 NR Description: HISTONE H2B.2
  misc_feature (91)..(157): Homolog of NCBI NO: 1173043 NR Description: 60S RIBOSOMAL PROTEIN L38
  misc_feature (91)..(157): Homolog of NCBI NO: 15224284 NR Description: 60S ribosomal protein L38 (RPL38A) [Arabidopsis
  misc_feature (91)..(157): Homolog of NCBI NO: 34898514 NR Description: putative 60S ribosomal protein L38
  misc_feature (91)..(157): Homolog of NCBI NO: 33146530 NR Description: putative 60S ribosomal protein L38
TPQHQQPASHPTQTQPPHTLQPPARMAPKAAEKKPVVAAEKTPAGKKPKAEKRAPASKEAGGEGKTRGRKKGSKAKKGVETYKIYIFKVLKQVHEIKDFLLTARRKDARSVRIKRTKDAVKFKVRCSRYLYTLCVFDADKANKLKQSLPPGLSVQEV

SEQ ID NO: 62851 - protein, 132 aa, Triticum aestivum
  peptide (1)..(132): Ceres Seq. ID no. 15175132
  misc_feature (66)..(132): Pfam Name: Ribosomal L38e protein family Pfam Description: Ribosomal L38e protein family
  misc_feature (1)..(69): Homolog of NCBI NO: 34895900 NR Description: putative histone H2B [Oryza sativa (japonica
  misc_feature (1)..(69): Homolog of NCBI NO: 399854 NR Description: Histone H2B.2
  misc_feature (2)..(130): Homolog of NCBI NO: 34875039 NR Description: similar to tweety homolog 2 [Rattus norvegicus]
  misc_feature (66)..(132): Homolog of NCBI NO: 27497793 NR Description: 60S ribosomal protein L38 [Chlamydomonas
  misc_feature (66)..(132): Homolog of NCBI NO: 15825507 NR Description: ribosomal protein L38 [Branchiostoma belcheri]
  misc_feature (5)..(69): Homolog of NCBI NO: 122033 NR Description: HISTONE H2B.2
  misc_feature (66)..(132): Homolog of NCBI NO: 1173043 NR Description: 60S RIBOSOMAL PROTEIN L38
  misc_feature (66)..(132): Homolog of NCBI NO: 15224284 NR Description: 60S ribosomal protein L38 (RPL38A) [Arabidopsis
  misc_feature (66)..(132): Homolog of NCBI NO: 34898514 NR Description: putative 60S ribosomal protein L38
  misc_feature (66)..(132): Homolog of NCBI NO: 33146530 NR Description: putative 60S ribosomal protein L38
MAPKAAEKKPVVAAEKTPAGKKPKAEKRAPASKEAGGEGKTRGRKKGSKAKKGVETYKIYIFKVLKQVHEIKDFLLTARRKDARSVRIKRTKDAVKFKVRCSRYLYTLCVFDADKANKLKQSLPPGLSVQEV

SEQ ID NO: 62852 - DNA, 1979 bp, Triticum aestivum
  misc_feature (1)..(1979): Ceres Seq. ID no. 14313559
atgagaagatcaccatagcactggacaacctcccgatcccgagcagctccgattggaaggccgccgtggcgagatcccgcgcgggcagggcctcgatgggaccaccgccgaccaggtggcccctgctggccgccctcgtcgcggcggcgctgctcgccggcgcggcggcggcgacggaggaggcctacgtcacgctgctctacggcgacgagttcgtcctcggcgtgcgcgtcctgggcaagtccatccgcgacaccggcacgcggcgggacatggtcgtgctcgtctccgacggcgtctccgagtactcgcgggagctcctcgaggctgatggttggatcgtgaagcgtataactttactggctaatcctaaccaagtgagaccaacgaggttttggggtgtctacacaaagttgaagatattcaacatgacaagctacaaaaaggttgtttatcttgatgcagatactgtagttgtaaaaagtatcgaggatgttttcaagtgtaggaagttctgtgggaacttgaagcattctgaaagaatgaattccggagtgatggttgtggagccatctgaaactgttttcaaggatatgattagccaagtagaccggttgccttcctacactggaggggatcaaggttttcttaattcatattatgctgattttgctaactcccgcgtgtatgagccagactcacctttaacacctgaaccggagacacagcgcctttctaccttgtataatgctgatgttggtctttacatgctagccaacaagtggatggttgatgaaaaggaacttagagttattcactacacactaggtccccttaaaccctgggactggtggacagcttggcttgtaaaacctgtggagatatggcaggatgttaggcaaaaacttgaagaatctcttccgggaaccggtgggggaaggaaccctcatgatcagctggtggtcaaatttttattcattcttcccttctgcctgctgttatttggttattaccaatcatgctttcagaactataaggattttccaagtgtgcagtctttatgtgcgtttgcaagaagaggccgtcataagtataagtctgaagaggcacttccatcttattcagcagttggtgtttcatcatctacattttctacttcaaatcaaagaatctcaaacgggccacatctgaagctgccttcttatttcggggcgattgctgtgctaatctgttttatgtctgctggtgtctctcttgcctttgctttcactatcattccacgacaaattatgccatggacaggtctgctactgatgtttgagtggaccttcgtggcattcttcttattgtttggtagctatctccgttttgtctatcgatggggaagtatcagtgcaactcatgtgggatatagcaattctgattcatcagagaatcacatggctacaggccatcatcagcgcaatatatctgacttcgacatggaggcgacattttactggacagggatggctgtcatagctatcattactgtattttcaccaactatcttgggtataactgcattatttacaaagctagggttgatggttgccggtggtgttctgctggcatcttttatgacgtatgcttcggtgcatcttgctatctcagccttccacaagggtcaaaaagataggaatgggtcgagaactagaagaatttgtttctggtgtttgtagtaagctttgtgcctgcattgttaatttagttcatgttgttgtacatttttactcaaggaaattttggtggttccgttggcacagatattccacttttgtaacactgatgccaaatcaaaggtacataggttccaatagttgacatgcagctcgcaggcctgcaagtgtaaagctttttgtctataaaactcttcctgccatttgctcgttgtacaatatgatcggcggttctatattggaactatggaacatgaactc

SEQ ID NO: 62853 - protein, 572 aa, Triticum aestivum
  peptide (1)..(572): Ceres Seq. ID no. 14313560
  misc_feature (54)..(281): Homolog of NCBI NO: 22330689 NR Description: glycogenin glucosyltransferase (glycogenin) -
  misc_feature (143)..(303): Homolog of NCBI NO: 39596633 NR Description: Hypothetical protein CBG07620 [Caenorhabditis
  misc_feature (143)..(304): Homolog of NCBI NO: 17569749 NR Description: predicted CDS, glycosyl transferase, family 8
  misc_feature (134)..(304): Homolog of NCBI NO: 7507569 NR Description: hypothetical protein T10B10.8 - Caenorhabditis
  misc_feature (39)..(571): Homolog of NCBI NO: 18087513 NR Description: AT5g18480/F20L16_200 [Arabidopsis thaliana]
  misc_feature (39)..(571): Homolog of NCBI NO: 22326882 NR Description: glycogenin glucosyltransferase (glycogenin) -
  misc_feature (531)..(557): Homolog of NCBI NO: 38568059 NR Description: OSJNBa0073E02.8 [Oryza sativa (japonica
  misc_feature (277)..(342): Homolog of NCBI NO: 38568059 NR Description: OSJNBa0073E02.8 [Oryza sativa (japonica
  misc_feature (383)..(471): Homolog of NCBI NO: 38568059 NR Description: OSJNBa0073E02.8 [Oryza sativa (japonica
  misc_feature (34)..(260): Homolog of NCBI NO: 38568059 NR Description: OSJNBa0073E02.8 [Oryza sativa (japonica
EKITIALDNLPIPSSSDWKAAVARSRAGRASMGPPPTRWPLLAALVAAALLAGAAAATEEAYVTLLYGDEFVLGVRVLGKSIRDTGTRRDMVVLVSDGVSEYSRELLEADGWIVKRITLLANPNQVRPTRFWGVYTKLKIFNMTSYKKVVYLDADTVVVKSIEDVFKCRKFCGNLKHSERMNSGVMVVEPSETVFKDMISQVDRLPSYTGGDQGFLNSYYADFANSRVYEPDSPLTPEPETQRLSTLYNADVGLYMLANKWMVDEKELRVIHYTLGPLKPWDWWTAWLVKPVEIWQDVRQKLEESLPGTGGGRNPHDQLVVKFLFILPFCLLLFGYYQSCFQNYKDFPSVQSLCAFARRGRHKYKSEEALPSYSAVGVSSSTFSTSNQRISNGPHLKLPSYFGAIAVLICFMSAGVSLAFAFTIIPRQIMPWTGLLLMFEWTFVAFFLLFGSYLRFVYRWGSISATHVGYSNSDSSENHMATGHHQRNISDFDMEATFYWTGMAVIAIITVFSPTILGITALFTKLGLMVAGGVLLASFMTYASVHLAISAFHKGQKDRNGSRTRRICFWCL

SEQ ID NO: 62854 - protein, 541 aa, Triticum aestivum
  peptide (1)..(541): Ceres Seq. ID no. 14313561
  misc_feature (23)..(250): Homolog of NCBI NO: 22330689 NR Description: glycogenin glucosyltransferase (glycogenin) -
  misc_feature (112)..(272): Homolog of NCBI NO: 39596633 NR Description: Hypothetical protein CBG07620 [Caenorhabditis
  misc_feature (112)..(273): Homolog of NCBI NO: 17569749 NR Description: predicted CDS, glycosyl transferase, family 8
  misc_feature (103)..(273): Homolog of NCBI NO: 7507569 NR Description: hypothetical protein T10B10.8 - Caenorhabditis
  misc_feature (8)..(540): Homolog of NCBI NO: 18087513 NR Description: AT5g18480/F20L16_200 [Arabidopsis thaliana]
  misc_feature (8)..(540): Homolog of NCBI NO: 22326882 NR Description: glycogenin glucosyltransferase (glycogenin) -
  misc_feature (500)..(526): Homolog of NCBI NO: 38568059 NR Description: OSJNBa0073E02.8 [Oryza sativa (japonica
  misc_feature (246)..(311): Homolog of NCBI NO: 38568059 NR Description: OSJNBa0073E02.8 [Oryza sativa (japonica
  misc_feature (352)..(440): Homolog of NCBI NO: 38568059 NR Description: OSJNBa0073E02.8 [Oryza sativa (japonica
  misc_feature (3)..(229): Homolog of NCBI NO: 38568059 NR Description: OSJNBa0073E02.8 [Oryza sativa (japonica
MGPPPTRWPLLAALVAAALLAGAAAATEEAYVTLLYGDEFVLGVRVLGKSIRDTGTRRDMVVLVSDGVSEYSRELLEADGWIVKRITLLANPNQVRPTRFWGVYTKLKIFNMTSYKKVVYLDADTVVVKSIEDVFKCRKFCGNLKHSERMNSGVMVVEPSETVFKDMISQVDRLPSYTGGDQGFLNSYYADFANSRVYEPDSPLTPEPETQRLSTLYNADVGLYMLANKWMVDEKELRVIHYTLGPLKPWDWWTAWLVKPVEIWQDVRQKLEESLPGTGGGRNPHDQLVVKFLFILPFCLLLFGYYQSCFQNYKDFPSVQSLCAFARRGRHKYKSEEALPSYSAVGVSSSTFSTSNQRISNGPHLKLPSYFGAIAVLICFMSAGVSLAFAFTIIPRQIMPWTGLLLMFEWTFVAFFLLFGSYLRFVYRWGSISATHVGYSNSDSSENHMATGHHQRNISDFDMEATFYWTGMAVIAIITVFSPTILGITALFTKLGLMVAGGVLLASFMTYASVHLAISAFHKGQKDRNGSRTRRICFWCL

SEQ ID NO: 62855 - protein, 482 aa, Triticum aestivum
  peptide (1)..(482): Ceres Seq. ID no. 14313562
  misc_feature (1)..(191): Homolog of NCBI NO: 22330689 NR Description: glycogenin glucosyltransferase (glycogenin) -
  misc_feature (53)..(213): Homolog of NCBI NO: 39596633 NR Description: Hypothetical protein CBG07620 [Caenorhabditis
  misc_feature (53)..(214): Homolog of NCBI NO: 17569749 NR Description: predicted CDS, glycosyl transferase, family 8
  misc_feature (44)..(214): Homolog of NCBI NO: 7507569 NR Description: hypothetical protein T10B10.8 - Caenorhabditis
  misc_feature (1)..(481): Homolog of NCBI NO: 18087513 NR Description: AT5g18480/F20L16_200 [Arabidopsis thaliana]
  misc_feature (1)..(481): Homolog of NCBI NO: 22326882 NR Description: glycogenin glucosyltransferase (glycogenin) -
  misc_feature (441)..(467): Homolog of NCBI NO: 38568059 NR Description: OSJNBa0073E02.8 [Oryza sativa (japonica
  misc_feature (187)..(252): Homolog of NCBI NO: 38568059 NR Description: OSJNBa0073E02.8 [Oryza sativa (japonica
  misc_feature (293)..(381): Homolog of NCBI NO: 38568059 NR Description: OSJNBa0073E02.8 [Oryza sativa (japonica
  misc_feature (1)..(170): Homolog of NCBI NO: 38568059 NR Description: OSJNBa0073E02.8 [Oryza sativa (japonica
MVVLVSDGVSEYSRELLEADGWIVKRITLLANPNQVRPTRFWGVYTKLKIFNMTSYKKVVYLDADTVVVKSIEDVFKCRKFCGNLKHSERMNSGVMVVEPSETVFKDMISQVDRLPSYTGGDQGFLNSYYADFANSRVYEPDSPLTPEPETQRLSTLYNADVGLYMLANKWMVDEKELRVIHYTLGPLKPWDWWTAWLVKPVEIWQDVRQKLEESLPGTGGGRNPHDQLVVKFLFILPFCLLLFGYYQSCFQNYKDFPSVQSLCAFARRGRHKYKSEEALPSYSAVGVSSSTFSTSNQRISNGPHLKLPSYFGAIAVLICFMSAGVSLAFAFTIIPRQIMPWTGLLLMFEWTFVAFFLLFGSYLRFVYRWGSISATHVGYSNSDSSENHMATGHHQRNISDFDMEATFYWTGMAVIAIITVFSPTILGITALFTKLGLMVAGGVLLASFMTYASVHLAISAFHKGQKDRNGSRTRRICFWCL

SEQ ID NO: 62856 - DNA, 1410 bp, Triticum aestivum
  misc_feature (1)..(1410): Ceres Seq. ID no. 14301538
ctcgatcttcttgtttcagcctccacacacttggccatctcgcaagccgtgacagggcgatcaatggcgcccctacgtccgcgcctggccgccctgctcgctctgtgcgcgtgcgccatggctccgccggcggccgccgccaacgtgtcgatcacgacgtgccggtccttctgcggcaacatcacggtggactacccgttcgcgctccacgccgggtgcggccacgcggggttccgcgacctgctctactgcatcgaccgcacgctcatgctgcacctcccctcgggctcctaccgcgtcctcgacatcgactacgcctaccgcggcctcaccctgcacgacccggccatgtccgactgccgcgccatcgaccgctccccgggcggccgcggcaacgggttcgtcgtcgagccgtggcgcgcgccgttcctggccccggacccggacaacgtgttcctcctcctcggctgccgcgccagctcgccgctcttccagggcttccccgaccgccacctgccgtgccggaacgtgtccgggatggggtgcggcgactactacggctgccccgcgtgggacgactacgggcgccggccgtcgggggcggcgtacgggtcggccgtgccgcccgagtgctgcgcggtctcgtagggcgccatccgggccgtgaacgtgagccggctccagtgcgaggggtacagcagcgcgtacagcctcgcgccggtgcgcgcggagggggccggcggctgggcgtacggcatccgggtggcgtgggcgctgccggaggcgaaccgggggttctgcggcgcgtgccgcgccacgggcggggtgtgcggccacgacgtggagagccgcggcgacctgtgcctctgcggtgactggaactcgacttccaactgcgactcctcggcggacgccgcgccgtcaagcaccgccacgcctggcatcgccattgccgctcttctcttggcccttctcgcctcaggattgtcgtccgggtcaatagcgaacatgtgagggacagagggagtgtgcctgtgaaggcgtcatgtttcatccaacagtggccactgacgagctgttcgtgccgccatgattacctccgccgtctggtgtaccgctgcaatacttttgtgtagacaaaaactagtgcgactgaaatgtttgtctgcggcataaatctttgattaggaaatcagtgtcatattacattcgaagtatacctacaaaacatatgcgagtcagaactggggtatattgtgagcttgctcgattcatcatgcttattcgatttgatgtggctccgtttgcatttgtgagtgatgcgttgcggtcctcgcggaggcatgaaaatatgtttgaatatgtttcgcccgtattaacgtataaatgcattacctagtttttttttcg

SEQ ID NO: 62857 - protein, 290 aa, Triticum aestivum
  peptide (1)..(290): Ceres Seq. ID no. 14301539
  misc_feature (58)..(270): Homolog of NCBI NO: 23018788 NR Description: hypothetical protein [Thermobifida fusca]
  misc_feature (110)..(288): Homolog of NCBI NO: 29247944 NR Description: GLP_26_54603_52153 [Giardia lamblia ATCC 50803]
RSSCFSLHTLGHLASRDRAINGAPTSAPGRPARSVRVRHGSAGGRRQRVDHDVPVLLRQHHGGLPVRAPRRVRPRGVPRPALLHRPHAHAAPPLGLLPRPRHRLRLPRPHPARPGHVRLPRHRPLPGRPRQRVRRRAVARAVPGPGPGQRVPPPRLPRQLAALPGLPRPPPAVPERVRDGVRRLLRLPRVGRLRAPAVGGGVRVGRAARVLRGLVGRHPGREREPAPVRGVQQRVQPRAGARGGGRRLGVRHPGGVGAAGGEPGVLRRVPRHGRGVRPRRGEPRRPVPLR

SEQ ID NO: 62858 - protein, 215 aa, Triticum aestivum
  peptide (1)..(215): Ceres Seq. ID no. 14301540
  misc_feature (22)..(215): Homolog of NCBI NO: 18391330 NR Description: expressed protein [Arabidopsis thaliana]
  misc_feature (46)..(215): Homolog of NCBI NO: 25372857 NR Description: protein F14N23.27 [imported] - Arabidopsis
  misc_feature (46)..(215): Homolog of NCBI NO: 18391149 NR Description: expressed protein [Arabidopsis thaliana]
  misc_feature (42)..(215): Homolog of NCBI NO: 15229029 NR Description: expressed protein [Arabidopsis thaliana]
  misc_feature (51)..(215): Homolog of NCBI NO: 15240650 NR Description: hypothetical protein [Arabidopsis thaliana]
LDLLVSASTHLAISQAVTGRSMAPLRPRLAALLALCACAMAPPAAAANVSITTCRSFCGNITVDYPFALHAGCGHAGFRDLLYCIDRTLMLHLPSGSYRVLDIDYAYRGLTLHDPAMSDCRAIDRSPGGRGNGFVVEPWRAPFLAPDPDNVFLLLGCRASSPLFQGFPDRHLPCRNVSGMGCGDYYGCPAWDDYGRRPSGAAYGSAVPPECCAVS

SEQ ID NO: 62859 - protein, 194 aa, Triticum aestivum
  peptide (1)..(194): Ceres Seq. ID no. 14301541
  misc_feature (1)..(194): Homolog of NCBI NO: 18391330 NR Description: expressed protein [Arabidopsis thaliana]
  misc_feature (25)..(194): Homolog of NCBI NO: 25372857 NR Description: protein F14N23.27 [imported] - Arabidopsis
  misc_feature (25)..(194): Homolog of NCBI NO: 18391149 NR Description: expressed protein [Arabidopsis thaliana]
  misc_feature (21)..(194): Homolog of NCBI NO: 15229029 NR Description: expressed protein [Arabidopsis thaliana]
  misc_feature (30)..(194): Homolog of NCBI NO: 15240650 NR Description: hypothetical protein [Arabidopsis thaliana]
MAPLRPRLAALLALCACAMAPPAAAANVSITTCRSFCGNITVDYPFALHAGCGHAGFRDLLYCIDRTLMLHLPSGSYRVLDIDYAYRGLTLHDPAMSDCRAIDRSPGGRGNGFVVEPWRAPFLAPDPDNVFLLLGCRASSPLFQGFPDRHLPCRNVSGMGCGDYYGCPAWDDYGRRPSGAAYGSAVPPECCAVS

SEQ ID NO: 62860 - DNA, 1362 bp, Triticum aestivum
  misc_feature (1)..(1362): Ceres Seq. ID no. 12615907
catcctgtttctattctgagtaaagtgagatactgcaattggactctggtgcttgtacagtactaagtcaacatgtctgatgactcaaggactgtccctcaggagcagctcccgtctgatgacctccacccgccgccaatgccagtgatcaacctgggtcatctcaaccttgatccagcgatacgagcttgcgtggttgaagatatcaccaaagcatgccgtgatctaggatacttccagattataaaccatgggatcagtcaatctgtcatggatggagctgttgacgcagcttcagatttcttcaaactgccaagtgagacaaaggaagagtttgcatcagacgacctccgacggcctgttagatatgacaccagctcaaaggacggcattagtatgtcacgggcatacctaaagcattatgcccatcccctgagtgaatgggtacaatattggccggaaaaacccccaatctacagggagtatatgggaaattttgctactgaagtaaggagggtggccttgcaactaatggaagccatactagaaggcctaggattgggcaaggattaccagcatgagaaatttgagcaaggactgcagctaatgtcagtgaattgctacccgaaagaatcagaaggtgatacagcgatagggctggcgccgcattccgactatggattccttaccatcttgttcacaagttgtcgaggcctggaggtcgtcgaccgcaacagcaacagctggaaagtggtccagccactcccacatgcattgcatgtccacgtaggagaccacatggaagtcctgagcaatggcaaaatcaagactgttgtgcaccgagctgttctgaatcctgaagaggcaaggatctccatggctagcattaatggtttcgcaatgcatgagaaggtctccagcgccagagagctcgtgaatgagcagaatcctgaaaagtacaccgcgagcagttttaatgacttcctcgactatctcacaagcaatctggacaacaagcaccggaactttcttgagagccttaggatgcaaggggcgtagtagggtataatctccacccgaagcacaaaatgatacctgcgacagtttgtctctatgcctacaaccgttcatctctctatattacttttgatctgaaagtactgaagttgttgtgtgttgtcatgctgttttggacaaattatctgtaatattactttcgatctgaaggcactgaagttgttgtgtgtgccatgctgttttcccctttcacccccactacattattacgagtttgtattaggtaaggggaaatccatgatgtaaactttatctagtaagataagatactgtatgctgttagtt

SEQ ID NO: 62861 - protein, 328 aa, Triticum aestivum
  peptide (1)..(328): Ceres Seq. ID no. 12615908
  misc_feature (175)..(273): Pfam Name: 2OG-Fe(II) oxygenase superfamily Pfam Description: 2OG-Fe(II) oxygenase superfamily
  misc_feature (27)..(316): Homolog of NCBI NO: 38345872 NR Description: OSJNBa0064M23.14 [Oryza sativa (japonica
  misc_feature (9)..(316): Homolog of NCBI NO: 37536444 NR Description: unknown protein [Oryza sativa (japonica
  misc_feature (32)..(325): Homolog of NCBI NO: 15228020 NR Description: putative giberellin beta-hydroxylase; protein id:
  misc_feature (23)..(98): Homolog of NCBI NO: 15232291 NR Description: SRG1 - like protein; protein id: At3g60290.1
  misc_feature (133)..(324): Homolog of NCBI NO: 15232291 NR Description: SRG1 - like protein; protein id: At3g60290.1
  misc_feature (23)..(324): Homolog of NCBI NO: 30689834 NR Description: flavonol synthase family [Arabidopsis thaliana]
  misc_feature (23)..(324): Homolog of NCBI NO: 7433240 NR Description: probable flavonol synthase [imported] -
  misc_feature (57)..(326): Homolog of NCBI NO: 15240797 NR Description: putative protein; protein id: At5g07480.1
  misc_feature (1)..(325): Homolog of NCBI NO: 32488372 NR Description: OSJNBa0043A12.2 [Oryza sativa (japonica
  misc_feature (1)..(325): Homolog of NCBI NO: 32488371 NR Description: OSJNBa0043A12.1 [Oryza sativa (japonica
MSDDSRTVPQEQLPSDDLHPPPMPVINLGHLNLDPAIRACVVEDITKACRDLGYFQIINHGISQSVMDGAVDAASDFFKLPSETKEEFASDDLRRPVRYDTSSKDGISMSRAYLKHYAHPLSEWVQYWPEKPPIYREYMGNFATEVRRVALQLMEAILEGLGLGKDYQHEKFEQGLQLMSVNCYPKESEGDTAIGLAPHSDYGFLTILFTSCRGLEVVDRNSNSWKVVQPLPHALHVHVGDHMEVLSNGKIKTVVHRAVLNPEEARISMASINGFAMHEKVSSARELVNEQNPEKYTASSFNDFLDYLTSNLDNKHRNFLESLRMQGA

SEQ ID NO: 62862 - protein, 306 aa, Triticum aestivum
  peptide (1)..(306): Ceres Seq. ID no. 12615909
  misc_feature (153)..(251): Pfam Name: 2OG-Fe(II) oxygenase superfamily Pfam Description: 2OG-Fe(II) oxygenase superfamily
  misc_feature (5)..(294): Homolog of NCBI NO: 38345872 NR Description: OSJNBa0064M23.14 [Oryza sativa (japonica
  misc_feature (1)..(294): Homolog of NCBI NO: 37536444 NR Description: unknown protein [Oryza sativa (japonica
  misc_feature (10)..(303): Homolog of NCBI NO: 15228020 NR Description: putative giberellin beta-hydroxylase; protein id:
  misc_feature (1)..(76): Homolog of NCBI NO: 15232291 NR Description: SRG1 - like protein; protein id: At3g60290.1
  misc_feature (111)..(302): Homolog of NCBI NO: 15232291 NR Description: SRG1 - like protein; protein id: At3g60290.1
  misc_feature (1)..(302): Homolog of NCBI NO: 30689834 NR Description: flavonol synthase family [Arabidopsis thaliana]
  misc_feature (1)..(302): Homolog of NCBI NO: 7433240 NR Description: probable flavonol synthase [imported] -
  misc_feature (35)..(304): Homolog of NCBI NO: 15240797 NR Description: putative protein; protein id: At5g07480.1
  misc_feature (1)..(303): Homolog of NCBI NO: 32488372 NR Description: OSJNBa0043A12.2 [Oryza sativa (japonica
  misc_feature (1)..(303): Homolog of NCBI NO: 32488371 NR Description: OSJNBa0043A12.1 [Oryza sativa (japonica
MPVINLGHLNLDPAIRACVVEDITKACRDLGYFQIINHGISQSVMDGAVDAASDFFKLPSETKEEFASDDLRRPVRYDTSSKDGISMSRAYLKHYAHPLSEWVQYWPEKPPIYREYMGNFATEVRRVALQLMEAILEGLGLGKDYQHEKFEQGLQLMSVNCYPKESEGDTAIGLAPHSDYGFLTILFTSCRGLEVVDRNSNSWKVVQPLPHALHVHVGDHMEVLSNGKIKTVVHRAVLNPEEARISMASINGFAMHEKVSSARELVNEQNPEKYTASSFNDFLDYLTSNLDNKHRNFLESLRMQGA

SEQ ID NO: 62863 - protein, 262 aa, Triticum aestivum
  peptide (1)..(262): Ceres Seq. ID no. 12615910
  misc_feature (109)..(207): Pfam Name: 2OG-Fe(II) oxygenase superfamily Pfam Description: 2OG-Fe(II) oxygenase superfamily
  misc_feature (1)..(250): Homolog of NCBI NO: 38345872 NR Description: OSJNBa0064M23.14 [Oryza sativa (japonica
  misc_feature (1)..(250): Homolog of NCBI NO: 37536444 NR Description: unknown protein [Oryza sativa (japonica
  misc_feature (1)..(259): Homolog of NCBI NO: 15228020 NR Description: putative giberellin beta-hydroxylase; protein id:
  misc_feature (1)..(32): Homolog of NCBI NO: 15232291 NR Description: SRG1 - like protein; protein id: At3g60290.1
  misc_feature (67)..(258): Homolog of NCBI NO: 15232291 NR Description: SRG1 - like protein; protein id: At3g60290.1
  misc_feature (1)..(258): Homolog of NCBI NO: 30689834 NR Description: flavonol synthase family [Arabidopsis thaliana]
  misc_feature (1)..(258): Homolog of NCBI NO: 7433240 NR Description: probable flavonol synthase [imported] -
  misc_feature (1)..(260): Homolog of NCBI NO: 15240797 NR Description: putative protein; protein id: At5g07480.1
  misc_feature (1)..(259): Homolog of NCBI NO: 32488372 NR Description: OSJNBa0043A12.2 [Oryza sativa (japonica
  misc_feature (1)..(259): Homolog of NCBI NO: 32488371 NR Description: OSJNBa0043A12.1 [Oryza sativa (japonica
MDGAVDAASDFFKLPSETKEEFASDDLRRPVRYDTSSKDGISMSRAYLKHYAHPLSEWVQYWPEKPPIYREYMGNFATEVRRVALQLMEAILEGLGLGKDYQHEKFEQGLQLMSVNCYPKESEGDTAIGLAPHSDYGFLTILFTSCRGLEVVDRNSNSWKVVQPLPHALHVHVGDHMEVLSNGKIKTVVHRAVLNPEEARISMASINGFAMHEKVSSARELVNEQNPEKYTASSFNDFLDYLTSNLDNKHRNFLESLRMQGA

SEQ ID NO: 62864 - DNA, 1449 bp, Triticum aestivum
  misc_feature (1)..(1449): Ceres Seq. ID no. 14303631
acgacgttcttcttccacttcccgccaaagaggagcttgcacaggtaaaacatcttgaaaaatctcaagggtgaacgaagtttcttggcgggcatgcagggcacgagagacatgtctgccaagggcggcaaggccctggtccagtcggacgcggggaagtatgtggcgtggtcgggcgtcgaccagccggagctcgctgcagaggggctcgggtgtggcttgctcctgctcaggccgctctccttcgcgctgccacactacgccgactgccacaagttcggctacgtcctccgaggctccggggtcgccggtgtcctcccggtcgccaccggggacgcctcccccgcggccagggagagggtcgtgcgcctcgaggccggcgacgtcatagccacgcgcactggggaggtctcgtggtggtacaacgacagcgacggcgatgcgggcgacctctcaatcgtgttcatgggcgacacggagcgcgctgtcagcccgggggacatgtcctacttctttctccccggcggcaacagcgtcctaggcggcttcgacgcgggcctcctcgccggggcatggcctggcgtgaccaaggagcaggccgccgccgtgttccggagccagccagccgtcctcctcaccgggctgagcaagaagctgcccggcgtccgcccgcgcgaggacgacaggaaacggctcgtcgtgaacgccggccaagtcgctgcaggaaccctgaagacgctcaccgcggccgacatggcggcgctgggcggcctggggatcagcgtggttctcggccggctcgagcccggcgccgcgcgcgcgccgtgggtgctacgcgagggtgcggcgcagttggtgtacgtggcacgcgggagcgcgcgcgtccaggtgtcttcttccgcgggcggcgagacgctgctgctggacgaggaggtcgccgcggggagcgtgttcgtcgtaccgcggttcgccgtgacgctcatctccgccggcgccgacggcgcacagtgggtctccctcatcaagagcgccaggcccgcggtggagcacctgaccggtgatggctcgatgctcggcggcctgaccgcgcaggtggtgcaggcgtcgctgagcgtggcgccggagttgctggagctgctcggagtccgcagcgccgagccgtcgcactgagcggtcggtgcacgcgttcgcgccgcggcgtccgttcactttccgtggcgtgtgtgtcccgtatgctccgttgacgtgcaccacacgattgtatttttatacgctgttacgtctctatacgtgcttacttacgtgaatgagcaaaataattgtgtgcattgttgtactcatatgagaccacaagtgtgttacccctcggcttgggttatatacgttgttacgtctcttacttacgtgcatgaggaaaataattctgcgcgttgttgtactcatatgtgc

SEQ ID NO: 62865 - protein, 358 aa, Triticum aestivum
  peptide (1)..(358): Ceres Seq. ID no. 14303632
  misc_feature (7)..(161): Pfam Name: Cupin Pfam Description: Cupin
  misc_feature (82)..(169): Homolog of NCBI NO: 1495688 NR Description: legumin [Metasequoia glyptostroboides]
  misc_feature (211)..(342): Homolog of NCBI NO: 1495688 NR Description: legumin [Metasequoia glyptostroboides]
  misc_feature (19)..(181): Homolog of NCBI NO: 7595348 NR Description: globulin-like protein [Cucumis melo]
  misc_feature (6)..(348): Homolog of NCBI NO: 34906084 NR Description: putative legumin-like protein
  misc_feature (6)..(345): Homolog of NCBI NO: 15226926 NR Description: globulin (seed storage protein) - related
  misc_feature (6)..(348): Homolog of NCBI NO: 28950670 NR Description: legumin-like protein [Zea mays]
  misc_feature (6)..(345): Homolog of NCBI NO: 21593610 NR Description: globulin-like protein [Arabidopsis thaliana]
  misc_feature (6)..(345): Homolog of NCBI NO: 15223000 NR Description: globulin (seed storage protein) - related
  misc_feature (6)..(348): Homolog of NCBI NO: 37730876 NR Description: legumin-like protein [Zea mays]
  misc_feature (6)..(348): Homolog of NCBI NO: 28950668 NR Description: legumin-like protein [Zea mays]
MQGTRDMSAKGGKALVQSDAGKYVAWSGVDQPELAAEGLGCGLLLLRPLSFALPHYADCHKFGYVLRGSGVAGVLPVATGDASPAARERVVRLEAGDVIATRTGEVSWWYNDSDGDAGDLSIVFMGDTERAVSPGDMSYFFLPGGNSVLGGFDAGLLAGAWPGVTKEQAAAVFRSQPAVLLTGLSKKLPGVRPREDDRKRLVVNAGQVAAGTLKTLTAADMAALGGLGISVVLGRLEPGAARAPWVLREGAAQLVYVARGSARVQVSSSAGGETLLLDEEVAAGSVFVVPRFAVTLISAGADGAQWVSLIKSARPAVEHLTGDGSMLGGLTAQVVQASLSVAPELLELLGVRSAEPSH

SEQ ID NO: 62866 - protein, 352 aa, Triticum aestivum
  peptide (1)..(352): Ceres Seq. ID no. 14303633
  misc_feature (1)..(155): Pfam Name: Cupin Pfam Description: Cupin
  misc_feature (76)..(163): Homolog of NCBI NO: 1495688 NR Description: legumin [Metasequoia glyptostroboides]
  misc_feature (205)..(336): Homolog of NCBI NO: 1495688 NR Description: legumin [Metasequoia glyptostroboides]
  misc_feature (13)..(175): Homolog of NCBI NO: 7595348 NR Description: globulin-like protein [Cucumis melo]
  misc_feature (1)..(342): Homolog of NCBI NO: 34906084 NR Description: putative legumin-like protein
  misc_feature (1)..(339): Homolog of NCBI NO: 15226926 NR Description: globulin (seed storage protein) - related
  misc_feature (1)..(342): Homolog of NCBI NO: 28950670 NR Description: legumin-like protein [Zea mays]
  misc_feature (1)..(339): Homolog of NCBI NO: 21593610 NR Description: globulin-like protein [Arabidopsis thaliana]
  misc_feature (1)..(339): Homolog of NCBI NO: 15223000 NR Description: globulin (seed storage protein) - related
  misc_feature (1)..(342): Homolog of NCBI NO: 37730876 NR Description: legumin-like protein [Zea mays]
  misc_feature (1)..(342): Homolog of NCBI NO: 28950668 NR Description: legumin-like protein [Zea mays]
MSAKGGKALVQSDAGKYVAWSGVDQPELAAEGLGCGLLLLRPLSFALPHYADCHKFGYVLRGSGVAGVLPVATGDASPAARERVVRLEAGDVIATRTGEVSWWYNDSDGDAGDLSIVFMGDTERAVSPGDMSYFFLPGGNSVLGGFDAGLLAGAWPGVTKEQAAAVFRSQPAVLLTGLSKKLPGVRPREDDRKRLVVNAGQVAAGTLKTLTAADMAALGGLGISVVLGRLEPGAARAPWVLREGAAQLVYVARGSARVQVSSSAGGETLLLDEEVAAGSVFVVPRFAVTLISAGADGAQWVSLIKSARPAVEHLTGDGSMLGGLTAQVVQASLSVAPELLELLGVRSAEPSH

SEQ ID NO: 62867 - protein, 234 aa, Triticum aestivum
  peptide (1)..(234): Ceres Seq. ID no. 14303634
  misc_feature (1)..(45): Homolog of NCBI NO: 1495688 NR Description: legumin [Metasequoia glyptostroboides]
  misc_feature (87)..(218): Homolog of NCBI NO: 1495688 NR Description: legumin [Metasequoia glyptostroboides]
  misc_feature (1)..(57): Homolog of NCBI NO: 7595348 NR Description: globulin-like protein [Cucumis melo]
  misc_feature (1)..(224): Homolog of NCBI NO: 34906084 NR Description: putative legumin-like protein
  misc_feature (1)..(221): Homolog of NCBI NO: 15226926 NR Description: globulin (seed storage protein) - related
  misc_feature (1)..(224): Homolog of NCBI NO: 28950670 NR Description: legumin-like protein [Zea mays]
  misc_feature (1)..(221): Homolog of NCBI NO: 21593610 NR Description: globulin-like protein [Arabidopsis thaliana]
  misc_feature (1)..(221): Homolog of NCBI NO: 15223000 NR Description: globulin (seed storage protein) - related
  misc_feature (1)..(224): Homolog of NCBI NO: 37730876 NR Description: legumin-like protein [Zea mays]
  misc_feature (1)..(224): Homolog of NCBI NO: 28950668 NR Description: legumin-like protein [Zea mays]
MGDTERAVSPGDMSYFFLPGGNSVLGGFDAGLLAGAWPGVTKEQAAAVFRSQPAVLLTGLSKKLPGVRPREDDRKRLVVNAGQVAAGTLKTLTAADMAALGGLGISVVLGRLEPGAARAPWVLREGAAQLVYVARGSARVQVSSSAGGETLLLDEEVAAGSVFVVPRFAVTLISAGADGAQWVSLIKSARPAVEHLTGDGSMLGGLTAQVVQASLSVAPELLELLGVRSAEPSH

SEQ ID NO: 62868 - DNA, 1231 bp, Triticum aestivum
  misc_feature (1)..(1231): Ceres Seq. ID no. 13596891
gaacatcctaatcgaaaaactgttcaccggcagcttacctcacctcggcgagttccactccatccgccaaagacgctctctactccccggacggcggcaatggagcaagcgagcccgccggcggggtcggcgaggaacaggaaggtggtgctgcgggagtacatcagccgcgcgccgagggaggacgacatggcgctcgtcgacggcggcgccgtgccgctgcgcgtccccgagggcgccgccggcccggccgtgctggtgaagaacctctacctctcctgcgacccctacatgcgcggccggatgcgggacttccacggctcctacatccccccgttcaagcccggatctgttatagaagggctgggcgtggcgagagtggtggattccactcatccggggttcgttgccggtgacattgtttcgggaatgactggctgggaggaatacagcttgattgacaagcctgaacagctgaacaagattcagcaaagtggcataccactctcctactatttggggcttctcggcatgcctggttttacagcttatgttggattctatgaaatttgctcgccgaaggaaggagagtttgtctttgtttctgctgcatcgggagcagttggccagattgttggtcaacttgcaaagctccatggctgctatgttgtcggaagtgctggaacaaatgaaaaagttaaactcctaaaagataagtttggattcgatgcagcttttaattacaaagaggagcctgacttgactgcagccctaaaaaggtactttcctgaaggtatcgacatctacttcgagaatgtaggaggaccaatgctagatgctgtactccttaacatgcggatgcatggtcgcatagcagtatgtgggatggtctcccagcacggcatgactgatcctgcagggatccacaacctcttctgcctggtgccaaaacggattagtatgaagggcttcatccagagtgattacatcaacttattcccacagttcctcgattacatgaccaagcattacaaggatggcaagattgcatatgtagaagacatgagcattgggctagagaacacaccagctgcctttgttggtctattcagcggtaaaaatgtgggcaaacaagtcgtgtgtgtgtcacaagagtgaagtacgtgtacattctgatgaatatacaaatatctcatgattcaaataaataataaaaattgtgaaccctctc

SEQ ID NO: 62869 - protein, 385 aa, Triticum aestivum
  peptide (1)..(385): Ceres Seq. ID no. 15221991
  misc_feature (132)..(382): Pfam Name: Zinc-binding dehydrogenase Pfam Description: Zinc-binding dehydrogenase
  misc_feature (43)..(385): Homolog of NCBI NO: 15237888 NR Description: NADP-dependent oxidoreductase (P1), putative
  misc_feature (41)..(385): Homolog of NCBI NO: 15222685 NR Description: NADP-dependent oxidoreductase, putative
  misc_feature (41)..(385): Homolog of NCBI NO: 21593645 NR Description: allyl alcohol dehydrogenase, putative
  misc_feature (46)..(385): Homolog of NCBI NO: 15228456 NR Description: NADP-dependent oxidoreductase (P2), putative
  misc_feature (46)..(116): Homolog of NCBI NO: 25404554 NR Description: hypothetical protein F5I14.9 [imported] -
  misc_feature (119)..(385): Homolog of NCBI NO: 25404554 NR Description: hypothetical protein F5I14.9 [imported] -
  misc_feature (46)..(385): Homolog of NCBI NO: 15218717 NR Description: allyl alcohol dehydrogenase, putative
  misc_feature (41)..(385): Homolog of NCBI NO: 6692816 NR Description: allyl alcohol dehydrogenase [Nicotiana tabacum]
  misc_feature (43)..(385): Homolog of NCBI NO: 38345384 NR Description: OSJNBa0067K08.13 [Oryza sativa (japonica
  misc_feature (35)..(385): Homolog of NCBI NO: 34907532 NR Description: putative allyl alcohol dehydrogenase
EHPNRKTVHRQLTSPRRVPLHPPKTLSTPRTAAMEQASPPAGSARNRKVVLREYISRAPREDDMALVDGGAVPLRVPEGAAGPAVLVKNLYLSCDPYMRGRMRDFHGSYIPPFKPGSVIEGLGVARVVDSTHPGFVAGDIVSGMTGWEEYSLIDKPEQLNKIQQSGIPLSYYLGLLGMPGFTAYVGFYEICSPKEGEFVFVSAASGAVGQIVGQLAKLHGCYVVGSAGTNEKVKLLKDKFGFDAAFNYKEEPDLTAALKRYFPEGIDIYFENVGGPMLDAVLLNMRMHGRIAVCGMVSQHGMTDPAGIHNLFCLVPKRISMKGFIQSDYINLFPQFLDYMTKHYKDGKIAYVEDMSIGLENTPAAFVGLFSGKNVGKQVVCVSQE

SEQ ID NO: 62870 - protein, 352 aa, Triticum aestivum
  peptide (1)..(352): Ceres Seq. ID no. 15221992
  misc_feature (99)..(349): Pfam Name: Zinc-binding dehydrogenase Pfam Description: Zinc-binding dehydrogenase
  misc_feature (10)..(352): Homolog of NCBI NO: 15237888 NR Description: NADP-dependent oxidoreductase (P1), putative
  misc_feature (8)..(352): Homolog of NCBI NO: 15222685 NR Description: NADP-dependent oxidoreductase, putative
  misc_feature (8)..(352): Homolog of NCBI NO: 21593645 NR Description: allyl alcohol dehydrogenase, putative
  misc_feature (13)..(352): Homolog of NCBI NO: 15228456 NR Description: NADP-dependent oxidoreductase (P2), putative
  misc_feature (13)..(83): Homolog of NCBI NO: 25404554 NR Description: hypothetical protein F5I14.9 [imported] -
  misc_feature (86)..(352): Homolog of NCBI NO: 25404554 NR Description: hypothetical protein F5I14.9 [imported] -
  misc_feature (13)..(352): Homolog of NCBI NO: 15218717 NR Description: allyl alcohol dehydrogenase, putative
  misc_feature (8)..(352): Homolog of NCBI NO: 6692816 NR Description: allyl alcohol dehydrogenase [Nicotiana tabacum]
  misc_feature (10)..(352): Homolog of NCBI NO: 38345384 NR Description: OSJNBa0067K08.13 [Oryza sativa (japonica
  misc_feature (2)..(352): Homolog of NCBI NO: 34907532 NR Description: putative allyl alcohol dehydrogenase
MEQASPPAGSARNRKVVLREYISRAPREDDMALVDGGAVPLRVPEGAAGPAVLVKNLYLSCDPYMRGRMRDFHGSYIPPFKPGSVIEGLGVARVVDSTHPGFVAGDIVSGMTGWEEYSLIDKPEQLNKIQQSGIPLSYYLGLLGMPGFTAYVGFYEICSPKEGEFVFVSAASGAVGQIVGQLAKLHGCYVVGSAGTNEKVKLLKDKFGFDAAFNYKEEPDLTAALKRYFPEGIDIYFENVGGPMLDAVLLNMRMHGRIAVCGMVSQHGMTDPAGIHNLFCLVPKRISMKGFIQSDYINLFPQFLDYMTKHYKDGKIAYVEDMSIGLENTPAAFVGLFSGKNVGKQVVCVSQE

SEQ ID NO: 62871 - protein, 322 aa, Triticum aestivum
  peptide (1)..(322): Ceres Seq. ID no. 15221993
  misc_feature (69)..(319): Pfam Name: Zinc-binding dehydrogenase Pfam Description: Zinc-binding dehydrogenase
  misc_feature (1)..(322): Homolog of NCBI NO: 15237888 NR Description: NADP-dependent oxidoreductase (P1), putative
  misc_feature (1)..(322): Homolog of NCBI NO: 15222685 NR Description: NADP-dependent oxidoreductase, putative
  misc_feature (1)..(322): Homolog of NCBI NO: 21593645 NR Description: allyl alcohol dehydrogenase, putative
  misc_feature (1)..(322): Homolog of NCBI NO: 15228456 NR Description: NADP-dependent oxidoreductase (P2), putative
  misc_feature (1)..(53): Homolog of NCBI NO: 25404554 NR Description: hypothetical protein F5I14.9 [imported] -
  misc_feature (56)..(322): Homolog of NCBI NO: 25404554 NR Description: hypothetical protein F5I14.9 [imported] -
  misc_feature (1)..(322): Homolog of NCBI NO: 15218717 NR Description: allyl alcohol dehydrogenase, putative
  misc_feature (1)..(322): Homolog of NCBI NO: 6692816 NR Description: allyl alcohol dehydrogenase [Nicotiana tabacum]
  misc_feature (1)..(322): Homolog of NCBI NO: 38345384 NR Description: OSJNBa0067K08.13 [Oryza sativa (japonica
  misc_feature (1)..(322): Homolog of NCBI NO: 34907532 NR Description: putative allyl alcohol dehydrogenase
MALVDGGAVPLRVPEGAAGPAVLVKNLYLSCDPYMRGRMRDFHGSYIPPFKPGSVIEGLGVARVVDSTHPGFVAGDIVSGMTGWEEYSLIDKPEQLNKIQQSGIPLSYYLGLLGMPGFTAYVGFYEICSPKEGEFVFVSAASGAVGQIVGQLAKLHGCYVVGSAGTNEKVKLLKDKFGFDAAFNYKEEPDLTAALKRYFPEGIDIYFENVGGPMLDAVLLNMRMHGRIAVCGMVSQHGMTDPAGIHNLFCLVPKRISMKGFIQSDYINLFPQFLDYMTKHYKDGKIAYVEDMSIGLENTPAAFVGLFSGKNVGKQVVCVSQE

SEQ ID NO: 62872 - DNA, 1230 bp, Triticum aestivum
  misc_feature (1)..(1230): Ceres Seq. ID no. 12598859
actcacaaatagcaccatacacgacacggacacgtacgcaaaaccttcttcccaaatctaaacccctctcttctccaaatggccaagagaaacctcctcctcctcctggcgctaatggcgctcgccacaagcatggaagccgcgtcggctaccacgagcacgaggaagctcatgttcctggtccagcccaagccgaacctcctcacgtaccacaacggcgccgtgctgcacggcgacatccccgtctccgtcctctggtatggccgcttcacggcggcgcagaaggccatcgtatccgacttcctcctctccctctcctccgcgccgcgcgcgtccccggcgccgtccgtgtcccagtggtggagcagcatccaccagctgtacctctccaaggcggcggccgtcggcaagcacggcgccggcgccaccaaggccgcccgggtggtcctgtccggccaggtctccgacgaggcgtgctcgctcgggaagagcctgaagctgtcccagctcccggcgctggcggcgaaggcgaggcccgccaagggcggtatcgcgctggtgctcacagcgcaggacgtgggcgtggagggcttctgcatgagccggtgcggccggcacgggaccgtggacgccaagtccggcacggcctacgtgtgggccggcaacccggcgacgcagtgcgccgggcagtgcgcgtggccgttccaccagccggcgtacgggccgcaggcgccgccgctggccgcgccgaacggcgacgtgggcatggacgggctcatcatcaacgtggcgagcatggtggccggcgcggtgaccaacccgttcggcgacgggttctaccagggggagcgcgaggcgccgctggaggccgcgacggcgtgcccgggggtgtacggcaagggcgcgtaccccgggtacgccggccagctgctggtggacggcgccaccggagcgagctacaacgcccacggtgcgcacgggaggaagtacctgctcccggcgctgttcgaccccgccacctcggcctgctccacgctggtgtaggagtacggcggcacagtggtagcgacaagtgatgtcagtccaatccgctagctgcccgtctagccaagagtgtattgggtacaactagtactgtaccgtagtgcatatatgtgtaaatagttcgtatatgagcttgtgtttggatcttctcatgctaaataaaaaatgtaaatcagcctttgtact

SEQ ID NO: 62873 - protein, 357 aa, Triticum aestivum
  peptide (1)..(357): Ceres Seq. ID no. 12598860
SQIAPYTTRTRTQNLLPKSKPLSSPNGQEKPPPPPGANGARHKHGSRVGYHEHEEAHVPGPAQAEPPHVPQRRRAARRHPRLRPLVWPLHGGAEGHRIRLPPLPLLRAARVPGAVRVPVVEQHPPAVPLQGGGRRQARRRRHQGRPGGPVRPGLRRGVLAREEPEAVPAPGAGGEGEARQGRYRAGAHSAGRGRGGLLHEPVRPARDRGRQVRHGLRVGRQPGDAVRRAVRVAVPPAGVRAAGAAAGRAERRRGHGRAHHQRGEHGGRRGDQPVRRRVLPGGARGAAGGRDGVPGGVRQGRVPRVRRPAAGGRRHRSELQRPRCAREEVPAPGAVRPRHLGLLHAGVGVRRHSGSDK

SEQ ID NO: 62874 - protein, 321 aa, Triticum aestivum
  peptide (1)..(321): Ceres Seq. ID no. 12598861
  misc_feature (42)..(321): Pfam Name: Phosphate-induced protein 1 conserved region Pfam Description: Phosphate-induced protein 1 conserved region
  misc_feature (44)..(252): Homolog of NCBI NO: 11762144 NR Description: At1g35140 [Arabidopsis thaliana]
  misc_feature (50)..(321): Homolog of NCBI NO: 15242420 NR Description: putative protein
  misc_feature (140)..(320): Homolog of NCBI NO: 13194680 NR Description: phosphate-induced protein 1-like protein
  misc_feature (81)..(321): Homolog of NCBI NO: 31074969 NR Description: erg-1 [Solanum tuberosum]
  misc_feature (1)..(317): Homolog of NCBI NO: 37533672 NR Description: putative phosphate-induced protein
  misc_feature (34)..(321): Homolog of NCBI NO: 15237656 NR Description: phi-1-like protein
  misc_feature (44)..(320): Homolog of NCBI NO: 15219504 NR Description: phosphate-induced (phi-1) protein, putative
  misc_feature (34)..(321): Homolog of NCBI NO: 21593043 NR Description: putative phi-1-like phosphate-induced protein
  misc_feature (34)..(321): Homolog of NCBI NO: 15236667 NR Description: putative phi-1-like phosphate-induced protein
  misc_feature (27)..(321): Homolog of NCBI NO: 3759184 NR Description: phi-1 [Nicotiana tabacum]
MAKRNLLLLLALMALATSMEAASATTSTRKLMFLVQPKPNLLTYHNGAVLHGDIPVSVLWYGRFTAAQKAIVSDFLLSLSSAPRASPAPSVSQWWSSIHQLYLSKAAAVGKHGAGATKAARVVLSGQVSDEACSLGKSLKLSQLPALAAKARPAKGGIALVLTAQDVGVEGFCMSRCGRHGTVDAKSGTAYVWAGNPATQCAGQCAWPFHQPAYGPQAPPLAAPNGDVGMDGLIINVASMVAGAVTNPFGDGFYQGEREAPLEAATACPGVYGKGAYPGYAGQLLVDGATGASYNAHGAHGRKYLLPALFDPATSACSTLV

SEQ ID NO: 62875 - protein, 309 aa, Triticum aestivum
  peptide (1)..(309): Ceres Seq. ID no. 12598862
  misc_feature (30)..(309): Pfam Name: Phosphate-induced protein 1 conserved region Pfam Description: Phosphate-induced protein 1 conserved region
  misc_feature (32)..(240): Homolog of NCBI NO: 11762144 NR Description: At1g35140 [Arabidopsis thaliana]
  misc_feature (38)..(309): Homolog of NCBI NO: 15242420 NR Description: putative protein
  misc_feature (128)..(308): Homolog of NCBI NO: 13194680 NR Description: phosphate-induced protein 1-like protein
  misc_feature (69)..(309): Homolog of NCBI NO: 31074969 NR Description: erg-1 [Solanum tuberosum]
  misc_feature (1)..(305): Homolog of NCBI NO: 37533672 NR Description: putative phosphate-induced protein
  misc_feature (22)..(309): Homolog of NCBI NO: 15237656 NR Description: phi-1-like protein
  misc_feature (32)..(308): Homolog of NCBI NO: 15219504 NR Description: phosphate-induced (phi-1) protein, putative
  misc_feature (22)..(309): Homolog of NCBI NO: 21593043 NR Description: putative phi-1-like phosphate-induced protein
  misc_feature (22)..(309): Homolog of NCBI NO: 15236667 NR Description: putative phi-1-like phosphate-induced protein
  misc_feature (15)..(309): Homolog of NCBI NO: 3759184 NR Description: phi-1 [Nicotiana tabacum]
MALATSMEAASATTSTRKLMFLVQPKPNLLTYHNGAVLHGDIPVSVLWYGRFTAAQKAIVSDFLLSLSSAPRASPAPSVSQWWSSIHQLYLSKAAAVGKHGAGATKAARVVLSGQVSDEACSLGKSLKLSQLPALAAKARPAKGGIALVLTAQDVGVEGFCMSRCGRHGTVDAKSGTAYVWAGNPATQCAGQCAWPFHQPAYGPQAPPLAAPNGDVGMDGLIINVASMVAGAVTNPFGDGFYQGEREAPLEAATACPGVYGKGAYPGYAGQLLVDGATGASYNAHGAHGRKYLLPALFDPATSACSTLV

SEQ ID NO: 62876 - DNA, 1476 bp, Triticum aestivum
  misc_feature (1)..(1476): Ceres Seq. ID no. 13596625
aaaaatcctcctcgcgtcacgcgtgaacccagccggatccccaaacctccttccggtccgacgcctcgtgccgccggcgccgacgggggacccctccgcctctcacgcgtgccgccgcccccgccgtcgccgtcccgtctccctcgccggggcatcgcgttccaccccgccggcgactaggaacacggcaccctgaagctcctgagctagagtaggaggggcaaaccatccagctgaagaatgaaaacacatgagcgtgctgccaacttggctcttgctggtttgagcttggcaccgctcgtgatcaatgtgaacccaaatttgaatgtgatactgacagcatgtcttactgtctatgtgggctgttaccgttctgtcaagtcaactccacccgctgagacaatgtccaaagagcatgctatgcggttccctttggtggggagtgctatgcttctgtcgctattccttctattcaagtttctctccaaggacctggtcaatactgttctcactgcctactttttcattcttggcattgctgcgctctgtgcaacgttgctccctaccgtcaaacgttttcttccagaaggatggaatgataatgccatcgtctggcgtgctccatatttccactcactgtcggtggagtttaccaagtctcaagttgtcgcttcagtccctggttttttcttttgcgtatggtatgccatgaagaagcattggctagcaaacaatgttttgggacttgctttctgcattcagggaattgagatgttatcactaggatcattcaaaaccggtggtattctcttggctggactttttgtgtatgacattttctgggttttcttcactccagttatggtcagtgttgctaaatcatttgatgctccaataaagcttctatttcccaccgcggatgccgcacggccgttctctatgcttggtcttggtgatattgttatacctggtatatttgttgcacttgcactccgtttcgatgtctcgagaaacattaagaaccgttacttcaatagtgcatttttgggatacactgcgggcatgacagtaacaatcgttgtgatgaactggtttcaagctgcacagcctgctctgctatacatcgttcctggcgtgactggttttgtggctgttcactctttgtggaatggtgaagtaaagccgctactggagttcaccgagacgcagcccgaggagggagccgccgaggaagaagaagattccagtcagagcaaaaaggtggactagcgctcgctcgggtcgggtcgggtctttttaattaattaggagaggagaaccaaaccaaagcaggatttcaaataggctgtatgatcttgagaatcgaaaaacgattcacatgatagaactctttttgttttgaaaggtcattaactatctgttttggtgagtggtagatgatggacgaaaagggaacatatatgctaaaagacttgc

SEQ ID NO: 62877 - protein, 342 aa, Triticum aestivum
  peptide (1)..(342): Ceres Seq. ID no. 13596626
  misc_feature (47)..(321): Pfam Name: Signal peptide peptidase Pfam Description: Signal peptide peptidase
  misc_feature (29)..(342): Homolog of NCBI NO: 23308607 NR Description: minor histocompatibility antigen 13 isoform 1
  misc_feature (29)..(342): Homolog of NCBI NO: 22761270 NR Description: unnamed protein product [Homo sapiens]
  misc_feature (29)..(340): Homolog of NCBI NO: 17647929 NR Description: shanti CG11840-PA [Drosophila melanogaster]
  misc_feature (29)..(342): Homolog of NCBI NO: 20452374 NR Description: minor histocompatibility antigen H13 isoform 1
  misc_feature (29)..(338): Homolog of NCBI NO: 26389558 NR Description: unnamed protein product [Mus musculus]
  misc_feature (29)..(342): Homolog of NCBI NO: 34858994 NR Description: similar to histocompatibility 13; presenilin-like
  misc_feature (29)..(342): Homolog of NCBI NO: 25992191 NR Description: putative presenilin-like aspartyl protease [Mus
  misc_feature (29)..(338): Homolog of NCBI NO: 18034682 NR Description: histocompatibility 13; presenilin-like protein 3
  misc_feature (1)..(340): Homolog of NCBI NO: 21593273 NR Description: unknown [Arabidopsis thaliana]
  misc_feature (1)..(340): Homolog of NCBI NO: 18395487 NR Description: expressed protein [Arabidopsis thaliana]
MKTHERAANLALAGLSLAPLVINVNPNLNVILTACLTVYVGCYRSVKSTPPAETMSKEHAMRFPLVGSAMLLSLFLLFKFLSKDLVNTVLTAYFFILGIAALCATLLPTVKRFLPEGWNDNAIVWRAPYFHSLSVEFTKSQVVASVPGFFFCVWYAMKKHWLANNVLGLAFCIQGIEMLSLGSFKTGGILLAGLFVYDIFWVFFTPVMVSVAKSFDAPIKLLFPTADAARPFSMLGLGDIVIPGIFVALALRFDVSRNIKNRYFNSAFLGYTAGMTVTIVVMNWFQAAQPALLYIVPGVTGFVAVHSLWNGEVKPLLEFTETQPEEGAAEEEEDSSQSKKVD

SEQ ID NO: 62878 - protein, 288 aa, Triticum aestivum
  peptide (1)..(288): Ceres Seq. ID no. 13596627
  misc_feature (1)..(267): Pfam Name: Signal peptide peptidase Pfam Description: Signal peptide peptidase
  misc_feature (1)..(288): Homolog of NCBI NO: 23308607 NR Description: minor histocompatibility antigen 13 isoform 1
  misc_feature (1)..(288): Homolog of NCBI NO: 22761270 NR Description: unnamed protein product [Homo sapiens]
  misc_feature (1)..(286): Homolog of NCBI NO: 17647929 NR Description: shanti CG11840-PA [Drosophila melanogaster]
  misc_feature (1)..(288): Homolog of NCBI NO: 20452374 NR Description: minor histocompatibility antigen H13 isoform 1
  misc_feature (1)..(284): Homolog of NCBI NO: 26389558 NR Description: unnamed protein product [Mus musculus]
  misc_feature (1)..(288): Homolog of NCBI NO: 34858994 NR Description: similar to histocompatibility 13; presenilin-like
  misc_feature (1)..(288): Homolog of NCBI NO: 25992191 NR Description: putative presenilin-like aspartyl protease [Mus
  misc_feature (1)..(284): Homolog of NCBI NO: 18034682 NR Description: histocompatibility 13; presenilin-like protein 3
  misc_feature (1)..(286): Homolog of NCBI NO: 21593273 NR Description: unknown [Arabidopsis thaliana]
  misc_feature (1)..(286): Homolog of NCBI NO: 18395487 NR Description: expressed protein [Arabidopsis thaliana]
MSKEHAMRFPLVGSAMLLSLFLLFKFLSKDLVNTVLTAYFFILGIAALCATLLPTVKRFLPEGWNDNAIVWRAPYFHSLSVEFTKSQVVASVPGFFFCVWYAMKKHWLANNVLGLAFCIQGIEMLSLGSFKTGGILLAGLFVYDIFWVFFTPVMVSVAKSFDAPIKLLFPTADAARPFSMLGLGDIVIPGIFVALALRFDVSRNIKNRYFNSAFLGYTAGMTVTIVVMNWFQAAQPALLYIVPGVTGFVAVHSLWNGEVKPLLEFTETQPEEGAAEEEEDSSQSKKVD

SEQ ID NO: 62879 - protein, 282 aa, Triticum aestivum
  peptide (1)..(282): Ceres Seq. ID no. 13596628
  misc_feature (1)..(261): Pfam Name: Signal peptide peptidase Pfam Description: Signal peptide peptidase
  misc_feature (1)..(282): Homolog of NCBI NO: 23308607 NR Description: minor histocompatibility antigen 13 isoform 1
  misc_feature (1)..(282): Homolog of NCBI NO: 22761270 NR Description: unnamed protein product [Homo sapiens]
  misc_feature (1)..(280): Homolog of NCBI NO: 17647929 NR Description: shanti CG11840-PA [Drosophila melanogaster]
  misc_feature (1)..(282): Homolog of NCBI NO: 20452374 NR Description: minor histocompatibility antigen H13 isoform 1
  misc_feature (1)..(278): Homolog of NCBI NO: 26389558 NR Description: unnamed protein product [Mus musculus]
  misc_feature (1)..(282): Homolog of NCBI NO: 34858994 NR Description: similar to histocompatibility 13; presenilin-like
  misc_feature (1)..(282): Homolog of NCBI NO: 25992191 NR Description: putative presenilin-like aspartyl protease [Mus
  misc_feature (1)..(278): Homolog of NCBI NO: 18034682 NR Description: histocompatibility 13; presenilin-like protein 3
  misc_feature (1)..(280): Homolog of NCBI NO: 21593273 NR Description: unknown [Arabidopsis thaliana]
  misc_feature (1)..(280): Homolog of NCBI NO: 18395487 NR Description: expressed protein [Arabidopsis thaliana]
MRFPLVGSAMLLSLFLLFKFLSKDLVNTVLTAYFFILGIAALCATLLPTVKRFLPEGWNDNAIVWRAPYFHSLSVEFTKSQVVASVPGFFFCVWYAMKKHWLANNVLGLAFCIQGIEMLSLGSFKTGGILLAGLFVYDIFWVFFTPVMVSVAKSFDAPIKLLFPTADAARPFSMLGLGDIVIPGIFVALALRFDVSRNIKNRYFNSAFLGYTAGMTVTIVVMNWFQAAQPALLYIVPGVTGFVAVHSLWNGEVKPLLEFTETQPEEGAAEEEEDSSQSKKVD

SEQ ID NO: 62880 - DNA, 1207 bp, Triticum aestivum
  misc_feature (1)..(1207): Ceres Seq. ID no. 12615854
aacaacagccaatccatcccatggaataataaagaaactggggcaccccactgcgtggccggtggcgaccgacggcgacccccgccctcaccgtaccctgctacgctccggcgagtccggccgaccgcctccgccacctttcgccgcacggcgtgaccgagtggacgggctcgacggcgggcatcggccggcgcgcgagggcgggagggatcggcgatgagcttcgcggatctggagtccggggcgctgcaggcgccccggagggggaggggcgccgacgccacgcgcgcgctcgtcttccagatcaccaccgcggtgtcctcctaccgccgcctcctcaactcgctcggcacgcccaaggacacgcccgccctccgtgatcagctgcagaagactagtcataaagtcctgcaattggcgaaggatgcgaaggagaaactgacgagtgctgctgaagcagacaagagcactggaactagtgcagacaagcgggtagccgacatgaagcttgccaaagattttgctgcgacgatggaggaattcaggaaacttcagaatcttgcaattcagagggagatggcatataagccggttgttccccagggtgctcagccaagctatactatgaatgatggaagatctgattttgataaaatgcctgaacagcgcgcattgcttgcagaaccaaacaggctagaggtgttgcaattggataatgaaattgttttcaatgaggctatcatcgaggaaagggaccaggcgattcaagacatccaacagcagattggtgaagtacatgaagcatttaaggatcttgctacgctcgtgcattcgcaaggaggcataatagaggaagtcgacagcaacattgaaaactctgcagccgcgaccagtgaagcgaagaaagaaatcggcaaagcgtccaagactcagaagtcaaattcatccttgctttgcctgcttatggtgatctttggggttgttttgcttatcgtgataatagttttggcatcttgagacacggatgcttagaggcctattggtgcactctgaggagccatattacgtgcaagattaatcctcgctgtgcgccgaagactgtcgctaactgaagtgtacattttctttttctcccctcttttttccttgtggtttgttagtgcgtattcttatgtggcgtgagtcctttttttttccagcggcttgc

SEQ ID NO: 62881 - protein, 266 aa, Triticum aestivum
  peptide (1)..(266): Ceres Seq. ID no. 12615855
  misc_feature (178)..(240): Pfam Name: SNARE domain Pfam Description: SNARE domain
MSFADLESGALQAPRRGRGADATRALVFQITTAVSSYRRLLNSLGTPKDTPALRDQLQKTSHKVLQLAKDAKEKLTSAAEADKSTGTSADKRVADMKLAKDFAATMEEFRKLQNLAIQREMAYKPVVPQGAQPSYTMNDGRSDFDKMPEQRALLAEPNRLEVLQLDNEIVFNEAIIEERDQAIQDIQQQIGEVHEAFKDLATLVHSQGGIIEEVDSNIENSAAATSEAKKEIGKASKTQKSNSSLLCLLMVIFGVVLLIVIIVLAS

SEQ ID NO: 62882 - protein, 171 aa, Triticum aestivum
  peptide (1)..(171): Ceres Seq. ID no. 12615856
  misc_feature (83)..(145): Pfam Name: SNARE domain Pfam Description: SNARE domain
MKLAKDFAATMEEFRKLQNLAIQREMAYKPVVPQGAQPSYTMNDGRSDFDKMPEQRALLAEPNRLEVLQLDNEIVFNEAIIEERDQAIQDIQQQIGEVHEAFKDLATLVHSQGGIIEEVDSNIENSAAATSEAKKEIGKASKTQKSNSSLLCLLMVIFGVVLLIVIIVLAS

SEQ ID NO: 62883 - protein, 161 aa, Triticum aestivum
  peptide (1)..(161): Ceres Seq. ID no. 12615857
  misc_feature (73)..(135): Pfam Name: SNARE domain Pfam Description: SNARE domain
MEEFRKLQNLAIQREMAYKPVVPQGAQPSYTMNDGRSDFDKMPEQRALLAEPNRLEVLQLDNEIVFNEAIIEERDQAIQDIQQQIGEVHEAFKDLATLVHSQGGIIEEVDSNIENSAAATSEAKKEIGKASKTQKSNSSLLCLLMVIFGVVLLIVIIVLAS

SEQ ID NO: 62884 - DNA, 1377 bp, Triticum aestivum
  misc_feature (1)..(1377): Ceres Seq. ID no. 13662567
cccgccccgccccgccccttccctccctcccttcctcccccaaattcgcccaacaccttcggaaccccaatggcgagctttaacgccgccggcgccggcgccgccaaccccaaccctaacaaatccctcgaggtgcgtgcgcttggccaatactgttgcccttggtctaaatggctaaaacctaatgtgtgggtcgattcgaccggggactgccttcgtttcgtgcaggtgaatccggcgcccggggactcggtttccagcctcagcttcagccccaaggcgaaccacctaattgccacctcctgggacaaccaggttcggtgctgggaggttcagcctggcggccaatgccaggcgaaggcgtctatttcgcacgatcagccagtcttgtgctctgcctggaaggatgacgggactactgttttttcgggaggttgtgacaaagtggtgaagatgtggccgctgctgtctggcggccaggccacggccttctcagggcatgaggcgccggtcaaagaactcgcctggataccacagatgagccttcttgtcagtgggtcttgggataagactctgaggtactgggacattcggcaacctaatccagctcatgttcagcaacttccggagcgctgctatgcactctcacttagttatcctctaatggcggtcggtactgctgatcgcaacgtagttatcttcaatctgcagaatccacaggctgaattcaagaggatcgtgtcacctttgaaattccagacaaggtgtatcgccgccttccctgatcaacaaggattcttggttggatcaatagagggacgcgttggtgttcatcatgtagatgattctaatcaaagcaagaatttcacattcaaatgtcaccgcgagggcaatgatatattctctgttaactcgctgaactttcatcctgtgcaccatacatttgctactgcaggctctgatggaggtttcaacttttgggacaaggacagtaaacaaagactgaaggcttttagtaagtgcccatcacccatcacatgcagcacatttaatcaggatggctcaatctttgcttatgcggtatgctatgattggagcaagggtgccgagaagcataatccttctactgcaaagacaaatatctttctgcatagcgtgcaggaatctgatgtcaaaggaaagccccgtactggaaaaaagtagacttggaaatggcaagctgcagatctgtgctccgaacctgatgagtttgccgtcgcttgatgctaattacccgcacgagtgttttaatcttttagatcttgactctgtagggcattccttcatctctgagactgcaggcgtatcttctataatgtttaaacacaataaagtggg

SEQ ID NO: 62885 - protein, 400 aa, Triticum aestivum
  peptide (1)..(400): Ceres Seq. ID no. 13662568
  misc_feature (117)..(154): Pfam Name: WD domain, G-beta repeat Pfam Description: WD domain, G-beta repeat
  misc_feature (72)..(399): Homolog of NCBI NO: 34860864 NR Description: similar to RAE1 RNA export 1 homolog
  misc_feature (72)..(399): Homolog of NCBI NO: 29436458 NR Description: Similar to RAE1 RNA export 1 homolog (S. pombe)
  misc_feature (72)..(399): Homolog of NCBI NO: 28201956 NR Description: RAE1 RNA export 1 homolog
  misc_feature (72)..(399): Homolog of NCBI NO: 2231592 NR Description: mRNA-associated protein mrnp41 [Homo sapiens]
  misc_feature (72)..(399): Homolog of NCBI NO: 4506399 NR Description: RAE1 (RNA export 1, S.pombe) homolog
  misc_feature (321)..(347): Homolog of NCBI NO: 3122671 NR Description: Hypothetical RAE1-like protein At1g80670
  misc_feature (76)..(267): Homolog of NCBI NO: 3122671 NR Description: Hypothetical RAE1-like protein At1g80670
  misc_feature (76)..(398): Homolog of NCBI NO: 15220198 NR Description: transducin / WD-40 repeat protein family
  misc_feature (76)..(400): Homolog of NCBI NO: 38636797 NR Description: putative RAE1 (RNA export 1, S.pombe) homolog
  misc_feature (75)..(400): Homolog of NCBI NO: 34913020 NR Description: putative mRNA export protein
PAPPRPFPPSLPPPNSPNTFGTPMASFNAAGAGAANPNPNKSLEVRALGQYCCPWSKWLKPNVWVDSTGDCLRFVQVNPAPGDSVSSLSFSPKANHLIATSWDNQVRCWEVQPGGQCQAKASISHDQPVLCSAWKDDGTTVFSGGCDKVVKMWPLLSGGQATAFSGHEAPVKELAWIPQMSLLVSGSWDKTLRYWDIRQPNPAHVQQLPERCYALSLSYPLMAVGTADRNVVIFNLQNPQAEFKRIVSPLKFQTRCIAAFPDQQGFLVGSIEGRVGVHHVDDSNQSKNFTFKCHREGNDIFSVNSLNFHPVHHTFATAGSDGGFNFWDKDSKQRLKAFSKCPSPITCSTFNQDGSIFAYAVCYDWSKGAEKHNPSTAKTNIFLHSVQESDVKGKPRTGKK

SEQ ID NO: 62886 - protein, 377 aa, Triticum aestivum
  peptide (1)..(377): Ceres Seq. ID no. 13662569
  misc_feature (94)..(131): Pfam Name: WD domain, G-beta repeat Pfam Description: WD domain, G-beta repeat
  misc_feature (49)..(376): Homolog of NCBI NO: 34860864 NR Description: similar to RAE1 RNA export 1 homolog
  misc_feature (49)..(376): Homolog of NCBI NO: 29436458 NR Description: Similar to RAE1 RNA export 1 homolog (S. pombe)
  misc_feature (49)..(376): Homolog of NCBI NO: 28201956 NR Description: RAE1 RNA export 1 homolog
  misc_feature (49)..(376): Homolog of NCBI NO: 2231592 NR Description: mRNA-associated protein mrnp41 [Homo sapiens]
  misc_feature (49)..(376): Homolog of NCBI NO: 4506399 NR Description: RAE1 (RNA export 1, S.pombe) homolog
  misc_feature (298)..(324): Homolog of NCBI NO: 3122671 NR Description: Hypothetical RAE1-like protein At1g80670
  misc_feature (53)..(244): Homolog of NCBI NO: 3122671 NR Description: Hypothetical RAE1-like protein At1g80670
  misc_feature (53)..(375): Homolog of NCBI NO: 15220198 NR Description: transducin / WD-40 repeat protein family
  misc_feature (53)..(377): Homolog of NCBI NO: 38636797 NR Description: putative RAE1 (RNA export 1, S.pombe) homolog
  misc_feature (52)..(377): Homolog of NCBI NO: 34913020 NR Description: putative mRNA export protein
MASFNAAGAGAANPNPNKSLEVRALGQYCCPWSKWLKPNVWVDSTGDCLRFVQVNPAPGDSVSSLSFSPKANHLIATSWDNQVRCWEVQPGGQCQAKASISHDQPVLCSAWKDDGTTVFSGGCDKVVKMWPLLSGGQATAFSGHEAPVKELAWIPQMSLLVSGSWDKTLRYWDIRQPNPAHVQQLPERCYALSLSYPLMAVGTADRNVVIFNLQNPQAEFKRIVSPLKFQTRCIAAFPDQQGFLVGSIEGRVGVHHVDDSNQSKNFTFKCHREGNDIFSVNSLNFHPVHHTFATAGSDGGFNFWDKDSKQRLKAFSKCPSPITCSTFNQDGSIFAYAVCYDWSKGAEKHNPSTAKTNIFLHSVQESDVKGKPRTGKK

SEQ ID NO: 62887 - protein, 249 aa, Triticum aestivum
  peptide (1)..(249): Ceres Seq. ID no. 13662570
  misc_feature (1)..(248): Homolog of NCBI NO: 34860864 NR Description: similar to RAE1 RNA export 1 homolog
  misc_feature (1)..(248): Homolog of NCBI NO: 29436458 NR Description: Similar to RAE1 RNA export 1 homolog (S. pombe)
  misc_feature (1)..(248): Homolog of NCBI NO: 28201956 NR Description: RAE1 RNA export 1 homolog
  misc_feature (1)..(248): Homolog of NCBI NO: 2231592 NR Description: mRNA-associated protein mrnp41 [Homo sapiens]
  misc_feature (1)..(248): Homolog of NCBI NO: 4506399 NR Description: RAE1 (RNA export 1, S.pombe) homolog
  misc_feature (170)..(196): Homolog of NCBI NO: 3122671 NR Description: Hypothetical RAE1-like protein At1g80670
  misc_feature (1)..(116): Homolog of NCBI NO: 3122671 NR Description: Hypothetical RAE1-like protein At1g80670
  misc_feature (1)..(247): Homolog of NCBI NO: 15220198 NR Description: transducin / WD-40 repeat protein family
  misc_feature (1)..(249): Homolog of NCBI NO: 38636797 NR Description: putative RAE1 (RNA export 1, S.pombe) homolog
  misc_feature (1)..(249): Homolog of NCBI NO: 34913020 NR Description: putative mRNA export protein
MWPLLSGGQATAFSGHEAPVKELAWIPQMSLLVSGSWDKTLRYWDIRQPNPAHVQQLPERCYALSLSYPLMAVGTADRNVVIFNLQNPQAEFKRIVSPLKFQTRCIAAFPDQQGFLVGSIEGRVGVHHVDDSNQSKNFTFKCHREGNDIFSVNSLNFHPVHHTFATAGSDGGFNFWDKDSKQRLKAFSKCPSPITCSTFNQDGSIFAYAVCYDWSKGAEKHNPSTAKTNIFLHSVQESDVKGKPRTGKK

SEQ ID NO: 62888 - DNA, 1293 bp, Triticum aestivum
  misc_feature (1)..(1293): Ceres Seq. ID no. 13655251
tttttctcccgccctcgcaaccacctcccctcccctgtcctgccgagagtctcttctcttctcgtctctcgtcgcctcccgagtctccggcgaccacgccaactagacggccatggagcaaggcgccgactccgcggcggcgaggcggatggccagggtcgcctcccacctccgcccgcccacctcgcagatggaggaggtggccatcttgaagggctctgattgccgtgcaaaaggtgcggcaccagggttcaaggtcgcagtcctgggtgcatctggtggaattggccagccgctctcgctgctcatgaagatgaaccctcttgtttcggtgctccatttatatgatgttgtcaacacacctggtgtcacagctgacattagccacatgaacaccggtgctgtggtgcgtggcttcttgggtcagtcacaattggaaagtgctcttactggaatggatcttgtgatcattcctgctggcattcctcggaaacctgggatgacaagggatgatttgttcaacatcaatgccgggattgttcggactctttgtgagggaattgcaaaatgctgcccaaatgcgattgtgaatgtgatcagtaaccctgtaaattctaccgttccgatcgctgctgaagtatttaaaaaagctggaacatatgatcctaagcgcctattgggggtgacaacacttgatgtagtgagagccaatacctttgtgggagaggttcttggacttgaccccagagatgtcaatgttcctgttgttggtgggcatgcaggagttacgatattaccactcctttcacaggtgaatcctccctgctcgtttacctcagaagaaattagttatctcacttctcgcatacagaatggtgggacagaagtagttgaggccaaagcaggagcaggatccgcgactctttccatggcctacgcagcagccaaattcgcggacgcgtgcctgagagggctgcgcggcgacgccgggatagtggagtgctcttacatagcctgtcaggtgacggagctgcccttcttcgcgtccaaggtgcggctgggccggtcgggcgtcgaggaggtcctgccgctcggcccgctgaacgagtttgagagggcggggctggagaaggccaagggcgagctggccgagagcatccacaagggcgtcgcctttgccaacaagtgaagtgaagacaagagaagagaaatctttcgccccagcatagaaatctgagatgcctcttgcttcctgggagcaacggtcgccgtgtcattgtctcatctccctgt

SEQ ID NO: 62889 - protein, 358 aa, Triticum aestivum
  peptide (1)..(358): Ceres Seq. ID no. 13655252
  misc_feature (192)..(355): Pfam Name: lactate/malate dehydrogenase, alpha/beta Pfam Description: lactate/malate dehydrogenase, alpha/beta
  misc_feature (9)..(358): Homolog of NCBI NO: 12644436 NR Description: Malate dehydrogenase 1, glyoxysomal precursor
  misc_feature (11)..(358): Homolog of NCBI NO: 15227752 NR Description: malate dehydrogenase, glyoxysomal, putative
  misc_feature (9)..(358): Homolog of NCBI NO: 16323157 NR Description: AT5g09660/F17I14_150 [Arabidopsis thaliana]
  misc_feature (9)..(358): Homolog of NCBI NO: 15242466 NR Description: malate dehydrogenase, glyoxysomal [Arabidopsis
  misc_feature (6)..(358): Homolog of NCBI NO: 169977 NR Description: malate dehydrogenase
  misc_feature (5)..(358): Homolog of NCBI NO: 1346501 NR Description: MALATE DEHYDROGENASE, GLYOXYSOMAL PRECURSOR
  misc_feature (8)..(358): Homolog of NCBI NO: 34915204 NR Description: putative  glyoxysomal malate dehydrogenase
  misc_feature (11)..(355): Homolog of NCBI NO: 1170897 NR Description: MALATE DEHYDROGENASE, GLYOXYSOMAL PRECURSOR
  misc_feature (11)..(355): Homolog of NCBI NO: 126894 NR Description: MALATE DEHYDROGENASE, GLYOXYSOMAL PRECURSOR
  misc_feature (1)..(358): Homolog of NCBI NO: 3183079 NR Description: MALATE DEHYDROGENASE, GLYOXYSOMAL PRECURSOR
MEQGADSAAARRMARVASHLRPPTSQMEEVAILKGSDCRAKGAAPGFKVAVLGASGGIGQPLSLLMKMNPLVSVLHLYDVVNTPGVTADISHMNTGAVVRGFLGQSQLESALTGMDLVIIPAGIPRKPGMTRDDLFNINAGIVRTLCEGIAKCCPNAIVNVISNPVNSTVPIAAEVFKKAGTYDPKRLLGVTTLDVVRANTFVGEVLGLDPRDVNVPVVGGHAGVTILPLLSQVNPPCSFTSEEISYLTSRIQNGGTEVVEAKAGAGSATLSMAYAAAKFADACLRGLRGDAGIVECSYIACQVTELPFFASKVRLGRSGVEEVLPLGPLNEFERAGLEKAKGELAESIHKGVAFANK

SEQ ID NO: 62890 - protein, 346 aa, Triticum aestivum
  peptide (1)..(346): Ceres Seq. ID no. 13655253
  misc_feature (180)..(343): Pfam Name: lactate/malate dehydrogenase, alpha/beta Pfam Description: lactate/malate dehydrogenase, alpha/beta
  misc_feature (1)..(346): Homolog of NCBI NO: 12644436 NR Description: Malate dehydrogenase 1, glyoxysomal precursor
  misc_feature (1)..(346): Homolog of NCBI NO: 15227752 NR Description: malate dehydrogenase, glyoxysomal, putative
  misc_feature (1)..(346): Homolog of NCBI NO: 16323157 NR Description: AT5g09660/F17I14_150 [Arabidopsis thaliana]
  misc_feature (1)..(346): Homolog of NCBI NO: 15242466 NR Description: malate dehydrogenase, glyoxysomal [Arabidopsis
  misc_feature (1)..(346): Homolog of NCBI NO: 169977 NR Description: malate dehydrogenase
  misc_feature (1)..(346): Homolog of NCBI NO: 1346501 NR Description: MALATE DEHYDROGENASE, GLYOXYSOMAL PRECURSOR
  misc_feature (1)..(346): Homolog of NCBI NO: 34915204 NR Description: putative  glyoxysomal malate dehydrogenase
  misc_feature (1)..(343): Homolog of NCBI NO: 1170897 NR Description: MALATE DEHYDROGENASE, GLYOXYSOMAL PRECURSOR
  misc_feature (1)..(343): Homolog of NCBI NO: 126894 NR Description: MALATE DEHYDROGENASE, GLYOXYSOMAL PRECURSOR
  misc_feature (1)..(346): Homolog of NCBI NO: 3183079 NR Description: MALATE DEHYDROGENASE, GLYOXYSOMAL PRECURSOR
MARVASHLRPPTSQMEEVAILKGSDCRAKGAAPGFKVAVLGASGGIGQPLSLLMKMNPLVSVLHLYDVVNTPGVTADISHMNTGAVVRGFLGQSQLESALTGMDLVIIPAGIPRKPGMTRDDLFNINAGIVRTLCEGIAKCCPNAIVNVISNPVNSTVPIAAEVFKKAGTYDPKRLLGVTTLDVVRANTFVGEVLGLDPRDVNVPVVGGHAGVTILPLLSQVNPPCSFTSEEISYLTSRIQNGGTEVVEAKAGAGSATLSMAYAAAKFADACLRGLRGDAGIVECSYIACQVTELPFFASKVRLGRSGVEEVLPLGPLNEFERAGLEKAKGELAESIHKGVAFANK

SEQ ID NO: 62891 - protein, 332 aa, Triticum aestivum
  peptide (1)..(332): Ceres Seq. ID no. 13655254
  misc_feature (166)..(329): Pfam Name: lactate/malate dehydrogenase, alpha/beta Pfam Description: lactate/malate dehydrogenase, alpha/beta
  misc_feature (1)..(332): Homolog of NCBI NO: 12644436 NR Description: Malate dehydrogenase 1, glyoxysomal precursor
  misc_feature (1)..(332): Homolog of NCBI NO: 15227752 NR Description: malate dehydrogenase, glyoxysomal, putative
  misc_feature (1)..(332): Homolog of NCBI NO: 16323157 NR Description: AT5g09660/F17I14_150 [Arabidopsis thaliana]
  misc_feature (1)..(332): Homolog of NCBI NO: 15242466 NR Description: malate dehydrogenase, glyoxysomal [Arabidopsis
  misc_feature (1)..(332): Homolog of NCBI NO: 169977 NR Description: malate dehydrogenase
  misc_feature (1)..(332): Homolog of NCBI NO: 1346501 NR Description: MALATE DEHYDROGENASE, GLYOXYSOMAL PRECURSOR
  misc_feature (1)..(332): Homolog of NCBI NO: 34915204 NR Description: putative  glyoxysomal malate dehydrogenase
  misc_feature (1)..(329): Homolog of NCBI NO: 1170897 NR Description: MALATE DEHYDROGENASE, GLYOXYSOMAL PRECURSOR
  misc_feature (1)..(329): Homolog of NCBI NO: 126894 NR Description: MALATE DEHYDROGENASE, GLYOXYSOMAL PRECURSOR
  misc_feature (1)..(332): Homolog of NCBI NO: 3183079 NR Description: MALATE DEHYDROGENASE, GLYOXYSOMAL PRECURSOR
MEEVAILKGSDCRAKGAAPGFKVAVLGASGGIGQPLSLLMKMNPLVSVLHLYDVVNTPGVTADISHMNTGAVVRGFLGQSQLESALTGMDLVIIPAGIPRKPGMTRDDLFNINAGIVRTLCEGIAKCCPNAIVNVISNPVNSTVPIAAEVFKKAGTYDPKRLLGVTTLDVVRANTFVGEVLGLDPRDVNVPVVGGHAGVTILPLLSQVNPPCSFTSEEISYLTSRIQNGGTEVVEAKAGAGSATLSMAYAAAKFADACLRGLRGDAGIVECSYIACQVTELPFFASKVRLGRSGVEEVLPLGPLNEFERAGLEKAKGELAESIHKGVAFANK

SEQ ID NO: 62892 - DNA, 1264 bp, Triticum aestivum
  misc_feature (1)..(1264): Ceres Seq. ID no. 13655237
aaggattcatctcgtttacctcttctctgcaaggatccctcgagtattcccctcaagctcctcagaaatggcgaccggaagtaatagtagtagccaagagagcaagcagccaggccccgagctgcccaagcagctgccgttcgattttctcaagaaaatcaccaacgatttcggccaagaccggaagataagcggaagccccttcggcacactctacaaggggattgtgccagatgacggcagagtgattgccgtgaagaaacttcaggagaacgcgccaatgccagcagataagcagttcaacagagaggtccagaatgtgatgtccctcaagcatgagaacatagtggagcttgtcgggttctgctgcgaaacgcagaagaaactggtgcagtttgataagagatacatccaggcggacatcaccgaaagcttaatctgctatgagtatttacctaatgggagccttcaggagaatctttttgagcccaaggggtccactaaaccagaaattggttgggacgtacgcttcaaaataatcaaggggatttgccaaggcttacgttttctacacaagttggatattcccattgtccatatggatttgaagcctgagaatatactgttggatgcaaatatggtgccaaagatagcggattttgcactctcaagggtctttggccaagaacaaaccagactctgcacgcaaacagttgtcggatcatatgggtacatggctccagaatatctttacagaggtgaaatatcagcccagtcagacatatacagtttaggcctagtgataattgagatcaccactggagagcagaatcctcgcgaaaaagaccaaccatctgcaagaagttttgttgataaagtgcgtaaagaatggacgctggagaacataacatccaaatattcatcactggatcatgaaagcctccaacaagttaaaacatgcattgatatcgggtcaaactgtgttgagattgataggacaaaaagacctcgcatagaagaaattgttgactcgctcaacggactacgttcaagccaaaaagttaccgaggtctcccgtccgcctacaactggcaagaagctaatgggctccatttttggtctgaagaaatgaaacatgcacgcctgttactgctggaagattgtaactttaatttggaaataggagcctttgttgccatctcgtcctggaagcatttaagtgtaattttcttatgtgtaatatgtctttttattactattagtc

SEQ ID NO: 62893 - protein, 376 aa, Triticum aestivum
  peptide (1)..(376): Ceres Seq. ID no. 13655238
  misc_feature (315)..(359): Homolog of NCBI NO: 21929729 NR Description: barley stem rust resistance protein
  misc_feature (7)..(346): Homolog of NCBI NO: 21929729 NR Description: barley stem rust resistance protein
  misc_feature (315)..(359): Homolog of NCBI NO: 21929723 NR Description: barley stem rust resistance protein
  misc_feature (7)..(346): Homolog of NCBI NO: 21929723 NR Description: barley stem rust resistance protein
  misc_feature (43)..(348): Homolog of NCBI NO: 21929729 NR Description: barley stem rust resistance protein
  misc_feature (43)..(348): Homolog of NCBI NO: 21929723 NR Description: barley stem rust resistance protein
  misc_feature (43)..(348): Homolog of NCBI NO: 21728344 NR Description: stem rust resistance protein Rpg1
  misc_feature (41)..(353): Homolog of NCBI NO: 38344521 NR Description: OSJNBa0016N04.14 [Oryza sativa (japonica
  misc_feature (44)..(143): Homolog of NCBI NO: 37532178 NR Description: putative receptor-like protein kinase
  misc_feature (149)..(345): Homolog of NCBI NO: 37532178 NR Description: putative receptor-like protein kinase
RIHLVYLFSARIPRVFPSSSSEMATGSNSSSQESKQPGPELPKQLPFDFLKKITNDFGQDRKISGSPFGTLYKGIVPDDGRVIAVKKLQENAPMPADKQFNREVQNVMSLKHENIVELVGFCCETQKKLVQFDKRYIQADITESLICYEYLPNGSLQENLFEPKGSTKPEIGWDVRFKIIKGICQGLRFLHKLDIPIVHMDLKPENILLDANMVPKIADFALSRVFGQEQTRLCTQTVVGSYGYMAPEYLYRGEISAQSDIYSLGLVIIEITTGEQNPREKDQPSARSFVDKVRKEWTLENITSKYSSLDHESLQQVKTCIDIGSNCVEIDRTKRPRIEEIVDSLNGLRSSQKVTEVSRPPTTGKKLMGSIFGLKK

SEQ ID NO: 62894 - protein, 354 aa, Triticum aestivum
  peptide (1)..(354): Ceres Seq. ID no. 13655239
  misc_feature (293)..(337): Homolog of NCBI NO: 21929729 NR Description: barley stem rust resistance protein
  misc_feature (1)..(324): Homolog of NCBI NO: 21929729 NR Description: barley stem rust resistance protein
  misc_feature (293)..(337): Homolog of NCBI NO: 21929723 NR Description: barley stem rust resistance protein
  misc_feature (1)..(324): Homolog of NCBI NO: 21929723 NR Description: barley stem rust resistance protein
  misc_feature (21)..(326): Homolog of NCBI NO: 21929723 NR Description: barley stem rust resistance protein
  misc_feature (21)..(326): Homolog of NCBI NO: 21929729 NR Description: barley stem rust resistance protein
  misc_feature (21)..(326): Homolog of NCBI NO: 21728344 NR Description: stem rust resistance protein Rpg1
  misc_feature (19)..(331): Homolog of NCBI NO: 38344521 NR Description: OSJNBa0016N04.14 [Oryza sativa (japonica
  misc_feature (22)..(121): Homolog of NCBI NO: 37532178 NR Description: putative receptor-like protein kinase
  misc_feature (127)..(323): Homolog of NCBI NO: 37532178 NR Description: putative receptor-like protein kinase
MATGSNSSSQESKQPGPELPKQLPFDFLKKITNDFGQDRKISGSPFGTLYKGIVPDDGRVIAVKKLQENAPMPADKQFNREVQNVMSLKHENIVELVGFCCETQKKLVQFDKRYIQADITESLICYEYLPNGSLQENLFEPKGSTKPEIGWDVRFKIIKGICQGLRFLHKLDIPIVHMDLKPENILLDANMVPKIADFALSRVFGQEQTRLCTQTVVGSYGYMAPEYLYRGEISAQSDIYSLGLVIIEITTGEQNPREKDQPSARSFVDKVRKEWTLENITSKYSSLDHESLQQVKTCIDIGSNCVEIDRTKRPRIEEIVDSLNGLRSSQKVTEVSRPPTTGKKLMGSIFGLKK

SEQ ID NO: 62895 - protein, 283 aa, Triticum aestivum
  peptide (1)..(283): Ceres Seq. ID no. 13655240
  misc_feature (222)..(266): Homolog of NCBI NO: 21929729 NR Description: barley stem rust resistance protein
  misc_feature (1)..(253): Homolog of NCBI NO: 21929729 NR Description: barley stem rust resistance protein
  misc_feature (222)..(266): Homolog of NCBI NO: 21929723 NR Description: barley stem rust resistance protein
  misc_feature (1)..(253): Homolog of NCBI NO: 21929723 NR Description: barley stem rust resistance protein
  misc_feature (1)..(255): Homolog of NCBI NO: 21929729 NR Description: barley stem rust resistance protein
  misc_feature (1)..(255): Homolog of NCBI NO: 21929723 NR Description: barley stem rust resistance protein
  misc_feature (1)..(255): Homolog of NCBI NO: 21728344 NR Description: stem rust resistance protein Rpg1
  misc_feature (1)..(260): Homolog of NCBI NO: 38344521 NR Description: OSJNBa0016N04.14 [Oryza sativa (japonica
  misc_feature (1)..(50): Homolog of NCBI NO: 37532178 NR Description: putative receptor-like protein kinase
  misc_feature (56)..(252): Homolog of NCBI NO: 37532178 NR Description: putative receptor-like protein kinase
MPADKQFNREVQNVMSLKHENIVELVGFCCETQKKLVQFDKRYIQADITESLICYEYLPNGSLQENLFEPKGSTKPEIGWDVRFKIIKGICQGLRFLHKLDIPIVHMDLKPENILLDANMVPKIADFALSRVFGQEQTRLCTQTVVGSYGYMAPEYLYRGEISAQSDIYSLGLVIIEITTGEQNPREKDQPSARSFVDKVRKEWTLENITSKYSSLDHESLQQVKTCIDIGSNCVEIDRTKRPRIEEIVDSLNGLRSSQKVTEVSRPPTTGKKLMGSIFGLKK

SEQ ID NO: 62896 - DNA, 1230 bp, Triticum aestivum
  misc_feature (1)..(1230): Ceres Seq. ID no. 13655124
acacccttccagctcgcgacgccacctgagacctgaccacctcggctgctactgctagacgggcacggcctcgccgactccttcttccatcagggttcgacagctcacccttttggatccaagttcaggtttgatctgtgaggaagttcaactctgcagtgctgttccgaatcggaagcttgatcatggaaggagccactcccacttccgctccctcgagcacaaggattgctgtggtcaccggcgggagcaaagggatcgggctggaggcgtgcaagcagctggcaggcggcggcgccatcaccgttgttctgacggccaggaacgagacgaggggaacagcggcggtcgagcagatcaagcggctggggcacgcagatgtcatctttcatcagctggacatcacggatgcttccagcatcgctcgactcgcagatttcctcaagacccgtttcgggaagcttgacatcctggtgaataacgccgcgacggatgggattgagcatgtcattgatccagtttatggcttaacgcccggcgatgaaacgttcaatggcatggacgcgggccagaggatcaattggatgtggaccagctgccgccagacgtacgagaccgcgaaacagggcctgcagacaaactactacggcacgaagcgggtgacggaggctctcctgcccctgctccgatcctcgtccgacggaaggatcgtcaacgtctcctccaacttcggattgctcagctttttcaggaacgaggagctgaagcaggagctgaacgacgtcgacagcctgaccgagkgagaggctggacgagctgctggccatgttcctcaaggacttcgaggccggcggcgcggaggcgcgcgggtggccggccgagttctcggcgtacaaggtggccaaggccgccatgaacgcctactcgagaatcctggccaagaggcacccggagctgcgcgtcaactgcgcgcaccccggctacgtgaagacggatatcaccaggaactccgggatcctgacgccggaggagggcgcgcgcaacatcaccagcgttgcgctgctgccggaaggcgggcccaccggcaagtacttctccgaaggcgaggaggcatccttcgtgtgaaagagcatctgtagtactactgttttgttgcgcttatctgtggtgtgtggtgggataatctgcaaagtcgagttcaaaaaaaggaataaagttacgttagtttgg

SEQ ID NO: 62897 - protein, 317 aa, Triticum aestivum
  peptide (1)..(317): Ceres Seq. ID no. 15219205
  misc_feature (14)..(231): Homolog of NCBI NO: 18378884 NR Description: short-chain dehydrogenase/reductase family
  misc_feature (13)..(231): Homolog of NCBI NO: 25518668 NR Description: hypothetical protein T1N6.22 - Arabidopsis
  misc_feature (9)..(205): Homolog of NCBI NO: 15233062 NR Description: short-chain dehydrogenase/reductase family
  misc_feature (14)..(205): Homolog of NCBI NO: 34559416 NR Description: (-)-isopiperitenone reductase [Mentha x piperita]
  misc_feature (14)..(201): Homolog of NCBI NO: 33146492 NR Description: carbonyl reductase -like protein
  misc_feature (1)..(205): Homolog of NCBI NO: 38346767 NR Description: OSJNBa0081C01.18 [Oryza sativa (japonica
  misc_feature (1)..(205): Homolog of NCBI NO: 38346768 NR Description: OSJNBa0081C01.19 [Oryza sativa (japonica
  misc_feature (7)..(205): Homolog of NCBI NO: 38346769 NR Description: OSJNBa0081C01.20 [Oryza sativa (japonica
  misc_feature (1)..(205): Homolog of NCBI NO: 38346774 NR Description: OSJNBa0081C01.25 [Oryza sativa (japonica
  misc_feature (13)..(213): Homolog of NCBI NO: 38346772 NR Description: OSJNBa0081C01.23 [Oryza sativa (japonica
  misc_feature (206)..(206): Xaa is any aa, unknown or other
MEGATPTSAPSSTRIAVVTGGSKGIGLEACKQLAGGGAITVVLTARNETRGTAAVEQIKRLGHADVIFHQLDITDASSIARLADFLKTRFGKLDILVNNAATDGIEHVIDPVYGLTPGDETFNGMDAGQRINWMWTSCRQTYETAKQGLQTNYYGTKRVTEALLPLLRSSSDGRIVNVSSNFGLLSFFRNEELKQELNDVDSLTEXEAGRAAGHVPQGLRGRRRGGARVAGRVLGVQGGQGRHERLLENPGQEAPGAARQLRAPRLREDGYHQELRDPDAGGGRAQHHQRCAAAGRRAHRQVLLRRRGGILRVKEHL

SEQ ID NO: 62898 - protein, 193 aa, Triticum aestivum
  peptide (1)..(193): Ceres Seq. ID no. 15219206
  misc_feature (1)..(107): Homolog of NCBI NO: 18378884 NR Description: short-chain dehydrogenase/reductase family
  misc_feature (1)..(107): Homolog of NCBI NO: 25518668 NR Description: hypothetical protein T1N6.22 - Arabidopsis
  misc_feature (1)..(81): Homolog of NCBI NO: 15233062 NR Description: short-chain dehydrogenase/reductase family
  misc_feature (1)..(81): Homolog of NCBI NO: 34559416 NR Description: (-)-isopiperitenone reductase [Mentha x piperita]
  misc_feature (1)..(77): Homolog of NCBI NO: 33146492 NR Description: carbonyl reductase -like protein
  misc_feature (1)..(81): Homolog of NCBI NO: 38346767 NR Description: OSJNBa0081C01.18 [Oryza sativa (japonica
  misc_feature (1)..(81): Homolog of NCBI NO: 38346768 NR Description: OSJNBa0081C01.19 [Oryza sativa (japonica
  misc_feature (1)..(81): Homolog of NCBI NO: 38346769 NR Description: OSJNBa0081C01.20 [Oryza sativa (japonica
  misc_feature (1)..(81): Homolog of NCBI NO: 38346774 NR Description: OSJNBa0081C01.25 [Oryza sativa (japonica
  misc_feature (1)..(89): Homolog of NCBI NO: 38346772 NR Description: OSJNBa0081C01.23 [Oryza sativa (japonica
  misc_feature (82)..(82): Xaa is any aa, unknown or other
MDAGQRINWMWTSCRQTYETAKQGLQTNYYGTKRVTEALLPLLRSSSDGRIVNVSSNFGLLSFFRNEELKQELNDVDSLTEXEAGRAAGHVPQGLRGRRRGGARVAGRVLGVQGGQGRHERLLENPGQEAPGAARQLRAPRLREDGYHQELRDPDAGGGRAQHHQRCAAAGRRAHRQVLLRRRGGILRVKEHL

SEQ ID NO: 62899 - protein, 184 aa, Triticum aestivum
  peptide (1)..(184): Ceres Seq. ID no. 15219207
  misc_feature (1)..(98): Homolog of NCBI NO: 18378884 NR Description: short-chain dehydrogenase/reductase family
  misc_feature (1)..(98): Homolog of NCBI NO: 25518668 NR Description: hypothetical protein T1N6.22 - Arabidopsis
  misc_feature (1)..(72): Homolog of NCBI NO: 15233062 NR Description: short-chain dehydrogenase/reductase family
  misc_feature (1)..(72): Homolog of NCBI NO: 34559416 NR Description: (-)-isopiperitenone reductase [Mentha x piperita]
  misc_feature (1)..(68): Homolog of NCBI NO: 33146492 NR Description: carbonyl reductase -like protein
  misc_feature (1)..(72): Homolog of NCBI NO: 38346767 NR Description: OSJNBa0081C01.18 [Oryza sativa (japonica
  misc_feature (1)..(72): Homolog of NCBI NO: 38346768 NR Description: OSJNBa0081C01.19 [Oryza sativa (japonica
  misc_feature (1)..(72): Homolog of NCBI NO: 38346769 NR Description: OSJNBa0081C01.20 [Oryza sativa (japonica
  misc_feature (1)..(72): Homolog of NCBI NO: 38346774 NR Description: OSJNBa0081C01.25 [Oryza sativa (japonica
  misc_feature (1)..(80): Homolog of NCBI NO: 38346772 NR Description: OSJNBa0081C01.23 [Oryza sativa (japonica
  misc_feature (73)..(73): Xaa is any aa, unknown or other
MWTSCRQTYETAKQGLQTNYYGTKRVTEALLPLLRSSSDGRIVNVSSNFGLLSFFRNEELKQELNDVDSLTEXEAGRAAGHVPQGLRGRRRGGARVAGRVLGVQGGQGRHERLLENPGQEAPGAARQLRAPRLREDGYHQELRDPDAGGGRAQHHQRCAAAGRRAHRQVLLRRRGGILRVKEHL

SEQ ID NO: 62900 - DNA, 1318 bp, Triticum aestivum
  misc_feature (1)..(1318): Ceres Seq. ID no. 13596892
  misc_feature: Pfam Name: adh_short Pfam Description: short chain dehydrogenase
aagcttcttctgtgtcttccagcttgggcagcaggcaggcgtgtgagctcgaatccaagaggccggagacgatggatctggtgaacggcgcgctcaactgggcggcgatgcccgccatggtcgcctccctcctgctcttctacccgccctactacctcttcaagctctgctactccttcctctcctacctcttccccgacgacctcaagcgcaaggtcgtcctcatcaccggcgcctcctccggcatcggcgagcaactggcctaccagtacgccaccaagggggcatgccttgccctgctcgccaggagggagtggagcctgcggcaggtcgccgaccgcgccttcgagctcggcgcgcccgacgtcatcattctccccggcgacgtcgcagaccccgacgactgcaacagatttgttcaggccacaatcgaccactacggccgattggaccatcttgtgtgcaacgctggaattgcgagcgtgggcgcttttcaggagattcctgacgttactaactacagcccgcagcttgatgtcaacttctggggtgcagttcagtccacttttgctgctctgccccatcttaaaaggacccgagggaggatcgtggtcaccgcctccgcaaccggatggaaccctgttccgcgaatggttttctataatgccgccaatgccgcactgattaacttcttcgagaccctacggtcggagcttggtagtgaagttggcatcacaatagtgacgcctgggtggatcgagtccgagatgtccaaaggcaagtttctcaaggagcacggcggcgtggaggttgatcaagaatatcgagatgcccaaatcggtctcttcccggtggagtacgcgaagaactgcgcgagggccatggtgcaggcagctcgccaaggtgaccgttacctcaccgtgccgtcatggttcggaacaatgtacctgtggagggtgtttgcgccggaggtcgtcgagttctgctaccgcctcctgtatatgcacggccatggcggtggcgaccagaccgacgcgccgagcaagacgatggcccagggtggcgggaagcagatgctgtacccctcctcgctgcgctcttcggacgtcaaaaacgactagaaacttactatagttcgcatcctttgatcgaggacgtggatcctggtgtgcaggctagtttgttctctactaagctttaggtgtggatgctactgctggttagctagtttgtaatcccgaataagctgtgttctgtgttttgtaatattagtgttgtgttgtgtgcttgtaatattagttctgtgtttgagactgcg

SEQ ID NO: 62901 - protein, 372 aa, Triticum aestivum
  peptide (1)..(372): Ceres Seq. ID no. 15221994
  misc_feature: Pfam Name: adh_short Pfam Description: short chain dehydrogenase
  misc_feature (66)..(326): Homolog of NCBI NO: 24372033 NR Description: oxidoreductase, short chain
  misc_feature (24)..(334): Homolog of NCBI NO: 15232779 NR Description: short-chain dehydrogenase/reductase family
  misc_feature (24)..(334): Homolog of NCBI NO: 15232777 NR Description: short-chain dehydrogenase/reductase family
  misc_feature (24)..(325): Homolog of NCBI NO: 15241203 NR Description: short-chain dehydrogenase/reductase family
  misc_feature (24)..(325): Homolog of NCBI NO: 8777392 NR Description: 11-beta-hydroxysteroid dehydrogenase-like
  misc_feature (24)..(354): Homolog of NCBI NO: 15234888 NR Description: short-chain dehydrogenase/reductase family
  misc_feature (24)..(369): Homolog of NCBI NO: 21311775 NR Description: steroleosin-B [Sesamum indicum]
  misc_feature (24)..(332): Homolog of NCBI NO: 15241261 NR Description: short-chain dehydrogenase/reductase family
  misc_feature (24)..(372): Homolog of NCBI NO: 15824408 NR Description: steroleosin [Sesamum indicum]
  misc_feature (24)..(372): Homolog of NCBI NO: 18423187 NR Description: short-chain dehydrogenase/reductase family
ASSVSSSLGSRQACELESKRPETMDLVNGALNWAAMPAMVASLLLFYPPYYLFKLCYSFLSYLFPDDLKRKVVLITGASSGIGEQLAYQYATKGACLALLARREWSLRQVADRAFELGAPDVIILPGDVADPDDCNRFVQATIDHYGRLDHLVCNAGIASVGAFQEIPDVTNYSPQLDVNFWGAVQSTFAALPHLKRTRGRIVVTASATGWNPVPRMVFYNAANAALINFFETLRSELGSEVGITIVTPGWIESEMSKGKFLKEHGGVEVDQEYRDAQIGLFPVEYAKNCARAMVQAARQGDRYLTVPSWFGTMYLWRVFAPEVVEFCYRLLYMHGHGGGDQTDAPSKTMAQGGGKQMLYPSSLRSSDVKND

SEQ ID NO: 62902 - protein, 349 aa, Triticum aestivum
  peptide (1)..(349): Ceres Seq. ID no. 15221995
  misc_feature: Pfam Name: adh_short Pfam Description: short chain dehydrogenase
  misc_feature (43)..(303): Homolog of NCBI NO: 24372033 NR Description: oxidoreductase, short chain
  misc_feature (1)..(311): Homolog of NCBI NO: 15232779 NR Description: short-chain dehydrogenase/reductase family
  misc_feature (1)..(311): Homolog of NCBI NO: 15232777 NR Description: short-chain dehydrogenase/reductase family
  misc_feature (1)..(302): Homolog of NCBI NO: 15241203 NR Description: short-chain dehydrogenase/reductase family
  misc_feature (1)..(302): Homolog of NCBI NO: 8777392 NR Description: 11-beta-hydroxysteroid dehydrogenase-like
  misc_feature (1)..(331): Homolog of NCBI NO: 15234888 NR Description: short-chain dehydrogenase/reductase family
  misc_feature (1)..(346): Homolog of NCBI NO: 21311775 NR Description: steroleosin-B [Sesamum indicum]
  misc_feature (1)..(309): Homolog of NCBI NO: 15241261 NR Description: short-chain dehydrogenase/reductase family
  misc_feature (1)..(349): Homolog of NCBI NO: 15824408 NR Description: steroleosin [Sesamum indicum]
  misc_feature (1)..(349): Homolog of NCBI NO: 18423187 NR Description: short-chain dehydrogenase/reductase family
MDLVNGALNWAAMPAMVASLLLFYPPYYLFKLCYSFLSYLFPDDLKRKVVLITGASSGIGEQLAYQYATKGACLALLARREWSLRQVADRAFELGAPDVIILPGDVADPDDCNRFVQATIDHYGRLDHLVCNAGIASVGAFQEIPDVTNYSPQLDVNFWGAVQSTFAALPHLKRTRGRIVVTASATGWNPVPRMVFYNAANAALINFFETLRSELGSEVGITIVTPGWIESEMSKGKFLKEHGGVEVDQEYRDAQIGLFPVEYAKNCARAMVQAARQGDRYLTVPSWFGTMYLWRVFAPEVVEFCYRLLYMHGHGGGDQTDAPSKTMAQGGGKQMLYPSSLRSSDVKND

SEQ ID NO: 62903 - protein, 337 aa, Triticum aestivum
  peptide (1)..(337): Ceres Seq. ID no. 15221996
  misc_feature: Pfam Name: adh_short Pfam Description: short chain dehydrogenase
  misc_feature (31)..(291): Homolog of NCBI NO: 24372033 NR Description: oxidoreductase, short chain
  misc_feature (1)..(299): Homolog of NCBI NO: 15232779 NR Description: short-chain dehydrogenase/reductase family
  misc_feature (1)..(299): Homolog of NCBI NO: 15232777 NR Description: short-chain dehydrogenase/reductase family
  misc_feature (1)..(290): Homolog of NCBI NO: 15241203 NR Description: short-chain dehydrogenase/reductase family
  misc_feature (1)..(290): Homolog of NCBI NO: 8777392 NR Description: 11-beta-hydroxysteroid dehydrogenase-like
  misc_feature (1)..(319): Homolog of NCBI NO: 15234888 NR Description: short-chain dehydrogenase/reductase family
  misc_feature (1)..(334): Homolog of NCBI NO: 21311775 NR Description: steroleosin-B [Sesamum indicum]
  misc_feature (1)..(297): Homolog of NCBI NO: 15241261 NR Description: short-chain dehydrogenase/reductase family
  misc_feature (1)..(337): Homolog of NCBI NO: 15824408 NR Description: steroleosin [Sesamum indicum]
  misc_feature (1)..(337): Homolog of NCBI NO: 18423187 NR Description: short-chain dehydrogenase/reductase family
MPAMVASLLLFYPPYYLFKLCYSFLSYLFPDDLKRKVVLITGASSGIGEQLAYQYATKGACLALLARREWSLRQVADRAFELGAPDVIILPGDVADPDDCNRFVQATIDHYGRLDHLVCNAGIASVGAFQEIPDVTNYSPQLDVNFWGAVQSTFAALPHLKRTRGRIVVTASATGWNPVPRMVFYNAANAALINFFETLRSELGSEVGITIVTPGWIESEMSKGKFLKEHGGVEVDQEYRDAQIGLFPVEYAKNCARAMVQAARQGDRYLTVPSWFGTMYLWRVFAPEVVEFCYRLLYMHGHGGGDQTDAPSKTMAQGGGKQMLYPSSLRSSDVKND

SEQ ID NO: 62904 - DNA, 1427 bp, Triticum aestivum
  misc_feature (1)..(1427): Ceres Seq. ID no. 13596735
caacatcctaatcgaaaaatctatccgtttcgttgcgacctacgctccactcgctgtctcagtctccagcaacaaaaggagcacactaccctgccggctcacacccgctgccggagcacctacgcacagactaggcagccatgcgtcgcctccactacaccatcaccaccctgctctccgcaacctgcctccttctgcacgccatggcgtcgccggcactgcctgacccggggtcgctcgagccgtccctgctcttcccgtcggccggcgcctcccaggcccaacccgccgcggcatccaccatcccggcattccccgagcagtccgaggccgcggccacctcttccgtctgccagctcaccccttccccgccgctcctcccggccgtcctggcctcctgcaacgccggcagcggcagcggcgtcctcccgccgcggctgcggtgctgcccggccctggccgcgtggctgtacgccgcgtacgcgcccaccgcgttggggagcgacggcagcaggtggtcgaagctccccgccgcggcggcggacgtgacggacctgccgctgctgccggacgacgtggaggagtgcgcgggcgccgcggagcgcgcgctgaggtccgcgggagcgacgctgccgcagccgcaggcggggagcaacaatgggacgacgtgcgacgtgcccttctgctactgcgggataaggctgaggcggccggtctgcgcgctgccggcgggcagggctgcgaggaggctggagagggactgcgcgcggccggggctcgccggctgctcccggtgcctccgggcgctgaacctgctgaacgccattggagagaagaacgccacgtcggggaaggccagtcatggcgggaagccacgtgagcgtgactgccagctcatggggctgacgtggctgctgcagcggaacgccacgaggcatcgggcggccgccacggcggtcctccaggccctcatggcggccgaggaggcgggggctaccagcgcgcccgccacgtgctcgctccccgtcgatggcctgccgctngccgtcgcgtcgtcggagatcaacggcgccgccgatgtgtcccccatgggcagcctgcttcttcgctttctgctggggacgtctgccttcatcttgtcccggcggttctgagcaaaatctgatcttcgctgcgcggtctctttgctatttcttctgtgtttgcacttctgatgttgaattagtagttgttcaatttgtttgtacttctgatgatgtttagttcttgaaaggctagggactagagagtggacttcgttactgtaattatatgcaatcccggtggggatgcctaatctagtgagcgtgcattgcatctccatttaavcraaaaaaaaaaaaaaaaaaaaaaaaaaaaagaaaaaaaaaaaaaaaaaagcttatcga

SEQ ID NO: 62905 - protein, 337 aa, Triticum aestivum
  peptide (1)..(337): Ceres Seq. ID no. 15221961
  misc_feature (12)..(326): Homolog of NCBI NO: 18401752 NR Description: expressed protein [Arabidopsis thaliana]
  misc_feature (36)..(305): Homolog of NCBI NO: 21593735 NR Description: unknown [Arabidopsis thaliana]
  misc_feature (36)..(305): Homolog of NCBI NO: 18417127 NR Description: expressed protein [Arabidopsis thaliana]
  misc_feature (37)..(323): Homolog of NCBI NO: 34394002 NR Description: unknown protein [Oryza sativa (japonica
  misc_feature (301)..(301): Xaa is any aa, unknown or other
MRRLHYTITTLLSATCLLLHAMASPALPDPGSLEPSLLFPSAGASQAQPAAASTIPAFPEQSEAAATSSVCQLTPSPPLLPAVLASCNAGSGSGVLPPRLRCCPALAAWLYAAYAPTALGSDGSRWSKLPAAAADVTDLPLLPDDVEECAGAAERALRSAGATLPQPQAGSNNGTTCDVPFCYCGIRLRRPVCALPAGRAARRLERDCARPGLAGCSRCLRALNLLNAIGEKNATSGKASHGGKPRERDCQLMGLTWLLQRNATRHRAAATAVLQALMAAEEAGATSAPATCSLPVDGLPXAVASSEINGAADVSPMGSLLLRFLLGTSAFILSRRF

SEQ ID NO: 62906 - protein, 316 aa, Triticum aestivum
  peptide (1)..(316): Ceres Seq. ID no. 15221962
  misc_feature (1)..(305): Homolog of NCBI NO: 18401752 NR Description: expressed protein [Arabidopsis thaliana]
  misc_feature (15)..(284): Homolog of NCBI NO: 21593735 NR Description: unknown [Arabidopsis thaliana]
  misc_feature (15)..(284): Homolog of NCBI NO: 18417127 NR Description: expressed protein [Arabidopsis thaliana]
  misc_feature (16)..(302): Homolog of NCBI NO: 34394002 NR Description: unknown protein [Oryza sativa (japonica
  misc_feature (280)..(280): Xaa is any aa, unknown or other
MASPALPDPGSLEPSLLFPSAGASQAQPAAASTIPAFPEQSEAAATSSVCQLTPSPPLLPAVLASCNAGSGSGVLPPRLRCCPALAAWLYAAYAPTALGSDGSRWSKLPAAAADVTDLPLLPDDVEECAGAAERALRSAGATLPQPQAGSNNGTTCDVPFCYCGIRLRRPVCALPAGRAARRLERDCARPGLAGCSRCLRALNLLNAIGEKNATSGKASHGGKPRERDCQLMGLTWLLQRNATRHRAAATAVLQALMAAEEAGATSAPATCSLPVDGLPXAVASSEINGAADVSPMGSLLLRFLLGTSAFILSRRF

SEQ ID NO: 62907 - protein, 182 aa, Triticum aestivum
  peptide (1)..(182): Ceres Seq. ID no. 15221963
  misc_feature (43)..(164): Pfam Name: Cornifin (SPRR) family Pfam Description: Cornifin (SPRR) family
  misc_feature (47)..(182): Homolog of NCBI NO: 6634015 NR Description: KIAA0324 protein [Homo sapiens]
  misc_feature (47)..(182): Homolog of NCBI NO: 5821151 NR Description: RNA binding protein [Homo sapiens]
  misc_feature (23)..(181): Homolog of NCBI NO: 7949115 NR Description: Ser/Arg-related nuclear matrix protein
  misc_feature (51)..(180): Homolog of NCBI NO: 2429362 NR Description: proline rich protein [Santalum album]
  misc_feature (47)..(178): Homolog of NCBI NO: 38345019 NR Description: OSJNBa0029H02.3 [Oryza sativa (japonica
  misc_feature (26)..(178): Homolog of NCBI NO: 283045 NR Description: hydroxyproline-rich glycoprotein - maize
  misc_feature (55)..(181): Homolog of NCBI NO: 8650496 NR Description: 163R* [porcine adenovirus 3]
  misc_feature (21)..(182): Homolog of NCBI NO: 25143299 NR Description: pre-mRNA splicing SR protein related RSR-1 (68.2
  misc_feature (6)..(182): Homolog of NCBI NO: 11360318 NR Description: probable mucin DKFZp434C196.1 - human (fragment)
  misc_feature (30)..(182): Homolog of NCBI NO: 17939907 NR Description: UL36 protein [Pseudorabies virus]
QHPNRKIYPFRCDLRSTRCLSLQQQKEHTTLPAHTRCRSTYAQTRQPCVASTTPSPPCSPQPASFCTPWRRRHCLTRGRSSRPCSSRRPAPPRPNPPRHPPSRHSPSSPRPRPPLPSASSPLPRRSSRPSWPPATPAAAAASSRRGCGAARPWPRGCTPRTRPPRWGATAAGGRSSPPRRRT

SEQ ID NO: 62908 - DNA, 1100 bp, Triticum aestivum
  misc_feature (1)..(1100): Ceres Seq. ID no. 13598455
gattgatcctctttcgcctctgtaccgcgtgtcggtcctcgcgagttcgccgtggaacaccccatgggctccggcgaggacaaccccggaggaaccggtggaggagtcggcgggatagtccggggtgcggtgctgaaggcgctcgtcgtcttcggcggcgttattctgatccggcggctgcgccgctccaccacccggtgggaccacgcccgcgccgtcgccgacgccctctctggtgaaaagttctcgagggagcaggcgaggcaggatcctggaaactatttcaaccttagaatgctcacttgccctgcaactgagatggtggatggttctggagtgctctactttgagcaagcattttggagagctccagaaaaacctttccgacaaagattctacatggtaaagccatgtccaaaggagatgaaatgtgacgttgagttgagttcttatgcaattagagatgttgaagagtacaagaatttctgtgaccgaccaaaagatcagaggccgcagccagaagaagtaattgcggatatcgcagagcatttgaccaccatacacttatcacgatgtgaacgtggaaaacgctgcttatatgaaggatcaaccccaccgggaggttttcccaacagttggagcggtgcagcatattgtacatctgatctgtccattcataagaatggtgaaatacacatttgggacaagggttttgacgacgatgggagccaggtttggggaaccaaggctggcccttacgagtttaagcctgctcccaagtccaattatgatgacatgttctcacctttaaatttctctgcccccttgtcactagagaagatggaaagatcatatgcaattgatgaccagtagatgagcattgttaatacattttattgttagagaacaccataagaatatcatgtgtttatatattttgacagtatctctgatcatcaacaaatggtaattctgtgggtgaacacttgcaatgcctgacaacatagtgagatataacaattgtcatattgcagctaacatgagttatgtaagcagacggagcattaattctaatgttcgttagatggagatgcttgttg

SEQ ID NO: 62909 - protein, 269 aa, Triticum aestivum
  peptide (1)..(269): Ceres Seq. ID no. 13598456
  misc_feature (52)..(235): Homolog of NCBI NO: 37520007 NR Description: hypothetical protein glr0438 [Gloeobacter
  misc_feature (3)..(268): Homolog of NCBI NO: 21554618 NR Description: unknown [Arabidopsis thaliana]
  misc_feature (3)..(268): Homolog of NCBI NO: 15241343 NR Description: expressed protein [Arabidopsis thaliana]
MGSGEDNPGGTGGGVGGIVRGAVLKALVVFGGVILIRRLRRSTTRWDHARAVADALSGEKFSREQARQDPGNYFNLRMLTCPATEMVDGSGVLYFEQAFWRAPEKPFRQRFYMVKPCPKEMKCDVELSSYAIRDVEEYKNFCDRPKDQRPQPEEVIADIAEHLTTIHLSRCERGKRCLYEGSTPPGGFPNSWSGAAYCTSDLSIHKNGEIHIWDKGFDDDGSQVWGTKAGPYEFKPAPKSNYDDMFSPLNFSAPLSLEKMERSYAIDDQ

SEQ ID NO: 62910 - protein, 192 aa, Triticum aestivum
  peptide (1)..(192): Ceres Seq. ID no. 13598457
  misc_feature (1)..(158): Homolog of NCBI NO: 37520007 NR Description: hypothetical protein glr0438 [Gloeobacter
  misc_feature (1)..(191): Homolog of NCBI NO: 21554618 NR Description: unknown [Arabidopsis thaliana]
  misc_feature (1)..(191): Homolog of NCBI NO: 15241343 NR Description: expressed protein [Arabidopsis thaliana]
MLTCPATEMVDGSGVLYFEQAFWRAPEKPFRQRFYMVKPCPKEMKCDVELSSYAIRDVEEYKNFCDRPKDQRPQPEEVIADIAEHLTTIHLSRCERGKRCLYEGSTPPGGFPNSWSGAAYCTSDLSIHKNGEIHIWDKGFDDDGSQVWGTKAGPYEFKPAPKSNYDDMFSPLNFSAPLSLEKMERSYAIDDQ

SEQ ID NO: 62911 - protein, 184 aa, Triticum aestivum
  peptide (1)..(184): Ceres Seq. ID no. 13598458
  misc_feature (1)..(150): Homolog of NCBI NO: 37520007 NR Description: hypothetical protein glr0438 [Gloeobacter
  misc_feature (1)..(183): Homolog of NCBI NO: 21554618 NR Description: unknown [Arabidopsis thaliana]
  misc_feature (1)..(183): Homolog of NCBI NO: 15241343 NR Description: expressed protein [Arabidopsis thaliana]
MVDGSGVLYFEQAFWRAPEKPFRQRFYMVKPCPKEMKCDVELSSYAIRDVEEYKNFCDRPKDQRPQPEEVIADIAEHLTTIHLSRCERGKRCLYEGSTPPGGFPNSWSGAAYCTSDLSIHKNGEIHIWDKGFDDDGSQVWGTKAGPYEFKPAPKSNYDDMFSPLNFSAPLSLEKMERSYAIDDQ

SEQ ID NO: 62912 - DNA, 1073 bp, Triticum aestivum
  misc_feature (1)..(1073): Ceres Seq. ID no. 12585331
aagaccgcgtcccaaccgaaaatccccaattccccaccaccgacagcgtcggtgagagagatggcgtcggcgacggagatgcagccgctggcaccgtcgggctaccgccgggcgccggagatgaaggagaaggtggaggcgtcgtcgatcgacctggaggcggggaacggggagacgctctacccggggatctcgcgcggggagaacgccctccgctggggcttcatccgcaaggtctacggcatcctctgcgcgcagctggtcctcaccaccgtcgtctccgccatcaccgtcttctaccccaccctcaacgccacgctctccaactcgcccgtcctcgcgctcgtgctcgccgtcctccccttcatcctgatgatcccattgtacatctatcagcacagacaccctcacaatcttgctatcttgggtttgttcactctgtgcttgagcttcagcattggtgtggcttgtgcaaacactgaaggaactattgtgcttcaagcattggtactgacctcagctgtggttgtctctctgactgcatacacattctgggccgcaaagaagggcaaggaatttagttaccttggaccgtttctgttttctgctctcaccatcctggtcgtgataagctttacccagatcttcttcccatttggacctgcatcgaatgctgtgatcggtgggtttggagctctagtcttctcaggcttcatcgtctacgacactgagaacttgataaagcgccacacttatgacgagtacatctgggcgtctgttgagctttacctcgacatcctcaacctgttcctgaccatcctacagatgctcaggcagaatgacaactgatgggtcctgtctgaaccaccaggaccttgtgccaacccaggcatatgtccaacatttatcaagtcttttgaattgctatctacataacttggaagacatggtagtaagtttttgccatcatccagagatgaggccaaagtacaaccatatgtataggtgttctattgtgagtttatgtgcctgagtgttgttaaactgccaacaatcagtgatcgtatgaacgt

SEQ ID NO: 62913 - protein, 282 aa, Triticum aestivum
  peptide (1)..(282): Ceres Seq. ID no. 12585332
  misc_feature (68)..(281): Pfam Name: Uncharacterised protein family UPF0005 Pfam Description: Uncharacterised protein family UPF0005
  misc_feature (162)..(233): Homolog of NCBI NO: 7485070 NR Description: hypothetical protein - Arabidopsis thaliana
  misc_feature (32)..(125): Homolog of NCBI NO: 7485070 NR Description: hypothetical protein - Arabidopsis thaliana
  misc_feature (64)..(282): Homolog of NCBI NO: 34393840 NR Description: putative z-protein [Oryza sativa (japonica
  misc_feature (51)..(278): Homolog of NCBI NO: 15235466 NR Description: putative glutamate-/aspartate-binding peptide
  misc_feature (51)..(282): Homolog of NCBI NO: 15229411 NR Description: putative protein; protein id: At3g63310.1
  misc_feature (51)..(278): Homolog of NCBI NO: 15218701 NR Description: putative glutamate/aspartate-binding peptide
  misc_feature (60)..(282): Homolog of NCBI NO: 14626300 NR Description: putative receptor-associated protein
  misc_feature (51)..(281): Homolog of NCBI NO: 34393841 NR Description: putative z-protein [Oryza sativa (japonica
  misc_feature (32)..(242): Homolog of NCBI NO: 15810201 NR Description: AT4g15470/dl3775w [Arabidopsis thaliana]
  misc_feature (32)..(282): Homolog of NCBI NO: 18414455 NR Description: Expressed protein
KTASQPKIPNSPPPTASVREMASATEMQPLAPSGYRRAPEMKEKVEASSIDLEAGNGETLYPGISRGENALRWGFIRKVYGILCAQLVLTTVVSAITVFYPTLNATLSNSPVLALVLAVLPFILMIPLYIYQHRHPHNLAILGLFTLCLSFSIGVACANTEGTIVLQALVLTSAVVVSLTAYTFWAAKKGKEFSYLGPFLFSALTILVVISFTQIFFPFGPASNAVIGGFGALVFSGFIVYDTENLIKRHTYDEYIWASVELYLDILNLFLTILQMLRQNDN

SEQ ID NO: 62914 - protein, 262 aa, Triticum aestivum
  peptide (1)..(262): Ceres Seq. ID no. 12585333
  misc_feature (48)..(261): Pfam Name: Uncharacterised protein family UPF0005 Pfam Description: Uncharacterised protein family UPF0005
  misc_feature (142)..(213): Homolog of NCBI NO: 7485070 NR Description: hypothetical protein - Arabidopsis thaliana
  misc_feature (12)..(105): Homolog of NCBI NO: 7485070 NR Description: hypothetical protein - Arabidopsis thaliana
  misc_feature (44)..(262): Homolog of NCBI NO: 34393840 NR Description: putative z-protein [Oryza sativa (japonica
  misc_feature (31)..(258): Homolog of NCBI NO: 15235466 NR Description: putative glutamate-/aspartate-binding peptide
  misc_feature (31)..(262): Homolog of NCBI NO: 15229411 NR Description: putative protein; protein id: At3g63310.1
  misc_feature (31)..(258): Homolog of NCBI NO: 15218701 NR Description: putative glutamate/aspartate-binding peptide
  misc_feature (40)..(262): Homolog of NCBI NO: 14626300 NR Description: putative receptor-associated protein
  misc_feature (31)..(261): Homolog of NCBI NO: 34393841 NR Description: putative z-protein [Oryza sativa (japonica
  misc_feature (12)..(222): Homolog of NCBI NO: 15810201 NR Description: AT4g15470/dl3775w [Arabidopsis thaliana]
  misc_feature (12)..(262): Homolog of NCBI NO: 18414455 NR Description: Expressed protein
MASATEMQPLAPSGYRRAPEMKEKVEASSIDLEAGNGETLYPGISRGENALRWGFIRKVYGILCAQLVLTTVVSAITVFYPTLNATLSNSPVLALVLAVLPFILMIPLYIYQHRHPHNLAILGLFTLCLSFSIGVACANTEGTIVLQALVLTSAVVVSLTAYTFWAAKKGKEFSYLGPFLFSALTILVVISFTQIFFPFGPASNAVIGGFGALVFSGFIVYDTENLIKRHTYDEYIWASVELYLDILNLFLTILQMLRQNDN

SEQ ID NO: 62915 - protein, 256 aa, Triticum aestivum
  peptide (1)..(256): Ceres Seq. ID no. 12585334
  misc_feature (42)..(255): Pfam Name: Uncharacterised protein family UPF0005 Pfam Description: Uncharacterised protein family UPF0005
  misc_feature (136)..(207): Homolog of NCBI NO: 7485070 NR Description: hypothetical protein - Arabidopsis thaliana
  misc_feature (6)..(99): Homolog of NCBI NO: 7485070 NR Description: hypothetical protein - Arabidopsis thaliana
  misc_feature (38)..(256): Homolog of NCBI NO: 34393840 NR Description: putative z-protein [Oryza sativa (japonica
  misc_feature (25)..(252): Homolog of NCBI NO: 15235466 NR Description: putative glutamate-/aspartate-binding peptide
  misc_feature (25)..(256): Homolog of NCBI NO: 15229411 NR Description: putative protein; protein id: At3g63310.1
  misc_feature (25)..(252): Homolog of NCBI NO: 15218701 NR Description: putative glutamate/aspartate-binding peptide
  misc_feature (34)..(256): Homolog of NCBI NO: 14626300 NR Description: putative receptor-associated protein
  misc_feature (25)..(255): Homolog of NCBI NO: 34393841 NR Description: putative z-protein [Oryza sativa (japonica
  misc_feature (6)..(216): Homolog of NCBI NO: 15810201 NR Description: AT4g15470/dl3775w [Arabidopsis thaliana]
  misc_feature (6)..(256): Homolog of NCBI NO: 18414455 NR Description: Expressed protein
MQPLAPSGYRRAPEMKEKVEASSIDLEAGNGETLYPGISRGENALRWGFIRKVYGILCAQLVLTTVVSAITVFYPTLNATLSNSPVLALVLAVLPFILMIPLYIYQHRHPHNLAILGLFTLCLSFSIGVACANTEGTIVLQALVLTSAVVVSLTAYTFWAAKKGKEFSYLGPFLFSALTILVVISFTQIFFPFGPASNAVIGGFGALVFSGFIVYDTENLIKRHTYDEYIWASVELYLDILNLFLTILQMLRQNDN

SEQ ID NO: 62916 - DNA, 1374 bp, Triticum aestivum
  misc_feature (1)..(1374): Ceres Seq. ID no. 15226831
tagaacatcctaatcgaaaaaaaagaaagctctagctagctagctacttcgcaaattttgcgtgcatcgatcgacgatggctgacttctcgtccagcaacggcgtcccgccggggttccggttccaccctaccgacgaggagctgctgctctactacctcaagaagaagatcggcttcgaaaagttcgacctcgaggtcatcagggaggtcgacctcaacaagatcgagccatgggacctccaagagagatgccggatcgggtctgcgccgcagaacgagtggtacttcttcagccacaaggaccgcaagtacccgacggggtcgcggacgaaccgcgcgacgacggccgggttctggaaggcaacggggagggacaagtgcatccgcaccagctaccgcaagatcgggatgcgcaagacgctcgtcttctaccgcggccgcgccccacacggccagaagtccgactggatcatgcacgagtaccgcctcgaggaaatcgacgaagcccagggcggcaccagcgaggatggatgggtggtgtgccgcgtgttcaagaagaagtgtttcttcaagatcgccggaggcggcgaggggagctcgagccagagcgcggacgccggcggcggccacatggccgtgtcctcgccgctgggtggccacgaccacgctgacagggccgccatggcatcccactacatgcacgggatgcacccgcagtaccacccccagcacgcctcttccttctactactcccagatgcaaccaccggaggcggcctactcgcaccacgtgcaggtccaggacctcctcaccaaccaccggccggccgccgacgcagctggcggcgggtatgatttctccagcctgccggtcgagcaccctggcctggacgtcggcagcagcgacggcgtcgcggcggatgggctggccgaaggaagagatcagacaaacggtgcagccgatcagcagtggcagccgatggacgggttcagcaacggcgggggcgccgctgcagtacagcagatgagcgccatgaactccgggcaacgaggtggggagatggatttgtggggatatgggaggtaaattcaacatcaccaagacatgagaaagtgcatccgcatgcatgaatgttgcatgcaagtgggaaggaggatcctgaaaatactggtaatgttgttggagagttatcattggtttttggtgtactgtatatgttgtgttattaatttatcccaatttattgttgtctaatgtaataagaactacggatacatatcggtatgtaagattgtaagtggtgatttgtgcgtgtacatgtgtttgcaaagagaaaaacacaagaatttaagtttgtgattttcttgccatgt

SEQ ID NO: 62917 - protein, 336 aa, Triticum aestivum
  peptide (1)..(336): Ceres Seq. ID no. 15226832
  misc_feature (10)..(139): Pfam Name: No apical meristem (NAM) protein Pfam Description: No apical meristem (NAM) protein
  misc_feature (1)..(200): Homolog of NCBI NO: 27754598 NR Description: putative NAM (no apical meristem) protein
  misc_feature (1)..(200): Homolog of NCBI NO: 7485760 NR Description: NAM (no apical meristem)-like protein
  misc_feature (6)..(167): Homolog of NCBI NO: 15223299 NR Description: No apical meristem (NAM) protein family
  misc_feature (1)..(253): Homolog of NCBI NO: 38605889 NR Description: OSJNBb0020O11.1 [Oryza sativa (japonica
  misc_feature (10)..(232): Homolog of NCBI NO: 6730944 NR Description: OsNAC7 protein [Oryza sativa]
  misc_feature (1)..(321): Homolog of NCBI NO: 15219419 NR Description: NAM (no apical meristem) protein -related
  misc_feature (147)..(206): Homolog of NCBI NO: 6006373 NR Description: Similar to NAM like protein (AC005310)
  misc_feature (6)..(149): Homolog of NCBI NO: 6006373 NR Description: Similar to NAM like protein (AC005310)
  misc_feature (5)..(240): Homolog of NCBI NO: 15217491 NR Description: No apical meristem (NAM) protein family
  misc_feature (5)..(336): Homolog of NCBI NO: 15235031 NR Description: No apical meristem (NAM) protein family
MADFSSSNGVPPGFRFHPTDEELLLYYLKKKIGFEKFDLEVIREVDLNKIEPWDLQERCRIGSAPQNEWYFFSHKDRKYPTGSRTNRATTAGFWKATGRDKCIRTSYRKIGMRKTLVFYRGRAPHGQKSDWIMHEYRLEEIDEAQGGTSEDGWVVCRVFKKKCFFKIAGGGEGSSSQSADAGGGHMAVSSPLGGHDHADRAAMASHYMHGMHPQYHPQHASSFYYSQMQPPEAAYSHHVQVQDLLTNHRPAADAAGGGYDFSSLPVEHPGLDVGSSDGVAADGLAEGRDQTNGAADQQWQPMDGFSNGGGAAAVQQMSAMNSGQRGGEMDLWGYGR

SEQ ID NO: 62918 - protein, 225 aa, Triticum aestivum
  peptide (1)..(225): Ceres Seq. ID no. 15226833
  misc_feature (1)..(89): Homolog of NCBI NO: 30690500 NR Description: No apical meristem (NAM) protein family
  misc_feature (1)..(89): Homolog of NCBI NO: 7485760 NR Description: NAM (no apical meristem)-like protein
  misc_feature (1)..(56): Homolog of NCBI NO: 15223299 NR Description: No apical meristem (NAM) protein family
  misc_feature (1)..(142): Homolog of NCBI NO: 38605889 NR Description: OSJNBb0020O11.1 [Oryza sativa (japonica
  misc_feature (1)..(121): Homolog of NCBI NO: 6730944 NR Description: OsNAC7 protein [Oryza sativa]
  misc_feature (1)..(210): Homolog of NCBI NO: 15219419 NR Description: NAM (no apical meristem) protein -related
  misc_feature (36)..(95): Homolog of NCBI NO: 6006373 NR Description: Similar to NAM like protein (AC005310)
  misc_feature (1)..(38): Homolog of NCBI NO: 6006373 NR Description: Similar to NAM like protein (AC005310)
  misc_feature (1)..(129): Homolog of NCBI NO: 15217491 NR Description: No apical meristem (NAM) protein family
  misc_feature (1)..(225): Homolog of NCBI NO: 15235031 NR Description: No apical meristem (NAM) protein family
MRKTLVFYRGRAPHGQKSDWIMHEYRLEEIDEAQGGTSEDGWVVCRVFKKKCFFKIAGGGEGSSSQSADAGGGHMAVSSPLGGHDHADRAAMASHYMHGMHPQYHPQHASSFYYSQMQPPEAAYSHHVQVQDLLTNHRPAADAAGGGYDFSSLPVEHPGLDVGSSDGVAADGLAEGRDQTNGAADQQWQPMDGFSNGGGAAAVQQMSAMNSGQRGGEMDLWGYGR

SEQ ID NO: 62919 - protein, 204 aa, Triticum aestivum
  peptide (1)..(204): Ceres Seq. ID no. 15226834
  misc_feature (1)..(68): Homolog of NCBI NO: 27754598 NR Description: putative NAM (no apical meristem) protein
  misc_feature (1)..(68): Homolog of NCBI NO: 7485760 NR Description: NAM (no apical meristem)-like protein
  misc_feature (1)..(35): Homolog of NCBI NO: 15223299 NR Description: No apical meristem (NAM) protein family
  misc_feature (1)..(121): Homolog of NCBI NO: 38605889 NR Description: OSJNBb0020O11.1 [Oryza sativa (japonica
  misc_feature (1)..(100): Homolog of NCBI NO: 6730944 NR Description: OsNAC7 protein [Oryza sativa]
  misc_feature (1)..(189): Homolog of NCBI NO: 15219419 NR Description: NAM (no apical meristem) protein -related
  misc_feature (15)..(74): Homolog of NCBI NO: 6006373 NR Description: Similar to NAM like protein (AC005310)
  misc_feature (1)..(17): Homolog of NCBI NO: 6006373 NR Description: Similar to NAM like protein (AC005310)
  misc_feature (1)..(108): Homolog of NCBI NO: 15217491 NR Description: No apical meristem (NAM) protein family
  misc_feature (1)..(204): Homolog of NCBI NO: 15235031 NR Description: No apical meristem (NAM) protein family
MHEYRLEEIDEAQGGTSEDGWVVCRVFKKKCFFKIAGGGEGSSSQSADAGGGHMAVSSPLGGHDHADRAAMASHYMHGMHPQYHPQHASSFYYSQMQPPEAAYSHHVQVQDLLTNHRPAADAAGGGYDFSSLPVEHPGLDVGSSDGVAADGLAEGRDQTNGAADQQWQPMDGFSNGGGAAAVQQMSAMNSGQRGGEMDLWGYGR

SEQ ID NO: 62920 - DNA, 1425 bp, Triticum aestivum
  misc_feature (1)..(1425): Ceres Seq. ID no. 15226041
acatccttacctgtagttttcctcactcccttgacccccgcccgtccctaactaaagccactagcggtagtaatccttgtcaagccgggtgacaccgcggagggagcggagcatggaggccatggacgtcaagtaccggccggccctctaccccaacggctccgtcaagaagctccggcaggcggccgcgccgccgccgccgccggtggaggccgtgcccacgtacaaggagtgcctcaagaaccacgcggcggccatcggcgcgcacgccgtcgacggctgcggcgagtggatgcccgtggtggagctcaacaccgccgacccggcctcgtataagtgcgcggcctgcggctgccaccgcaacttccaccgcctcgtgatggtggagggctcgccgccgcccccgcccccgcccccgccggccctgctgccggcgccgcccgtgcccatgcccatgccggccaccgtgctccatggcctgcggcagcgcgcgcacgggcatgagacgccggaggaccggctcccgggcgtcgacggcgacgactctgactccgactcggatggctccgagtacgacgacgagcgctccgtctccccgccccagcaccctccgcccgcgcacctcccggccccggtggcgcagcagccgccgccgtacatctcttccgcgccacacccgcacatgctgctctctctcaactccagcgcgccgggggcgccgcagggccagagcaggctccccgcccagctctcgccggcgacggcgccgccgccccacgggatgatgccggccaggaagcggttccgcaccaagttcaccgcggagcagaagcagcggatgcaggagctgtcggagcggctggggtggcggctgcagaagcgcgacgagggcgtggtcgacgagtggtgccgcgacatcggcgtcagcaagggcgtcttcaaggtctggatgcacaacaacaagcacaactacctcggcggccacagcgcccgccgcagcgcctcagccgcggcctcctccgccgcgaccacccccaccgcccctgccgccggcgggccattccgtctcgccccggccagccccgcaccaggagcgccattcaacccctccgccagccacagctccccggcccccacgggcacgggcttcaacatgaacggtaccgcctcctccgcctccaccgccaccaccaccgccacgcccacccccatcttcgccgccggccgcaagctgaacggagcctcatcgccgcagtcggcgtgagctagggagagcagaggcagagaagaaggagagggaaggagaaaggcaaagacatttagctttcatttcagttatcattgcattacttttctttctttctgtagtttggatcgatcgttggttctactaagaaattaaccccaagaaagggtgccgtctgg

SEQ ID NO: 62921 - protein, 383 aa, Triticum aestivum
  peptide (1)..(383): Ceres Seq. ID no. 15226042
  misc_feature (95)..(221): Pfam Name: Formin Homology 2 Domain Pfam Description: Formin Homology 2 Domain
  misc_feature (38)..(93): Homolog of NCBI NO: 13374061 NR Description: ZF-HD homeobox protein [Flaveria bidentis]
  misc_feature (178)..(285): Homolog of NCBI NO: 13374061 NR Description: ZF-HD homeobox protein [Flaveria bidentis]
  misc_feature (38)..(130): Homolog of NCBI NO: 32480091 NR Description: OSJNBb0086G13.8 [Oryza sativa (japonica
  misc_feature (168)..(342): Homolog of NCBI NO: 32480091 NR Description: OSJNBb0086G13.8 [Oryza sativa (japonica
  misc_feature (29)..(87): Homolog of NCBI NO: 13277216 NR Description: ZF-HD homeobox protein [Flaveria trinervia]
  misc_feature (165)..(315): Homolog of NCBI NO: 13277216 NR Description: ZF-HD homeobox protein [Flaveria trinervia]
  misc_feature (29)..(87): Homolog of NCBI NO: 13277218 NR Description: ZF-HD homeobox protein [Flaveria bidentis]
  misc_feature (165)..(307): Homolog of NCBI NO: 13277218 NR Description: ZF-HD homeobox protein [Flaveria bidentis]
  misc_feature (34)..(105): Homolog of NCBI NO: 15242243 NR Description: expressed protein [Arabidopsis thaliana]
  misc_feature (166)..(298): Homolog of NCBI NO: 15242243 NR Description: expressed protein [Arabidopsis thaliana]
MEAMDVKYRPALYPNGSVKKLRQAAAPPPPPVEAVPTYKECLKNHAAAIGAHAVDGCGEWMPVVELNTADPASYKCAACGCHRNFHRLVMVEGSPPPPPPPPPALLPAPPVPMPMPATVLHGLRQRAHGHETPEDRLPGVDGDDSDSDSDGSEYDDERSVSPPQHPPPAHLPAPVAQQPPPYISSAPHPHMLLSLNSSAPGAPQGQSRLPAQLSPATAPPPHGMMPARKRFRTKFTAEQKQRMQELSERLGWRLQKRDEGVVDEWCRDIGVSKGVFKVWMHNNKHNYLGGHSARRSASAAASSAATTPTAPAAGGPFRLAPASPAPGAPFNPSASHSSPAPTGTGFNMNGTASSASTATTTATPTPIFAAGRKLNGASSPQSA

SEQ ID NO: 62922 - protein, 380 aa, Triticum aestivum
  peptide (1)..(380): Ceres Seq. ID no. 15226043
  misc_feature (92)..(218): Pfam Name: Formin Homology 2 Domain Pfam Description: Formin Homology 2 Domain
  misc_feature (35)..(90): Homolog of NCBI NO: 13374061 NR Description: ZF-HD homeobox protein [Flaveria bidentis]
  misc_feature (175)..(282): Homolog of NCBI NO: 13374061 NR Description: ZF-HD homeobox protein [Flaveria bidentis]
  misc_feature (35)..(127): Homolog of NCBI NO: 32480091 NR Description: OSJNBb0086G13.8 [Oryza sativa (japonica
  misc_feature (165)..(339): Homolog of NCBI NO: 32480091 NR Description: OSJNBb0086G13.8 [Oryza sativa (japonica
  misc_feature (26)..(84): Homolog of NCBI NO: 13277216 NR Description: ZF-HD homeobox protein [Flaveria trinervia]
  misc_feature (162)..(312): Homolog of NCBI NO: 13277216 NR Description: ZF-HD homeobox protein [Flaveria trinervia]
  misc_feature (26)..(84): Homolog of NCBI NO: 13277218 NR Description: ZF-HD homeobox protein [Flaveria bidentis]
  misc_feature (162)..(304): Homolog of NCBI NO: 13277218 NR Description: ZF-HD homeobox protein [Flaveria bidentis]
  misc_feature (31)..(102): Homolog of NCBI NO: 15242243 NR Description: expressed protein [Arabidopsis thaliana]
  misc_feature (163)..(295): Homolog of NCBI NO: 15242243 NR Description: expressed protein [Arabidopsis thaliana]
MDVKYRPALYPNGSVKKLRQAAAPPPPPVEAVPTYKECLKNHAAAIGAHAVDGCGEWMPVVELNTADPASYKCAACGCHRNFHRLVMVEGSPPPPPPPPPALLPAPPVPMPMPATVLHGLRQRAHGHETPEDRLPGVDGDDSDSDSDGSEYDDERSVSPPQHPPPAHLPAPVAQQPPPYISSAPHPHMLLSLNSSAPGAPQGQSRLPAQLSPATAPPPHGMMPARKRFRTKFTAEQKQRMQELSERLGWRLQKRDEGVVDEWCRDIGVSKGVFKVWMHNNKHNYLGGHSARRSASAAASSAATTPTAPAAGGPFRLAPASPAPGAPFNPSASHSSPAPTGTGFNMNGTASSASTATTTATPTPIFAAGRKLNGASSPQSA

SEQ ID NO: 62923 - protein, 323 aa, Triticum aestivum
  peptide (1)..(323): Ceres Seq. ID no. 15226044
  misc_feature (35)..(161): Pfam Name: Formin Homology 2 Domain Pfam Description: Formin Homology 2 Domain
  misc_feature (1)..(33): Homolog of NCBI NO: 13374061 NR Description: ZF-HD homeobox protein [Flaveria bidentis]
  misc_feature (118)..(225): Homolog of NCBI NO: 13374061 NR Description: ZF-HD homeobox protein [Flaveria bidentis]
  misc_feature (1)..(70): Homolog of NCBI NO: 32480091 NR Description: OSJNBb0086G13.8 [Oryza sativa (japonica
  misc_feature (108)..(282): Homolog of NCBI NO: 32480091 NR Description: OSJNBb0086G13.8 [Oryza sativa (japonica
  misc_feature (1)..(27): Homolog of NCBI NO: 13277216 NR Description: ZF-HD homeobox protein [Flaveria trinervia]
  misc_feature (105)..(255): Homolog of NCBI NO: 13277216 NR Description: ZF-HD homeobox protein [Flaveria trinervia]
  misc_feature (1)..(27): Homolog of NCBI NO: 13277218 NR Description: ZF-HD homeobox protein [Flaveria bidentis]
  misc_feature (105)..(247): Homolog of NCBI NO: 13277218 NR Description: ZF-HD homeobox protein [Flaveria bidentis]
  misc_feature (1)..(45): Homolog of NCBI NO: 15242243 NR Description: expressed protein [Arabidopsis thaliana]
  misc_feature (106)..(238): Homolog of NCBI NO: 15242243 NR Description: expressed protein [Arabidopsis thaliana]
MPVVELNTADPASYKCAACGCHRNFHRLVMVEGSPPPPPPPPPALLPAPPVPMPMPATVLHGLRQRAHGHETPEDRLPGVDGDDSDSDSDGSEYDDERSVSPPQHPPPAHLPAPVAQQPPPYISSAPHPHMLLSLNSSAPGAPQGQSRLPAQLSPATAPPPHGMMPARKRFRTKFTAEQKQRMQELSERLGWRLQKRDEGVVDEWCRDIGVSKGVFKVWMHNNKHNYLGGHSARRSASAAASSAATTPTAPAAGGPFRLAPASPAPGAPFNPSASHSSPAPTGTGFNMNGTASSASTATTTATPTPIFAAGRKLNGASSPQSA

SEQ ID NO: 62924 - DNA, 1852 bp, Triticum aestivum
  misc_feature (1)..(1852): Ceres Seq. ID no. 13596857
aggattggttgagttcgtctccgcgccgccgccgccgccgtcaatctcctcggtatatcaagccactccagatggcaacctatgagcccaagaacatcctcataaccggtgccgcaggtttcatcgcgtcccacgtggcaaaccgtctggtcaggaattacccgcgctacaacatcgtcattctcgacagggtcgactattgctccagccttagaaacctcgacccttctcgtggatccccgaatttcaagtttgtcaggggcgacatcgccagtgccgacttggtgaaccacctcctggtcaccgagtcgatcgataccgtcatgcactttgctgcccagactcacgtcgacaactccttcagctgttcctttgagttcaccaaaaacaatgtgtacggtacccacatcctcctcgaggcatgcaagcaggttaagatcagaaggttcattcatgtcagcaccgatgaagtctacggagaaactgatgtcaatgctgttgttggtaaccatgaggaatctcggctgcttccgacgaacccgtattcggctacgaaagccggggcagagatgctggtgatggcctacgcaaggtcctataatcttccggtgatcaccacacgaggtaacaatgtgtatgggccaaaccagttccccgagaagctcatccccaaatttgctctcctggcaatgagaggcctgccactcccggtttatgggaatggctcgaatgccaggagctacttgtactgtgaggatgtcgcagaagcctttgatgttgttcttcacagaggagaggttgggcatgtgtataacatcgccgcggctaaggagaggggagtggtggatgtggccagggacatatgtgagattcttggggtggaccctgagaaggccatcaagttcgtggaggacaggccgttcaatgaccaaaggtactttgtggacggtgagaagatgaggaggctggggtggttggagcgcacaacgtgggaggagggactgaggaagacggtggagtggtacgccagcaatgctgattactggggagatgttggcgttgtcttgcgagggcagcatcgtaactggacatatgctgcctcatcaccgcaagctgatgaagcagttgaggatcctaagttgaaaagcgcaagatcgaagtgcagggcaatgttataaactttacacccatgcatccataggcacaggaggcaacaacacgattcaagcctcaaataagagtgagtttcctaagctactactgccattgtgtcttgcacacaactgttacgagtgcacagattttgcctaaaggttcagtctattttaatggaggcatgcctttcttttcctgatgaattaatggaggcagtctagtggtgatttgcttacatcttaaatcttcataattcttttacatggatgaattacaaatgcctttttccatctccaagatctagtgcatcaccttgagttgtagagaaaatctcctttgtatcagtgaattacgctagttggactcgaggatatagccaagattaattatctccaagatcagttgtcagccataagtgctggcctgctgggagcttcttaatcttgatgcagtaagtagtctttttaaggccggtaatactttcaggtatagcatgaactagtaatgtgagcgcgctttgctgcgccgctcttcactgggacgtctatcttccagaaaatctgttcacttgttctcaaataacaacttaacgatctgaagagaactgtgagattgatgtgaatctgttttcttgttttttagttgaaatcttatttcttgttggcatgaaagaaatcatggactcttttctagtgac

SEQ ID NO: 62925 - protein, 391 aa, Triticum aestivum
  peptide (1)..(391): Ceres Seq. ID no. 13596858
  misc_feature (32)..(344): Pfam Name: NAD dependent epimerase/dehydratase family Pfam Description: NAD dependent epimerase/dehydratase family
  misc_feature (32)..(348): Homolog of NCBI NO: 21227269 NR Description: dTDP-glucose 4,6-dehydratase [Methanosarcina
  misc_feature (32)..(376): Homolog of NCBI NO: 16357461 NR Description: dTDP-glucose 4,6-dehydratase [Aneurinibacillus
  misc_feature (30)..(360): Homolog of NCBI NO: 15679777 NR Description: dTDP-glucose 4,6-dehydratase
  misc_feature (30)..(337): Homolog of NCBI NO: 21313168 NR Description: RIKEN cDNA 2610025M23 [Mus musculus]
  misc_feature (32)..(362): Homolog of NCBI NO: 33413324 NR Description: putative dTDP-glucose 4,6-dehydratase [Thermotoga
  misc_feature (30)..(351): Homolog of NCBI NO: 7657641 NR Description: TDP-glucose 4,6-dehydratase; dTDP-D-glucose
  misc_feature (30)..(348): Homolog of NCBI NO: 30173340 NR Description: dTDP-D-glucose 4,6-dehydratase
  misc_feature (26)..(355): Homolog of NCBI NO: 25405640 NR Description: hypothetical protein F22G10.13 [imported] -
  misc_feature (24)..(355): Homolog of NCBI NO: 15231926 NR Description: NAD-dependent epimerase/dehydratase family
  misc_feature (24)..(355): Homolog of NCBI NO: 15218420 NR Description: NAD-dependent epimerase/dehydratase family
DWLSSSPRRRRRRQSPRYIKPLQMATYEPKNILITGAAGFIASHVANRLVRNYPRYNIVILDRVDYCSSLRNLDPSRGSPNFKFVRGDIASADLVNHLLVTESIDTVMHFAAQTHVDNSFSCSFEFTKNNVYGTHILLEACKQVKIRRFIHVSTDEVYGETDVNAVVGNHEESRLLPTNPYSATKAGAEMLVMAYARSYNLPVITTRGNNVYGPNQFPEKLIPKFALLAMRGLPLPVYGNGSNARSYLYCEDVAEAFDVVLHRGEVGHVYNIAAAKERGVVDVARDICEILGVDPEKAIKFVEDRPFNDQRYFVDGEKMRRLGWLERTTWEEGLRKTVEWYASNADYWGDVGVVLRGQHRNWTYAASSPQADEAVEDPKLKSARSKCRAML

SEQ ID NO: 62926 - protein, 368 aa, Triticum aestivum
  peptide (1)..(368): Ceres Seq. ID no. 13596859
  misc_feature (9)..(321): Pfam Name: NAD dependent epimerase/dehydratase family Pfam Description: NAD dependent epimerase/dehydratase family
  misc_feature (9)..(325): Homolog of NCBI NO: 21227269 NR Description: dTDP-glucose 4,6-dehydratase [Methanosarcina
  misc_feature (9)..(353): Homolog of NCBI NO: 16357461 NR Description: dTDP-glucose 4,6-dehydratase [Aneurinibacillus
  misc_feature (7)..(337): Homolog of NCBI NO: 15679777 NR Description: dTDP-glucose 4,6-dehydratase
  misc_feature (7)..(314): Homolog of NCBI NO: 21313168 NR Description: RIKEN cDNA 2610025M23 [Mus musculus]
  misc_feature (9)..(339): Homolog of NCBI NO: 33413324 NR Description: putative dTDP-glucose 4,6-dehydratase [Thermotoga
  misc_feature (7)..(328): Homolog of NCBI NO: 7657641 NR Description: TDP-glucose 4,6-dehydratase; dTDP-D-glucose
  misc_feature (7)..(325): Homolog of NCBI NO: 30173340 NR Description: dTDP-D-glucose 4,6-dehydratase
  misc_feature (3)..(332): Homolog of NCBI NO: 25405640 NR Description: hypothetical protein F22G10.13 [imported] -
  misc_feature (1)..(332): Homolog of NCBI NO: 15231926 NR Description: NAD-dependent epimerase/dehydratase family
  misc_feature (1)..(332): Homolog of NCBI NO: 15218420 NR Description: NAD-dependent epimerase/dehydratase family
MATYEPKNILITGAAGFIASHVANRLVRNYPRYNIVILDRVDYCSSLRNLDPSRGSPNFKFVRGDIASADLVNHLLVTESIDTVMHFAAQTHVDNSFSCSFEFTKNNVYGTHILLEACKQVKIRRFIHVSTDEVYGETDVNAVVGNHEESRLLPTNPYSATKAGAEMLVMAYARSYNLPVITTRGNNVYGPNQFPEKLIPKFALLAMRGLPLPVYGNGSNARSYLYCEDVAEAFDVVLHRGEVGHVYNIAAAKERGVVDVARDICEILGVDPEKAIKFVEDRPFNDQRYFVDGEKMRRLGWLERTTWEEGLRKTVEWYASNADYWGDVGVVLRGQHRNWTYAASSPQADEAVEDPKLKSARSKCRAML

SEQ ID NO: 62927 - protein, 284 aa, Triticum aestivum
  peptide (1)..(284): Ceres Seq. ID no. 13596860
  misc_feature (1)..(237): Pfam Name: NAD dependent epimerase/dehydratase family Pfam Description: NAD dependent epimerase/dehydratase family
  misc_feature (1)..(241): Homolog of NCBI NO: 21227269 NR Description: dTDP-glucose 4,6-dehydratase [Methanosarcina
  misc_feature (1)..(269): Homolog of NCBI NO: 16357461 NR Description: dTDP-glucose 4,6-dehydratase [Aneurinibacillus
  misc_feature (1)..(253): Homolog of NCBI NO: 15679777 NR Description: dTDP-glucose 4,6-dehydratase
  misc_feature (1)..(230): Homolog of NCBI NO: 21313168 NR Description: RIKEN cDNA 2610025M23 [Mus musculus]
  misc_feature (1)..(255): Homolog of NCBI NO: 33413324 NR Description: putative dTDP-glucose 4,6-dehydratase [Thermotoga
  misc_feature (1)..(244): Homolog of NCBI NO: 7657641 NR Description: TDP-glucose 4,6-dehydratase; dTDP-D-glucose
  misc_feature (1)..(241): Homolog of NCBI NO: 30173340 NR Description: dTDP-D-glucose 4,6-dehydratase
  misc_feature (1)..(248): Homolog of NCBI NO: 25405640 NR Description: hypothetical protein F22G10.13 [imported] -
  misc_feature (1)..(248): Homolog of NCBI NO: 15231926 NR Description: NAD-dependent epimerase/dehydratase family
  misc_feature (1)..(248): Homolog of NCBI NO: 15218420 NR Description: NAD-dependent epimerase/dehydratase family
MHFAAQTHVDNSFSCSFEFTKNNVYGTHILLEACKQVKIRRFIHVSTDEVYGETDVNAVVGNHEESRLLPTNPYSATKAGAEMLVMAYARSYNLPVITTRGNNVYGPNQFPEKLIPKFALLAMRGLPLPVYGNGSNARSYLYCEDVAEAFDVVLHRGEVGHVYNIAAAKERGVVDVARDICEILGVDPEKAIKFVEDRPFNDQRYFVDGEKMRRLGWLERTTWEEGLRKTVEWYASNADYWGDVGVVLRGQHRNWTYAASSPQADEAVEDPKLKSARSKCRAML

SEQ ID NO: 62928 - DNA, 1058 bp, Triticum aestivum
  misc_feature (1)..(1058): Ceres Seq. ID no. 12625361
cctaaacccgagagtaacaaaatccttatcccaagcttagcatccccggtctcctcggtttctcctcctccccgaaccctcgctccatcactctctccctctcccactccggcgcgcgctcagctgaatctcgccgcaggagcaatggcgtcggtgcatctgtgcggcccgaaggtggcgtcggcggcgatggcgaagccggcgctggcggacgggctccgcatccccacttcgtcgtcggcgcgtcccgtgccgacggggcgcaggctccggggcctcgtcgtcagggccgccacggtcgtgtcgcccaagtatacttctgtgaaaccattgggagatagggtactagtgaagaccaagactactgaggataaaactgctggagggatattgcttccaacaacagctcagtcaagaccacaagcaggggaggttgttgcagttggagaggggagaagcttaggcagcaacatcgttgagatcagtgttccggttggtgccaaagttatttactctaaatacgctggcaccgagctggaattcaatgataccacccacctcattatgaaagaagatgacatcattggtattcttgacactgatgacgtgaaagatctgaagccactgagtgaccgtattctcattaaggttgcagagtctgaagaggaaactgctggcggtttgctattgacacaggcgtcgaaagagaagccttccgttggaacagtggtcgctgttggccccgggccattgggcgatgatggcagcaggacaccattgtcaatcactcctggaagcagcgtgctgtactccaagtatgcaggaagcgagttcaagggttcggaaggcgagtacattgttctcaggtcatccgacgtgatagcggtgctgtcatcataagcttgccctgccctacgtgaactaggaattttgatatttagtccaaaaccttgtttggttattgctctttgcttgtgattggtgaactgtgaattgcttcttcgctctatcgtggaaatgctgcttgatagttttaataagatgacggcttagactcc

SEQ ID NO: 62929 - protein, 299 aa, Triticum aestivum
  peptide (1)..(299): Ceres Seq. ID no. 12625362
  misc_feature (204)..(298): Pfam Name: Chaperonin 10 Kd subunit Pfam Description: Chaperonin 10 Kd subunit
  misc_feature (206)..(296): Homolog of NCBI NO: 37522465 NR Description: chaperonin GroES [Gloeobacter violaceus]
  misc_feature (202)..(297): Homolog of NCBI NO: 29839360 NR Description: 10 kDa chaperonin (Protein Cpn10) (groES protein)
  misc_feature (200)..(298): Homolog of NCBI NO: 23040551 NR Description: hypothetical protein [Trichodesmium erythraeum
  misc_feature (203)..(297): Homolog of NCBI NO: 22297730 NR Description: 10kD chaperonin [Thermosynechococcus elongatus
  misc_feature (200)..(298): Homolog of NCBI NO: 11467285 NR Description: GroES [Cyanophora paradoxa]
  misc_feature (70)..(298): Homolog of NCBI NO: 399241 NR Description: 20 kDa chaperonin, chloroplast precursor (Protein (Chloroplast protein Cpn10) (Chloroplast chaperonin 10)
  misc_feature (49)..(298): Homolog of NCBI NO: 25453528 NR Description: chaperonin 10 [imported] - Arabidopsis thaliana
  misc_feature (49)..(298): Homolog of NCBI NO: 7331143 NR Description: chaperonin 21 precursor [Lycopersicon esculentum]
  misc_feature (49)..(298): Homolog of NCBI NO: 15242045 NR Description: chloroplast Cpn21 protein
  misc_feature (49)..(298): Homolog of NCBI NO: 21780187 NR Description: cp10-like protein [Gossypium hirsutum]
PKPESNKILIPSLASPVSSVSPPPRTLAPSLSPSPTPARAQLNLAAGAMASVHLCGPKVASAAMAKPALADGLRIPTSSSARPVPTGRRLRGLVVRAATVVSPKYTSVKPLGDRVLVKTKTTEDKTAGGILLPTTAQSRPQAGEVVAVGEGRSLGSNIVEISVPVGAKVIYSKYAGTELEFNDTTHLIMKEDDIIGILDTDDVKDLKPLSDRILIKVAESEEETAGGLLLTQASKEKPSVGTVVAVGPGPLGDDGSRTPLSITPGSSVLYSKYAGSEFKGSEGEYIVLRSSDVIAVLSS

SEQ ID NO: 62930 - protein, 251 aa, Triticum aestivum
  peptide (1)..(251): Ceres Seq. ID no. 12625363
  misc_feature (156)..(250): Pfam Name: Chaperonin 10 Kd subunit Pfam Description: Chaperonin 10 Kd subunit
  misc_feature (158)..(248): Homolog of NCBI NO: 37522465 NR Description: chaperonin GroES [Gloeobacter violaceus]
  misc_feature (154)..(249): Homolog of NCBI NO: 29839360 NR Description: 10 kDa chaperonin (Protein Cpn10) (groES protein)
  misc_feature (152)..(250): Homolog of NCBI NO: 23040551 NR Description: hypothetical protein [Trichodesmium erythraeum
  misc_feature (155)..(249): Homolog of NCBI NO: 22297730 NR Description: 10kD chaperonin [Thermosynechococcus elongatus
  misc_feature (152)..(250): Homolog of NCBI NO: 11467285 NR Description: GroES [Cyanophora paradoxa]
  misc_feature (22)..(250): Homolog of NCBI NO: 399241 NR Description: 20 kDa chaperonin, chloroplast precursor (Protein (Chloroplast protein Cpn10) (Chloroplast chaperonin 10)
  misc_feature (1)..(250): Homolog of NCBI NO: 25453528 NR Description: chaperonin 10 [imported] - Arabidopsis thaliana
  misc_feature (1)..(250): Homolog of NCBI NO: 7331143 NR Description: chaperonin 21 precursor [Lycopersicon esculentum]
  misc_feature (1)..(250): Homolog of NCBI NO: 15242045 NR Description: chloroplast Cpn21 protein
  misc_feature (1)..(250): Homolog of NCBI NO: 21780187 NR Description: cp10-like protein [Gossypium hirsutum]
MASVHLCGPKVASAAMAKPALADGLRIPTSSSARPVPTGRRLRGLVVRAATVVSPKYTSVKPLGDRVLVKTKTTEDKTAGGILLPTTAQSRPQAGEVVAVGEGRSLGSNIVEISVPVGAKVIYSKYAGTELEFNDTTHLIMKEDDIIGILDTDDVKDLKPLSDRILIKVAESEEETAGGLLLTQASKEKPSVGTVVAVGPGPLGDDGSRTPLSITPGSSVLYSKYAGSEFKGSEGEYIVLRSSDVIAVLSS

SEQ ID NO: 62931 - protein, 236 aa, Triticum aestivum
  peptide (1)..(236): Ceres Seq. ID no. 12625364
  misc_feature (141)..(235): Pfam Name: Chaperonin 10 Kd subunit Pfam Description: Chaperonin 10 Kd subunit
  misc_feature (143)..(233): Homolog of NCBI NO: 37522465 NR Description: chaperonin GroES [Gloeobacter violaceus]
  misc_feature (139)..(234): Homolog of NCBI NO: 29839360 NR Description: 10 kDa chaperonin (Protein Cpn10) (groES protein)
  misc_feature (137)..(235): Homolog of NCBI NO: 23040551 NR Description: hypothetical protein [Trichodesmium erythraeum
  misc_feature (140)..(234): Homolog of NCBI NO: 22297730 NR Description: 10kD chaperonin [Thermosynechococcus elongatus
  misc_feature (137)..(235): Homolog of NCBI NO: 11467285 NR Description: GroES [Cyanophora paradoxa]
  misc_feature (7)..(235): Homolog of NCBI NO: 399241 NR Description: 20 kDa chaperonin, chloroplast precursor (Protein (Chloroplast protein Cpn10) (Chloroplast chaperonin 10)
  misc_feature (1)..(235): Homolog of NCBI NO: 25453528 NR Description: chaperonin 10 [imported] - Arabidopsis thaliana
  misc_feature (1)..(235): Homolog of NCBI NO: 7331143 NR Description: chaperonin 21 precursor [Lycopersicon esculentum]
  misc_feature (1)..(235): Homolog of NCBI NO: 15242045 NR Description: chloroplast Cpn21 protein
  misc_feature (1)..(235): Homolog of NCBI NO: 21780187 NR Description: cp10-like protein [Gossypium hirsutum]
MAKPALADGLRIPTSSSARPVPTGRRLRGLVVRAATVVSPKYTSVKPLGDRVLVKTKTTEDKTAGGILLPTTAQSRPQAGEVVAVGEGRSLGSNIVEISVPVGAKVIYSKYAGTELEFNDTTHLIMKEDDIIGILDTDDVKDLKPLSDRILIKVAESEEETAGGLLLTQASKEKPSVGTVVAVGPGPLGDDGSRTPLSITPGSSVLYSKYAGSEFKGSEGEYIVLRSSDVIAVLSS

SEQ ID NO: 62932 - DNA, 1578 bp, Triticum aestivum
  misc_feature (1)..(1578): Ceres Seq. ID no. 13596893
accaagcacaccggcacctaccatcgctctactccgcttcgagtccacagcacctcgcgcgcgctctacccaccataagccttcgggccttccgggagcccaagccatggcgcgcaagaagatccgggagtacgactccaagcgcctcctcaaggagcacctcaagcgcctggccggcatcgacctgcacatcctctccgcccaggtcacacaattgacggactttgcggagcttgtgaaccagcatccatggctgtcgaccaccaaactggttgtgaagcctgacatgctgttcgggaagcgtgggaagagtggccttgtggcactcaacctggatgtagcccaagtcaaggagtttgtgaaggagcggttgggagtcgaggtcgagatgggtggctgcaaagctccaattaccactttcatagttgagccgtttgtcccccacgatcaagagtactacctttcagttgtgtccgaaaggttgggtagcaccattagcttctcggaatgtggaggcattgaaatcgaggagaactgggacaaggttaagacagtctttcttccgaccgagaagccaatgacacctgatgcttgtgctcccttgattgcaacccttccactggaggcacgcggaaagattggtgatttcattaaaggagtgtttgctgtcttccaagacttagatttctcatttattgagatgaacccattcaccatggtgaatggggagccatatccgctggacatgagaggagaattggatgacactgcatctttcaagaacttcaagaagtggggaaatttagaattccctctaccattcggcagagttctcagttctacagaaagttttatccatgagctggacgacaagaccagcgcgtctttgaagttcacagttttgaacccaaagggacgcatctggacaatggttgctggaggtggtgccagtgtcatatatgctgacacggttggagatttgggatatgcttcagagttaggaaattatgcagaatacagtggtgctcccaaccaggaggaggttctgcagtatgctagagtagtacttgattgtgcgactgcggaccctgatggccgcaagagagcccttctcattggaggtggtatagccaacttcactgatgtcgctgccacttttagtggcatcattcaggcattaagagagaaggaatccaagttaaaggcatccaggatgcacctctatgttcgacgaggcggtccaaattaccaaactggactggcgaaaatgcgcaagcttggtgcagaaatcggtgttccgattgaggtgtatggaccggaagagacaatgactggcatctgcaagcaagcaattgaatgcattatggcggcatcataaatcaggatacagttgagaagtagtttgagatctacaaacaagaaactggctgccgcataaatgagagcatagtggcactaggttcacatcacatggttgattagtttcttcagaagttatttggacaaagacacatatattattgtcgtaaaggaacctgtactgttgtaatgtgacaaacaaaagatttattaccatgc

SEQ ID NO: 62933 - protein, 458 aa, Triticum aestivum
  peptide (1)..(458): Ceres Seq. ID no. 13596894
  misc_feature (36)..(451): Homolog of NCBI NO: 38569423 NR Description: ATP citrate lyase isoform 2 [Homo sapiens]
  misc_feature (36)..(451): Homolog of NCBI NO: 38569421 NR Description: ATP citrate lyase isoform 1 [Homo sapiens]
  misc_feature (36)..(450): Homolog of NCBI NO: 8392839 NR Description: ATP citrate lyase [Rattus norvegicus]
  misc_feature (36)..(451): Homolog of NCBI NO: 29293809 NR Description: ATP citrate lyase [Mus musculus]
  misc_feature (36)..(458): Homolog of NCBI NO: 19698853 NR Description: similar to ATP-citrate-lyase [Arabidopsis
  misc_feature (36)..(458): Homolog of NCBI NO: 15219818 NR Description: ATP citrate-lyase -related [Arabidopsis thaliana]
  misc_feature (36)..(458): Homolog of NCBI NO: 21593129 NR Description: ATP citrate-lyase, putative [Arabidopsis thaliana]
  misc_feature (36)..(458): Homolog of NCBI NO: 15220186 NR Description: ATP citrate-lyase -related [Arabidopsis thaliana]
  misc_feature (36)..(458): Homolog of NCBI NO: 15919089 NR Description: ATP citrate lyase b-subunit [Lupinus albus]
  misc_feature (36)..(455): Homolog of NCBI NO: 15217510 NR Description: expressed protein [Arabidopsis thaliana]
PSTPAPTIALLRFESTAPRARSTHHKPSGLPGAQAMARKKIREYDSKRLLKEHLKRLAGIDLHILSAQVTQLTDFAELVNQHPWLSTTKLVVKPDMLFGKRGKSGLVALNLDVAQVKEFVKERLGVEVEMGGCKAPITTFIVEPFVPHDQEYYLSVVSERLGSTISFSECGGIEIEENWDKVKTVFLPTEKPMTPDACAPLIATLPLEARGKIGDFIKGVFAVFQDLDFSFIEMNPFTMVNGEPYPLDMRGELDDTASFKNFKKWGNLEFPLPFGRVLSSTESFIHELDDKTSASLKFTVLNPKGRIWTMVAGGGASVIYADTVGDLGYASELGNYAEYSGAPNQEEVLQYARVVLDCATADPDGRKRALLIGGGIANFTDVAATFSGIIQALREKESKLKASRMHLYVRRGGPNYQTGLAKMRKLGAEIGVPIEVYGPEETMTGICKQAIECIMAAS

SEQ ID NO: 62934 - protein, 423 aa, Triticum aestivum
  peptide (1)..(423): Ceres Seq. ID no. 13596895
  misc_feature (1)..(416): Homolog of NCBI NO: 38569423 NR Description: ATP citrate lyase isoform 2 [Homo sapiens]
  misc_feature (1)..(416): Homolog of NCBI NO: 38569421 NR Description: ATP citrate lyase isoform 1 [Homo sapiens]
  misc_feature (1)..(415): Homolog of NCBI NO: 8392839 NR Description: ATP citrate lyase [Rattus norvegicus]
  misc_feature (1)..(416): Homolog of NCBI NO: 29293809 NR Description: ATP citrate lyase [Mus musculus]
  misc_feature (1)..(423): Homolog of NCBI NO: 19698853 NR Description: similar to ATP-citrate-lyase [Arabidopsis
  misc_feature (1)..(423): Homolog of NCBI NO: 15219818 NR Description: ATP citrate-lyase -related [Arabidopsis thaliana]
  misc_feature (1)..(423): Homolog of NCBI NO: 21593129 NR Description: ATP citrate-lyase, putative [Arabidopsis thaliana]
  misc_feature (1)..(423): Homolog of NCBI NO: 15220186 NR Description: ATP citrate-lyase -related [Arabidopsis thaliana]
  misc_feature (1)..(423): Homolog of NCBI NO: 15919089 NR Description: ATP citrate lyase b-subunit [Lupinus albus]
  misc_feature (1)..(420): Homolog of NCBI NO: 15217510 NR Description: expressed protein [Arabidopsis thaliana]
MARKKIREYDSKRLLKEHLKRLAGIDLHILSAQVTQLTDFAELVNQHPWLSTTKLVVKPDMLFGKRGKSGLVALNLDVAQVKEFVKERLGVEVEMGGCKAPITTFIVEPFVPHDQEYYLSVVSERLGSTISFSECGGIEIEENWDKVKTVFLPTEKPMTPDACAPLIATLPLEARGKIGDFIKGVFAVFQDLDFSFIEMNPFTMVNGEPYPLDMRGELDDTASFKNFKKWGNLEFPLPFGRVLSSTESFIHELDDKTSASLKFTVLNPKGRIWTMVAGGGASVIYADTVGDLGYASELGNYAEYSGAPNQEEVLQYARVVLDCATADPDGRKRALLIGGGIANFTDVAATFSGIIQALREKESKLKASRMHLYVRRGGPNYQTGLAKMRKLGAEIGVPIEVYGPEETMTGICKQAIECIMAAS

SEQ ID NO: 62935 - protein, 363 aa, Triticum aestivum
  peptide (1)..(363): Ceres Seq. ID no. 13596896
  misc_feature (1)..(356): Homolog of NCBI NO: 38569423 NR Description: ATP citrate lyase isoform 2 [Homo sapiens]
  misc_feature (1)..(356): Homolog of NCBI NO: 38569421 NR Description: ATP citrate lyase isoform 1 [Homo sapiens]
  misc_feature (1)..(355): Homolog of NCBI NO: 8392839 NR Description: ATP citrate lyase [Rattus norvegicus]
  misc_feature (1)..(356): Homolog of NCBI NO: 29293809 NR Description: ATP citrate lyase [Mus musculus]
  misc_feature (1)..(363): Homolog of NCBI NO: 19698853 NR Description: similar to ATP-citrate-lyase [Arabidopsis
  misc_feature (1)..(363): Homolog of NCBI NO: 15219818 NR Description: ATP citrate-lyase -related [Arabidopsis thaliana]
  misc_feature (1)..(363): Homolog of NCBI NO: 21593129 NR Description: ATP citrate-lyase, putative [Arabidopsis thaliana]
  misc_feature (1)..(363): Homolog of NCBI NO: 15220186 NR Description: ATP citrate-lyase -related [Arabidopsis thaliana]
  misc_feature (1)..(363): Homolog of NCBI NO: 15919089 NR Description: ATP citrate lyase b-subunit [Lupinus albus]
  misc_feature (1)..(360): Homolog of NCBI NO: 15217510 NR Description: expressed protein [Arabidopsis thaliana]
MLFGKRGKSGLVALNLDVAQVKEFVKERLGVEVEMGGCKAPITTFIVEPFVPHDQEYYLSVVSERLGSTISFSECGGIEIEENWDKVKTVFLPTEKPMTPDACAPLIATLPLEARGKIGDFIKGVFAVFQDLDFSFIEMNPFTMVNGEPYPLDMRGELDDTASFKNFKKWGNLEFPLPFGRVLSSTESFIHELDDKTSASLKFTVLNPKGRIWTMVAGGGASVIYADTVGDLGYASELGNYAEYSGAPNQEEVLQYARVVLDCATADPDGRKRALLIGGGIANFTDVAATFSGIIQALREKESKLKASRMHLYVRRGGPNYQTGLAKMRKLGAEIGVPIEVYGPEETMTGICKQAIECIMAAS

SEQ ID NO: 62936 - DNA, 1561 bp, Triticum aestivum
  misc_feature (1)..(1561): Ceres Seq. ID no. 14301475
aagaccagctacagaccagctacagcctagagctgagcattgcatttggtgttagactagcgcttgcccaccctgccatgacgtccaaggtagccaacagctccggcagcaacaatgcggatgccaagctatcgccgtcggggctccccgtccgggaggtcccgggcggctacggcgttcccttcttgtcgccgctgcgcgaccgccttgactactactacttccagggcgcggaggagtacttccgctcccgcatcgcccggaacggcggcgccaccgtgctgcgcgtcaacatgccccccgggccgttcatcaccaccgacttccgcgtcgtcgccttcctcgacgcgcgcagcttcagcgtgctcctcgacgacgccaaggtcgacaagaccgacacgctcgacgggaccttcatgccctccctcgcgctcttcggcggctaccgcccgctcgccttcctcgacgctgccgacccccaccacgccgcgctcaagcgcgtcatgatcagcctcgccgccgcgcggatgcaccacgtcgcgccggccttccgcaccgctttcggcgccgtgttcgacgccgccgacgccggcctcggcgacggccccgtccagttcaacaagctcaacgagcaccacatgttcgacttcacctgctccgcgctgttcggcggcacgccgccgagcaaggccatgggcgacggcgccgtgaccaaggccatcaagtggctcggcgtgcagctgcacccgctcgccagtaagatcatcaagccgtggctgctcgaggatctccttctccacaccttccgcctgccgccgttgctggttcgccgggactacgccgacctgacagcctacttcgccgaagccaccatcgacaccgaggtcgacgtcttcgcctccaagatgatcaccgttgacagaaagcccatcaagctccagatctgggacacgccaggcgaagacagattcagatcgatcactagatcatactacgatgaagttgatggagctcttctagtttatgacatcaccaggagggaaacatttaatcatctcgcgaactggttaagggacgtgaggcaatttgcaaaggacaacatgacaataatgctagttggaaacaaatgtgatctatctcagaggcgtaccgtgagctatgaggaaggtaggaagtttgcaaatgagcatggtctgatctttgtggaggcatctgccaaaactgcacaaaatgttgaggagggtttcgttcagactgctggagtcatatacaagaaaatccaggatggcgccttctaataataagctgaaattgcaaaagtctatcatcaatttggtctgcttagtgaataatgagcacctggtgaacaagtgctggtaggcctggcctacttcctgcgtggatatttatgtagctgtgtgtttactacaaatcaagcagggacacctttaggctgattcaagagtgctatctgctatgttttttttttttgagggtgtgctatctgctatgtgatcactatgttgcgctgttcaataatcaacaatttcagtccagttct

SEQ ID NO: 62937 - protein, 431 aa, Triticum aestivum
  peptide (1)..(431): Ceres Seq. ID no. 14301476
  misc_feature (292)..(424): Pfam Name: Ras family Pfam Description: Ras family
  misc_feature (9)..(286): Homolog of NCBI NO: 20160364 NR Description: allene oxide synthase [Solanum tuberosum]
  misc_feature (9)..(286): Homolog of NCBI NO: 7677376 NR Description: allene oxide synthase [Lycopersicon esculentum]
  misc_feature (292)..(431): Homolog of NCBI NO: 1346957 NR Description: RAS-RELATED PROTEIN RAB-2-B
  misc_feature (32)..(293): Homolog of NCBI NO: 7452979 NR Description: allene oxide synthase [Hordeum vulgare subsp.
  misc_feature (51)..(290): Homolog of NCBI NO: 28569578 NR Description: allene oxide synthase [Triticum aestivum]
  misc_feature (51)..(290): Homolog of NCBI NO: 7452981 NR Description: allene oxide synthase [Hordeum vulgare subsp.
  misc_feature (48)..(289): Homolog of NCBI NO: 16506652 NR Description: allene oxide synthase [Oryza sativa]
  misc_feature (51)..(293): Homolog of NCBI NO: 39980758 NR Description: allene oxide synthase [Zea mays]
  misc_feature (48)..(289): Homolog of NCBI NO: 32351269 NR Description: allene oxide synthase [Oryza sativa (japonica
  misc_feature (48)..(289): Homolog of NCBI NO: 34902306 NR Description: Putative allene oxide synthase
DQLQTSYSLELSIAFGVRLALAHPAMTSKVANSSGSNNADAKLSPSGLPVREVPGGYGVPFLSPLRDRLDYYYFQGAEEYFRSRIARNGGATVLRVNMPPGPFITTDFRVVAFLDARSFSVLLDDAKVDKTDTLDGTFMPSLALFGGYRPLAFLDAADPHHAALKRVMISLAAARMHHVAPAFRTAFGAVFDAADAGLGDGPVQFNKLNEHHMFDFTCSALFGGTPPSKAMGDGAVTKAIKWLGVQLHPLASKIIKPWLLEDLLLHTFRLPPLLVRRDYADLTAYFAEATIDTEVDVFASKMITVDRKPIKLQIWDTPGEDRFRSITRSYYDEVDGALLVYDITRRETFNHLANWLRDVRQFAKDNMTIMLVGNKCDLSQRRTVSYEEGRKFANEHGLIFVEASAKTAQNVEEGFVQTAGVIYKKIQDGAF

SEQ ID NO: 62938 - protein, 406 aa, Triticum aestivum
  peptide (1)..(406): Ceres Seq. ID no. 14301477
  misc_feature (267)..(399): Pfam Name: Ras family Pfam Description: Ras family
  misc_feature (1)..(261): Homolog of NCBI NO: 20160364 NR Description: allene oxide synthase [Solanum tuberosum]
  misc_feature (1)..(261): Homolog of NCBI NO: 7677376 NR Description: allene oxide synthase [Lycopersicon esculentum]
  misc_feature (267)..(406): Homolog of NCBI NO: 1346957 NR Description: RAS-RELATED PROTEIN RAB-2-B
  misc_feature (7)..(268): Homolog of NCBI NO: 7452979 NR Description: allene oxide synthase [Hordeum vulgare subsp.
  misc_feature (26)..(265): Homolog of NCBI NO: 28569578 NR Description: allene oxide synthase [Triticum aestivum]
  misc_feature (26)..(265): Homolog of NCBI NO: 7452981 NR Description: allene oxide synthase [Hordeum vulgare subsp.
  misc_feature (23)..(264): Homolog of NCBI NO: 16506652 NR Description: allene oxide synthase [Oryza sativa]
  misc_feature (26)..(268): Homolog of NCBI NO: 39980758 NR Description: allene oxide synthase [Zea mays]
  misc_feature (23)..(264): Homolog of NCBI NO: 32351269 NR Description: allene oxide synthase [Oryza sativa (japonica
  misc_feature (23)..(264): Homolog of NCBI NO: 34902306 NR Description: Putative allene oxide synthase
MTSKVANSSGSNNADAKLSPSGLPVREVPGGYGVPFLSPLRDRLDYYYFQGAEEYFRSRIARNGGATVLRVNMPPGPFITTDFRVVAFLDARSFSVLLDDAKVDKTDTLDGTFMPSLALFGGYRPLAFLDAADPHHAALKRVMISLAAARMHHVAPAFRTAFGAVFDAADAGLGDGPVQFNKLNEHHMFDFTCSALFGGTPPSKAMGDGAVTKAIKWLGVQLHPLASKIIKPWLLEDLLLHTFRLPPLLVRRDYADLTAYFAEATIDTEVDVFASKMITVDRKPIKLQIWDTPGEDRFRSITRSYYDEVDGALLVYDITRRETFNHLANWLRDVRQFAKDNMTIMLVGNKCDLSQRRTVSYEEGRKFANEHGLIFVEASAKTAQNVEEGFVQTAGVIYKKIQDGAF

SEQ ID NO: 62939 - protein, 334 aa, Triticum aestivum
  peptide (1)..(334): Ceres Seq. ID no. 14301478
  misc_feature (195)..(327): Pfam Name: Ras family Pfam Description: Ras family
  misc_feature (1)..(189): Homolog of NCBI NO: 20160364 NR Description: allene oxide synthase [Solanum tuberosum]
  misc_feature (1)..(189): Homolog of NCBI NO: 7677376 NR Description: allene oxide synthase [Lycopersicon esculentum]
  misc_feature (195)..(334): Homolog of NCBI NO: 1346957 NR Description: RAS-RELATED PROTEIN RAB-2-B
  misc_feature (1)..(196): Homolog of NCBI NO: 7452979 NR Description: allene oxide synthase [Hordeum vulgare subsp.
  misc_feature (1)..(193): Homolog of NCBI NO: 28569578 NR Description: allene oxide synthase [Triticum aestivum]
  misc_feature (1)..(193): Homolog of NCBI NO: 7452981 NR Description: allene oxide synthase [Hordeum vulgare subsp.
  misc_feature (1)..(192): Homolog of NCBI NO: 16506652 NR Description: allene oxide synthase [Oryza sativa]
  misc_feature (1)..(196): Homolog of NCBI NO: 39980758 NR Description: allene oxide synthase [Zea mays]
  misc_feature (1)..(192): Homolog of NCBI NO: 32351269 NR Description: allene oxide synthase [Oryza sativa (japonica
  misc_feature (1)..(192): Homolog of NCBI NO: 34902306 NR Description: Putative allene oxide synthase
MPPGPFITTDFRVVAFLDARSFSVLLDDAKVDKTDTLDGTFMPSLALFGGYRPLAFLDAADPHHAALKRVMISLAAARMHHVAPAFRTAFGAVFDAADAGLGDGPVQFNKLNEHHMFDFTCSALFGGTPPSKAMGDGAVTKAIKWLGVQLHPLASKIIKPWLLEDLLLHTFRLPPLLVRRDYADLTAYFAEATIDTEVDVFASKMITVDRKPIKLQIWDTPGEDRFRSITRSYYDEVDGALLVYDITRRETFNHLANWLRDVRQFAKDNMTIMLVGNKCDLSQRRTVSYEEGRKFANEHGLIFVEASAKTAQNVEEGFVQTAGVIYKKIQDGAF

SEQ ID NO: 62940 - DNA, 864 bp, Triticum aestivum
  misc_feature (1)..(864): Ceres Seq. ID no. 12585335
attactcccccgcagctcacggggcgaggcatccatcgattagccgttcccgactcggcgaaaggactgtctcgccgccgccgccggccgacgaggaggaggccaagatgttcttccacatcgtgctggagcggaacatgcagctgcacccgcggcacttcggccctcacctccgcgacaagctcgtcgccaagctcatgaaggacgtcgagggcacctgcagcgggcggcacggcttcgtcgtggcgatcacgggggtggaggacatcggcaaggggctcatccgggagggcacgggcttcgtcacgttccccgtcaagtaccagtgcgtcgtcttccgccccttcaaaggcgagatcctcgaggccgtcgtcaccatggtcaacaagatggggttcttcgcagaggctgggcctgtgcagatctttgtgtcaaaccatttgattcctgacgatatggagttccaatctggtgatgtgccaaactacacgacttctgatggatcggtgaaaattcaaaaagaaagtgaggttcgtctgaagattataggcactcgtgttgacgcaacagaaattttttgcatcggcacgataaaagacgactttctgggtgttatcagtgatcctggtggagcgctgtaaatgatccaaagaagactcggcatgctctccaacttccgcatcatcatatatctgggaagagtccccaaggaaggttgcgactgatctgtaatttgtgtcctgatgtaaaatgtgatgtcatgcctatctaatggaagtcagggtactgctagtgttaaaaaaaagtaactggcacctgtattatcgtaactatgatcttttctaattgtggtggttgatatgt

SEQ ID NO: 62941 - protein, 212 aa, Triticum aestivum
  peptide (1)..(212): Ceres Seq. ID no. 12585336
  misc_feature (113)..(195): Pfam Name: S1 RNA binding domain Pfam Description: S1 RNA binding domain
  misc_feature (36)..(203): Homolog of NCBI NO: 12655858 NR Description: RNA polymerase II subunit 7 [Candida albicans]
  misc_feature (37)..(205): Homolog of NCBI NO: 19114885 NR Description: RNA polymerase II subunit rpb7
  misc_feature (35)..(204): Homolog of NCBI NO: 17510349 NR Description: RNA polymerase Rpb7, N-terminal domain and S1 RNA
  misc_feature (36)..(204): Homolog of NCBI NO: 39595528 NR Description: Hypothetical protein CBG04195 [Caenorhabditis
  misc_feature (35)..(205): Homolog of NCBI NO: 31241005 NR Description: ENSANGP00000017695 [Anopheles gambiae]
  misc_feature (36)..(206): Homolog of NCBI NO: 28278826 NR Description: Unknown (protein for MGC:55297) [Danio rerio]
  misc_feature (36)..(206): Homolog of NCBI NO: 4505947 NR Description: DNA directed RNA polymerase II polypeptide G
  misc_feature (36)..(207): Homolog of NCBI NO: 24647020 NR Description: CG31155-PA [Drosophila melanogaster]
  misc_feature (36)..(211): Homolog of NCBI NO: 15237831 NR Description: RNA polymerase II; protein id: At5g59180.1
  misc_feature (36)..(208): Homolog of NCBI NO: 1173137 NR Description: DNA-DIRECTED RNA POLYMERASE II 19 KD POLYPEPTIDE
YSPAAHGARHPSISRSRLGERTVSPPPPADEEEAKMFFHIVLERNMQLHPRHFGPHLRDKLVAKLMKDVEGTCSGRHGFVVAITGVEDIGKGLIREGTGFVTFPVKYQCVVFRPFKGEILEAVVTMVNKMGFFAEAGPVQIFVSNHLIPDDMEFQSGDVPNYTTSDGSVKIQKESEVRLKIIGTRVDATEIFCIGTIKDDFLGVISDPGGAL

SEQ ID NO: 62942 - protein, 177 aa, Triticum aestivum
  peptide (1)..(177): Ceres Seq. ID no. 12585337
  misc_feature (78)..(160): Pfam Name: S1 RNA binding domain Pfam Description: S1 RNA binding domain
  misc_feature (1)..(168): Homolog of NCBI NO: 12655858 NR Description: RNA polymerase II subunit 7 [Candida albicans]
  misc_feature (2)..(170): Homolog of NCBI NO: 19114885 NR Description: RNA polymerase II subunit rpb7
  misc_feature (1)..(169): Homolog of NCBI NO: 17510349 NR Description: RNA polymerase Rpb7, N-terminal domain and S1 RNA
  misc_feature (1)..(169): Homolog of NCBI NO: 39595528 NR Description: Hypothetical protein CBG04195 [Caenorhabditis
  misc_feature (1)..(170): Homolog of NCBI NO: 31241005 NR Description: ENSANGP00000017695 [Anopheles gambiae]
  misc_feature (1)..(171): Homolog of NCBI NO: 28278826 NR Description: Unknown (protein for MGC:55297) [Danio rerio]
  misc_feature (1)..(171): Homolog of NCBI NO: 4505947 NR Description: DNA directed RNA polymerase II polypeptide G
  misc_feature (1)..(172): Homolog of NCBI NO: 24647020 NR Description: CG31155-PA [Drosophila melanogaster]
  misc_feature (1)..(176): Homolog of NCBI NO: 15237831 NR Description: RNA polymerase II; protein id: At5g59180.1
  misc_feature (1)..(173): Homolog of NCBI NO: 1173137 NR Description: DNA-DIRECTED RNA POLYMERASE II 19 KD POLYPEPTIDE
MFFHIVLERNMQLHPRHFGPHLRDKLVAKLMKDVEGTCSGRHGFVVAITGVEDIGKGLIREGTGFVTFPVKYQCVVFRPFKGEILEAVVTMVNKMGFFAEAGPVQIFVSNHLIPDDMEFQSGDVPNYTTSDGSVKIQKESEVRLKIIGTRVDATEIFCIGTIKDDFLGVISDPGGAL

SEQ ID NO: 62943 - protein, 167 aa, Triticum aestivum
  peptide (1)..(167): Ceres Seq. ID no. 12585338
  misc_feature (68)..(150): Pfam Name: S1 RNA binding domain Pfam Description: S1 RNA binding domain
  misc_feature (1)..(158): Homolog of NCBI NO: 12655858 NR Description: RNA polymerase II subunit 7 [Candida albicans]
  misc_feature (1)..(160): Homolog of NCBI NO: 19114885 NR Description: RNA polymerase II subunit rpb7
  misc_feature (1)..(159): Homolog of NCBI NO: 17510349 NR Description: RNA polymerase Rpb7, N-terminal domain and S1 RNA
  misc_feature (1)..(159): Homolog of NCBI NO: 39595528 NR Description: Hypothetical protein CBG04195 [Caenorhabditis
  misc_feature (1)..(160): Homolog of NCBI NO: 31241005 NR Description: ENSANGP00000017695 [Anopheles gambiae]
  misc_feature (1)..(161): Homolog of NCBI NO: 28278826 NR Description: Unknown (protein for MGC:55297) [Danio rerio]
  misc_feature (1)..(161): Homolog of NCBI NO: 4505947 NR Description: DNA directed RNA polymerase II polypeptide G
  misc_feature (1)..(162): Homolog of NCBI NO: 24647020 NR Description: CG31155-PA [Drosophila melanogaster]
  misc_feature (1)..(166): Homolog of NCBI NO: 15237831 NR Description: RNA polymerase II; protein id: At5g59180.1
  misc_feature (1)..(163): Homolog of NCBI NO: 1173137 NR Description: DNA-DIRECTED RNA POLYMERASE II 19 KD POLYPEPTIDE
MQLHPRHFGPHLRDKLVAKLMKDVEGTCSGRHGFVVAITGVEDIGKGLIREGTGFVTFPVKYQCVVFRPFKGEILEAVVTMVNKMGFFAEAGPVQIFVSNHLIPDDMEFQSGDVPNYTTSDGSVKIQKESEVRLKIIGTRVDATEIFCIGTIKDDFLGVISDPGGAL

SEQ ID NO: 62944 - DNA, 836 bp, Triticum aestivum
  misc_feature (1)..(836): Ceres Seq. ID no. 13655262
aacatcctaatcgaaaaaaaaagaatactagtcgctggacctcatcgatggccgtccggtgtcacgctgctgctaccttggtctcgtcccgagcgcacctgtcctcgtacctcccgcccctcctcccctccgcgcgaccccgacccaggacgacccgcagcggcggcggcagctacaggcgggccgccgttcgcgccatgggcgccgcgccgtcttcgccctcgccgtccggacaagccccagggaaagcggataacgcgtctctgagtgatgaggagttgaagaagcgcctcacaaaagaacagtattacgtcactcggcagaagggaactgagagggcattcacaggggaatactggaacactaaaaccccaggcatctaccattgcatctgctgtgacacccctctgtttgagtcatcaaccaagtttgatagtggtactggatggccgtcctattaccagccggttggcgacaatgtgaaaagcaagcttgatatgtcgatcttcttcatgcctcggaccgagtccctgtgtgccgtctgcgacgctcacctggggcatgttttcgacgacgggccaccgccgactgggaagagatattgcatcaacagcgcgtctctgaagtttaagccccagtagtccctggaagaagaatcaagatgcaagcaccagtgcgtcccatgtaaattttggttttggtatgaactatttccagtgtagtagcctagtccgcccggtctgcgcatgtaaattgataatttccaggtttgtaatttgtaaagccatttgtccgaaacatctgcatgttcctccatgagcagtaccgtttggccc

SEQ ID NO: 62945 - protein, 212 aa, Triticum aestivum
  peptide (1)..(212): Ceres Seq. ID no. 15219722
  misc_feature (90)..(208): Pfam Name: SelR domain Pfam Description: SelR domain
  misc_feature (89)..(212): Homolog of NCBI NO: 37523908 NR Description: hypothetical protein glr4339 [Gloeobacter
  misc_feature (68)..(211): Homolog of NCBI NO: 37620216 NR Description: hypothetical protein LOC253827 [Homo sapiens]
  misc_feature (75)..(212): Homolog of NCBI NO: 28893017 NR Description: RIKEN cDNA D430026P16 gene [Mus musculus]
  misc_feature (89)..(212): Homolog of NCBI NO: 33594433 NR Description: peptide methionine sulfoxide reductase
  misc_feature (89)..(209): Homolog of NCBI NO: 23040381 NR Description: hypothetical protein [Trichodesmium erythraeum
  misc_feature (89)..(212): Homolog of NCBI NO: 33597872 NR Description: peptide methionine sulfoxide reductase
  misc_feature (89)..(209): Homolog of NCBI NO: 37523588 NR Description: hypothetical protein gll4019 [Gloeobacter
  misc_feature (89)..(212): Homolog of NCBI NO: 22298757 NR Description: ORF_ID:tlr1214~hypothetical protein
  misc_feature (66)..(208): Homolog of NCBI NO: 21593253 NR Description: transcriptional regulator, putative [Arabidopsis
  misc_feature (62)..(208): Homolog of NCBI NO: 30695559 NR Description: transcriptional regulator -related [Arabidopsis
HPNRKKKNTSRWTSSMAVRCHAAATLVSSRAHLSSYLPPLLPSARPRPRTTRSGGGSYRRAAVRAMGAAPSSPSPSGQAPGKADNASLSDEELKKRLTKEQYYVTRQKGTERAFTGEYWNTKTPGIYHCICCDTPLFESSTKFDSGTGWPSYYQPVGDNVKSKLDMSIFFMPRTESLCAVCDAHLGHVFDDGPPPTGKRYCINSASLKFKPQ

SEQ ID NO: 62946 - protein, 197 aa, Triticum aestivum
  peptide (1)..(197): Ceres Seq. ID no. 15219723
  misc_feature (75)..(193): Pfam Name: SelR domain Pfam Description: SelR domain
  misc_feature (74)..(197): Homolog of NCBI NO: 37523908 NR Description: hypothetical protein glr4339 [Gloeobacter
  misc_feature (53)..(196): Homolog of NCBI NO: 37620216 NR Description: hypothetical protein LOC253827 [Homo sapiens]
  misc_feature (60)..(197): Homolog of NCBI NO: 28893017 NR Description: RIKEN cDNA D430026P16 gene [Mus musculus]
  misc_feature (74)..(197): Homolog of NCBI NO: 33594433 NR Description: peptide methionine sulfoxide reductase
  misc_feature (74)..(194): Homolog of NCBI NO: 23040381 NR Description: hypothetical protein [Trichodesmium erythraeum
  misc_feature (74)..(197): Homolog of NCBI NO: 33597872 NR Description: peptide methionine sulfoxide reductase
  misc_feature (74)..(194): Homolog of NCBI NO: 37523588 NR Description: hypothetical protein gll4019 [Gloeobacter
  misc_feature (74)..(197): Homolog of NCBI NO: 22298757 NR Description: ORF_ID:tlr1214~hypothetical protein
  misc_feature (51)..(193): Homolog of NCBI NO: 21593253 NR Description: transcriptional regulator, putative [Arabidopsis
  misc_feature (47)..(193): Homolog of NCBI NO: 30695559 NR Description: transcriptional regulator -related [Arabidopsis
MAVRCHAAATLVSSRAHLSSYLPPLLPSARPRPRTTRSGGGSYRRAAVRAMGAAPSSPSPSGQAPGKADNASLSDEELKKRLTKEQYYVTRQKGTERAFTGEYWNTKTPGIYHCICCDTPLFESSTKFDSGTGWPSYYQPVGDNVKSKLDMSIFFMPRTESLCAVCDAHLGHVFDDGPPPTGKRYCINSASLKFKPQ

SEQ ID NO: 62947 - protein, 147 aa, Triticum aestivum
  peptide (1)..(147): Ceres Seq. ID no. 15219724
  misc_feature (25)..(143): Pfam Name: SelR domain Pfam Description: SelR domain
  misc_feature (24)..(147): Homolog of NCBI NO: 37523908 NR Description: hypothetical protein glr4339 [Gloeobacter
  misc_feature (3)..(146): Homolog of NCBI NO: 37620216 NR Description: hypothetical protein LOC253827 [Homo sapiens]
  misc_feature (10)..(147): Homolog of NCBI NO: 28893017 NR Description: RIKEN cDNA D430026P16 gene [Mus musculus]
  misc_feature (24)..(147): Homolog of NCBI NO: 33594433 NR Description: peptide methionine sulfoxide reductase
  misc_feature (24)..(144): Homolog of NCBI NO: 23040381 NR Description: hypothetical protein [Trichodesmium erythraeum
  misc_feature (24)..(147): Homolog of NCBI NO: 33597872 NR Description: peptide methionine sulfoxide reductase
  misc_feature (24)..(144): Homolog of NCBI NO: 37523588 NR Description: hypothetical protein gll4019 [Gloeobacter
  misc_feature (24)..(147): Homolog of NCBI NO: 22298757 NR Description: ORF_ID:tlr1214~hypothetical protein
  misc_feature (1)..(143): Homolog of NCBI NO: 21593253 NR Description: transcriptional regulator, putative [Arabidopsis
  misc_feature (1)..(143): Homolog of NCBI NO: 30695559 NR Description: transcriptional regulator -related [Arabidopsis
MGAAPSSPSPSGQAPGKADNASLSDEELKKRLTKEQYYVTRQKGTERAFTGEYWNTKTPGIYHCICCDTPLFESSTKFDSGTGWPSYYQPVGDNVKSKLDMSIFFMPRTESLCAVCDAHLGHVFDDGPPPTGKRYCINSASLKFKPQ

SEQ ID NO: 62948 - DNA, 816 bp, Triticum aestivum
  misc_feature (1)..(816): Ceres Seq. ID no. 12615300
aacccaaacccccgctaagcatcagcagcagtgcagcacctcccttctacctcctctgctctgcattcctccttccagctccagccgcaatcaatggccgccatgaagatcaccctcctcgccgtggccgcgatggccgtcttactaggcagcgcgtcagcggtaacctacaacgtcggcgatcagggcggttgggccctcagcaccgactacagcaactgggtgtccggcaagaagttcaacgtgggtgatgacatcgtcttcaagtactcgaccccgacgcacgacgtggtcgaggtcagcaaggccggctacgactcctgcagcaccgacggcgccatcaacaccttaacctccggcaacgacgtcatctccctcaacgccaccggcacccgctacttcatctgtggcgtccctaaccattgcagccccgccgccgccgccagcatgaaggtcgtgatcgacgtcgcctcgggctcctcctcgccgtcgtcacccatgccagctgcaggtcctggcgcgagcaactctcccccggcgccgccctccaacgccgctacctccgtcggtgccacagcaggatttggcctcgtcgccctcctggcggccggtctcatggcttgaacgcatatattgatcagctgccgcgcgcacatacgactttatcttttgttattaactactatactgtagttattatcacgggtgaatacatgtattcttttttagagcgagaatgtgatagttacttgtatctatcacgtctatatgtaatctgcaggccttcatgtctttttatataatgattctagactg

SEQ ID NO: 62949 - protein, 176 aa, Triticum aestivum; identical to SEQ ID NO: 55741
  peptide (1)..(176): Ceres Seq. ID no. 12615301
  misc_feature (34)..(115): Pfam Name: Plastocyanin-like domain Pfam Description: Plastocyanin-like domain
  misc_feature (8)..(174): Homolog of NCBI NO: 34915492 NR Description: contains ESTs
  misc_feature (1)..(175): Homolog of NCBI NO: 34900010 NR Description: P0039H02.23 [Oryza sativa (japonica
  misc_feature (1)..(163): Homolog of NCBI NO: 38346158 NR Description: OSJNBa0079A21.5 [Oryza sativa (japonica
  misc_feature (1)..(175): Homolog of NCBI NO: 38636838 NR Description: putative blue copper binding protein
  misc_feature (2)..(175): Homolog of NCBI NO: 38636764 NR Description: putative blue copper binding protein
  misc_feature (1)..(175): Homolog of NCBI NO: 38636761 NR Description: putative blue copper binding protein
  misc_feature (1)..(176): Homolog of NCBI NO: 38636760 NR Description: putative blue copper binding protein
  misc_feature (2)..(176): Homolog of NCBI NO: 38636763 NR Description: putative blue copper binding protein
  misc_feature (1)..(176): Homolog of NCBI NO: 37651973 NR Description: blue copper binding protein [Hordeum vulgare
  misc_feature (1)..(176): Homolog of NCBI NO: 4104058 NR Description: blue copper-binding protein homolog [Triticum

SEQ ID NO: 62950 - protein, 173 aa, Triticum aestivum; identical to SEQ ID NO: 55742
  peptide (1)..(173): Ceres Seq. ID no. 12615302
  misc_feature (31)..(112): Pfam Name: Plastocyanin-like domain Pfam Description: Plastocyanin-like domain
  misc_feature (5)..(171): Homolog of NCBI NO: 34915492 NR Description: contains ESTs
  misc_feature (1)..(172): Homolog of NCBI NO: 34900010 NR Description: P0039H02.23 [Oryza sativa (japonica
  misc_feature (1)..(160): Homolog of NCBI NO: 38346158 NR Description: OSJNBa0079A21.5 [Oryza sativa (japonica
  misc_feature (1)..(172): Homolog of NCBI NO: 38636838 NR Description: putative blue copper binding protein
  misc_feature (1)..(172): Homolog of NCBI NO: 38636764 NR Description: putative blue copper binding protein
  misc_feature (1)..(172): Homolog of NCBI NO: 38636761 NR Description: putative blue copper binding protein
  misc_feature (1)..(173): Homolog of NCBI NO: 38636760 NR Description: putative blue copper binding protein
  misc_feature (1)..(173): Homolog of NCBI NO: 38636763 NR Description: putative blue copper binding protein
  misc_feature (1)..(173): Homolog of NCBI NO: 37651973 NR Description: blue copper binding protein [Hordeum vulgare
  misc_feature (1)..(173): Homolog of NCBI NO: 4104058 NR Description: blue copper-binding protein homolog [Triticum

SEQ ID NO: 62951 - protein, 163 aa, Triticum aestivum; identical to SEQ ID NO: 55743
  peptide (1)..(163): Ceres Seq. ID no. 12615303
  misc_feature (21)..(102): Pfam Name: Plastocyanin-like domain Pfam Description: Plastocyanin-like domain
  misc_feature (1)..(161): Homolog of NCBI NO: 34915492 NR Description: contains ESTs
  misc_feature (1)..(162): Homolog of NCBI NO: 34900010 NR Description: P0039H02.23 [Oryza sativa (japonica
  misc_feature (1)..(150): Homolog of NCBI NO: 38346158 NR Description: OSJNBa0079A21.5 [Oryza sativa (japonica
  misc_feature (1)..(162): Homolog of NCBI NO: 38636838 NR Description: putative blue copper binding protein
  misc_feature (1)..(162): Homolog of NCBI NO: 38636764 NR Description: putative blue copper binding protein
  misc_feature (1)..(162): Homolog of NCBI NO: 38636761 NR Description: putative blue copper binding protein
  misc_feature (1)..(163): Homolog of NCBI NO: 38636760 NR Description: putative blue copper binding protein
  misc_feature (1)..(163): Homolog of NCBI NO: 38636763 NR Description: putative blue copper binding protein
  misc_feature (1)..(163): Homolog of NCBI NO: 37651973 NR Description: blue copper binding protein [Hordeum vulgare
  misc_feature (1)..(163): Homolog of NCBI NO: 4104058 NR Description: blue copper-binding protein homolog [Triticum

SEQ ID NO: 62952 - DNA, 924 bp, Triticum aestivum
  misc_feature (1)..(924): Ceres Seq. ID no. 15173118
gtaacaaatttgtttttttaggggttggtaacaagtaaacagggcacattcccggctgtctctactcccgggcggcgtgggcccgagatgcaggcgtggttctccggctctgggccctcgccctcctcgtcggcggcgtcttcgcagccgccgccatctctgctcgcggagtggaactcctacgccgccgcccgctccgccgaggaggatgtcggcggaggattcgggatcgacatcgaggccgccgtccgttccgccaacgaccgcgtcaccggcaccttcggcgtggtatctaaaggagttagagggttccctggcagcttccagtcctcaacaagcagtgttccatctggcaaatctctcatgtatttcggtctttttcttgccagtggcattttcctagttttcatcgcgttcacaatattcctgccagtcatggtaataatgcctcaaaagtttgcgatctgtttcacgatgggatgtgccttcatcattggatctttctttgcattgaaaggaccgaagaatcagctctatcatatgatttccagagagaggttacctttcaccattggatttgttggcagcatgtttgctaccatctatgtgtcaatggtgctccatagctacatactttctgttttcttctcttgtcttcagatccttgcgctagtatactatgccatctcatacttccctggtgggtctgctggaatgaagtttctgtcatctacccttgtggcctcagtgttgagatgcttcgggcgatgagttcacccgttagttgctctcacccatctgtctcgccctgtgttcagctcagtgacaattttttttcttttgctttgacatggagagtgtgtgtcaaagatgaccttggagcttgtgttcacagatatacatgcatgtccaacttaccgatac

SEQ ID NO: 62953 - protein, 227 aa, Triticum aestivum
  peptide (1)..(227): Ceres Seq. ID no. 15173119
  misc_feature (79)..(217): Homolog of NCBI NO: 19115465 NR Description: putative membrane protein required for ER to
  misc_feature (77)..(223): Homolog of NCBI NO: 39597537 NR Description: Hypothetical protein CBG03219 [Caenorhabditis
  misc_feature (76)..(223): Homolog of NCBI NO: 17532001 NR Description: mammalian syntaxin 5 like (25.7 kD) (2J246)
  misc_feature (90)..(213): Homolog of NCBI NO: 40746734 NR Description: hypothetical protein AN1297.2 [Aspergillus
  misc_feature (92)..(220): Homolog of NCBI NO: 6319366 NR Description: similar to mammalian syntaxin 5; Sft2p
  misc_feature (80)..(227): Homolog of NCBI NO: 23619167 NR Description: hypothetical protein, conserved [Plasmodium
  misc_feature (2)..(67): Homolog of NCBI NO: 7486785 NR Description: hypothetical protein M3E9.20 - Arabidopsis
  misc_feature (68)..(227): Homolog of NCBI NO: 7486785 NR Description: hypothetical protein M3E9.20 - Arabidopsis
  misc_feature (2)..(227): Homolog of NCBI NO: 15241114 NR Description: expressed protein [Arabidopsis thaliana]
  misc_feature (2)..(227): Homolog of NCBI NO: 18416771 NR Description: expressed protein [Arabidopsis thaliana]
MQAWFSGSGPSPSSSAASSQPPPSLLAEWNSYAAARSAEEDVGGGFGIDIEAAVRSANDRVTGTFGVVSKGVRGFPGSFQSSTSSVPSGKSLMYFGLFLASGIFLVFIAFTIFLPVMVIMPQKFAICFTMGCAFIIGSFFALKGPKNQLYHMISRERLPFTIGFVGSMFATIYVSMVLHSYILSVFFSCLQILALVYYAISYFPGGSAGMKFLSSTLVASVLRCFGR

SEQ ID NO: 62954 - protein, 135 aa, Triticum aestivum
  peptide (1)..(135): Ceres Seq. ID no. 15173120
  misc_feature (8)..(131): Homolog of NCBI NO: 19571762 NR Description: similar to C18E9.10 [Tetraodon nigroviridis]
  misc_feature (1)..(125): Homolog of NCBI NO: 19115465 NR Description: putative membrane protein required for ER to
  misc_feature (1)..(131): Homolog of NCBI NO: 39597537 NR Description: Hypothetical protein CBG03219 [Caenorhabditis
  misc_feature (1)..(131): Homolog of NCBI NO: 17532001 NR Description: mammalian syntaxin 5 like (25.7 kD) (2J246)
  misc_feature (1)..(121): Homolog of NCBI NO: 40746734 NR Description: hypothetical protein AN1297.2 [Aspergillus
  misc_feature (1)..(128): Homolog of NCBI NO: 6319366 NR Description: similar to mammalian syntaxin 5; Sft2p
  misc_feature (1)..(135): Homolog of NCBI NO: 23619167 NR Description: hypothetical protein, conserved [Plasmodium
  misc_feature (1)..(135): Homolog of NCBI NO: 7486785 NR Description: hypothetical protein M3E9.20 - Arabidopsis
  misc_feature (1)..(135): Homolog of NCBI NO: 15241114 NR Description: expressed protein [Arabidopsis thaliana]
  misc_feature (1)..(135): Homolog of NCBI NO: 18416771 NR Description: expressed protein [Arabidopsis thaliana]
MYFGLFLASGIFLVFIAFTIFLPVMVIMPQKFAICFTMGCAFIIGSFFALKGPKNQLYHMISRERLPFTIGFVGSMFATIYVSMVLHSYILSVFFSCLQILALVYYAISYFPGGSAGMKFLSSTLVASVLRCFGR

SEQ ID NO: 62955 - DNA, 813 bp, Triticum aestivum
  misc_feature (1)..(813): Ceres Seq. ID no. 12584972
caattttcattccgaagtccctttcaacgagagagagggagagagagaggagcagttagttgagacccgagacggagatggatctgctggagaggagcgcagccactattaaggcggagcagggggaggcccagcgcaaggaagccgagaggaaggagcaggagcacaaggagcaggagacccagcagccagggctcancggccgacccccgctcgccaacggcaggtctggaatgttgccaatgtcgagccctccagcaaatccgggacagcttaccattttttatggtgggtcagtatgtgtgtatgactcagtgccaccagagaaggctcaagcaatcatgctcattgcagcagcagcagctgcggcctcaaaaagcaatggcaccactgctgttaagcctccagcgatgtctgcgaccaatgctatccaagccatgcttacgcggtcgctctcactccagagcacttctgtagcaaatggacaacctcaggctgtcgcggatcctggctcgatttgcaagcttcaggctgatcttcccatcgccaggagacactcccttcagcgcttcctggagaagcgccgtgacaggttagcatgaatgaagagtacaagtagcagtctacgttcttctggagcgtattatgagtattatgacccccttacatttgttgttttgtgtttccacatgctgtgtatggtgtaccacagcatttagaaatgcatttgtatgaggccaagtcttcaaaaccaagtcttgtacttctgtgccccgttcatgatcaatccaaattatgataaccgttctattt

SEQ ID NO: 62956 - protein, 174 aa, Triticum aestivum
  peptide (1)..(174): Ceres Seq. ID no. 12584973
  misc_feature (59)..(92): Pfam Name: ZIM motif Pfam Description: ZIM motif
  misc_feature (59)..(173): Homolog of NCBI NO: 21592605 NR Description: unknown [Arabidopsis thaliana]
  misc_feature (59)..(173): Homolog of NCBI NO: 18410737 NR Description: expressed protein
  misc_feature (40)..(173): Homolog of NCBI NO: 17064878 NR Description: Unknown protein [Arabidopsis thaliana]
  misc_feature (40)..(173): Homolog of NCBI NO: 25406068 NR Description: hypothetical protein F5A18.12 [imported] -
  misc_feature (60)..(147): Homolog of NCBI NO: 39652276 NR Description: hypothetical protein [Solanum tuberosum]
  misc_feature (65)..(173): Homolog of NCBI NO: 29788814 NR Description: unknown protein [Oryza sativa (japonica
  misc_feature (22)..(173): Homolog of NCBI NO: 23237931 NR Description: contains ESTs
  misc_feature (50)..(173): Homolog of NCBI NO: 15242096 NR Description: putative protein
  misc_feature (1)..(173): Homolog of NCBI NO: 32488878 NR Description: OSJNBa0060D06.16 [Oryza sativa (japonica
  misc_feature (41)..(41): Xaa is any aa, unknown or other
MDLLERSAATIKAEQGEAQRKEAERKEQEHKEQETQQPGLXGRPPLANGRSGMLPMSSPPANPGQLTIFYGGSVCVYDSVPPEKAQAIMLIAAAAAAASKSNGTTAVKPPAMSATNAIQAMLTRSLSLQSTSVANGQPQAVADPGSICKLQADLPIARRHSLQRFLEKRRDRLA

SEQ ID NO: 62957 - protein, 122 aa, Triticum aestivum
  peptide (1)..(122): Ceres Seq. ID no. 12584974
  misc_feature (7)..(40): Pfam Name: ZIM motif Pfam Description: ZIM motif
  misc_feature (7)..(121): Homolog of NCBI NO: 21592605 NR Description: unknown [Arabidopsis thaliana]
  misc_feature (7)..(121): Homolog of NCBI NO: 18410737 NR Description: expressed protein
  misc_feature (1)..(121): Homolog of NCBI NO: 17064878 NR Description: Unknown protein [Arabidopsis thaliana]
  misc_feature (1)..(121): Homolog of NCBI NO: 25406068 NR Description: hypothetical protein F5A18.12 [imported] -
  misc_feature (8)..(95): Homolog of NCBI NO: 39652276 NR Description: hypothetical protein [Solanum tuberosum]
  misc_feature (13)..(121): Homolog of NCBI NO: 29788814 NR Description: unknown protein [Oryza sativa (japonica
  misc_feature (1)..(121): Homolog of NCBI NO: 23237931 NR Description: contains ESTs
  misc_feature (1)..(121): Homolog of NCBI NO: 15242096 NR Description: putative protein
  misc_feature (1)..(121): Homolog of NCBI NO: 32488878 NR Description: OSJNBa0060D06.16 [Oryza sativa (japonica
MLPMSSPPANPGQLTIFYGGSVCVYDSVPPEKAQAIMLIAAAAAAASKSNGTTAVKPPAMSATNAIQAMLTRSLSLQSTSVANGQPQAVADPGSICKLQADLPIARRHSLQRFLEKRRDRLA

SEQ ID NO: 62958 - protein, 119 aa, Triticum aestivum
  peptide (1)..(119): Ceres Seq. ID no. 12584975
  misc_feature (4)..(37): Pfam Name: ZIM motif Pfam Description: ZIM motif
  misc_feature (4)..(118): Homolog of NCBI NO: 21592605 NR Description: unknown [Arabidopsis thaliana]
  misc_feature (4)..(118): Homolog of NCBI NO: 18410737 NR Description: expressed protein
  misc_feature (1)..(118): Homolog of NCBI NO: 17064878 NR Description: Unknown protein [Arabidopsis thaliana]
  misc_feature (1)..(118): Homolog of NCBI NO: 25406068 NR Description: hypothetical protein F5A18.12 [imported] -
  misc_feature (5)..(92): Homolog of NCBI NO: 39652276 NR Description: hypothetical protein [Solanum tuberosum]
  misc_feature (10)..(118): Homolog of NCBI NO: 29788814 NR Description: unknown protein [Oryza sativa (japonica
  misc_feature (1)..(118): Homolog of NCBI NO: 23237931 NR Description: contains ESTs
  misc_feature (1)..(118): Homolog of NCBI NO: 15242096 NR Description: putative protein
  misc_feature (1)..(118): Homolog of NCBI NO: 32488878 NR Description: OSJNBa0060D06.16 [Oryza sativa (japonica
MSSPPANPGQLTIFYGGSVCVYDSVPPEKAQAIMLIAAAAAAASKSNGTTAVKPPAMSATNAIQAMLTRSLSLQSTSVANGQPQAVADPGSICKLQADLPIARRHSLQRFLEKRRDRLA

SEQ ID NO: 62959 - DNA, 688 bp, Triticum aestivum
  misc_feature (1)..(688): Ceres Seq. ID no. 12597253
acacaaactcagagcattccgatacagcgcaaccgccgccaacaccactcctagcgagtcctcgccgccggagaagcagcaagaagatggccggaaggaagggtggcgacaggaagaaggcggtgacccgctccgtgaaggctgggctccagttccccgtcggccgcatcgggcgctacctcaagaagggccgctacgcccagcgcgtcggctccggcgcccccgtctacctcgccgccgtcctcgagtacctcgccgccgaggtcctggagcttgccggcaacgcggccaaggacaacaagaagacccgcatcatcccgcgccacctgctgctggccgtccgcaacgaccaggagctcggcaggctgctggccggcgtcaccatcgcccacggcggcgtgatccccaacatcaactccgtgctgctccccaagaagtccgccgccgccgccgagaaggaggccaagtcgcccaagaagaagacctccactaagtcccccaagaagaagaccgcggccaccaaagagtagcaggccccatagcttagccagtgttgcttagatccatttctcatggactaagatgagatcctgtatgtaatgcctgctagtctgtagtgcccgtcagatttgacgagcaaggttgacattgtgatatcagtgagaatggctaaagatgcaatcatttt

SEQ ID NO: 62960 - protein, 175 aa, Triticum aestivum
  peptide (1)..(175): Ceres Seq. ID no. 12597254
  misc_feature (30)..(145): Pfam Name: Core histone H2A/H2B/H3/H4 Pfam Description: Core histone H2A/H2B/H3/H4
  misc_feature (24)..(168): Homolog of NCBI NO: 122003 NR Description: HISTONE H2A
  misc_feature (27)..(168): Homolog of NCBI NO: 34914498 NR Description: putative histone H2A [Oryza sativa (japonica
  misc_feature (24)..(168): Homolog of NCBI NO: 122007 NR Description: Histone H2A
  misc_feature (26)..(168): Homolog of NCBI NO: 121974 NR Description: HISTONE H2A.2.1
  misc_feature (27)..(168): Homolog of NCBI NO: 121982 NR Description: HISTONE H2A.2.2
  misc_feature (29)..(175): Homolog of NCBI NO: 1076776 NR Description: histone H2A.2 - wheat
  misc_feature (29)..(175): Homolog of NCBI NO: 1076777 NR Description: histone H2A.3 - wheat
  misc_feature (29)..(175): Homolog of NCBI NO: 1161302 NR Description: histone H2A [Triticum aestivum]
  misc_feature (30)..(175): Homolog of NCBI NO: 121965 NR Description: HISTONE H2A.1
  misc_feature (29)..(175): Homolog of NCBI NO: 2130104 NR Description: histone H2A.9 - wheat
TNSEHSDTAQPPPTPLLASPRRRRSSKKMAGRKGGDRKKAVTRSVKAGLQFPVGRIGRYLKKGRYAQRVGSGAPVYLAAVLEYLAAEVLELAGNAAKDNKKTRIIPRHLLLAVRNDQELGRLLAGVTIAHGGVIPNINSVLLPKKSAAAAEKEAKSPKKKTSTKSPKKKTAATKE

SEQ ID NO: 62961 - protein, 163 aa, Triticum aestivum
  peptide (1)..(163): Ceres Seq. ID no. 12597255
HKLRAFRYSATAANTTPSESSPPEKQQEDGRKEGWRQEEGGDPLREGWAPVPRRPHRALPQEGPLRPARRLRRPRLPRRRPRVPRRRGPGACRQRGQGQQEDPHHPAPPAAGRPQRPGARQAAGRRHHRPRRRDPQHQLRAAPQEVRRRRREGGQVAQEEDLH

SEQ ID NO: 62962 - protein, 147 aa, Triticum aestivum
  peptide (1)..(147): Ceres Seq. ID no. 12597256
  misc_feature (2)..(117): Pfam Name: Core histone H2A/H2B/H3/H4 Pfam Description: Core histone H2A/H2B/H3/H4
  misc_feature (1)..(140): Homolog of NCBI NO: 122003 NR Description: HISTONE H2A
  misc_feature (1)..(140): Homolog of NCBI NO: 34914498 NR Description: putative histone H2A [Oryza sativa (japonica
  misc_feature (1)..(140): Homolog of NCBI NO: 122007 NR Description: Histone H2A
  misc_feature (1)..(140): Homolog of NCBI NO: 121974 NR Description: HISTONE H2A.2.1
  misc_feature (1)..(140): Homolog of NCBI NO: 121982 NR Description: HISTONE H2A.2.2
  misc_feature (1)..(147): Homolog of NCBI NO: 1076776 NR Description: histone H2A.2 - wheat
  misc_feature (1)..(147): Homolog of NCBI NO: 1076777 NR Description: histone H2A.3 - wheat
  misc_feature (1)..(147): Homolog of NCBI NO: 1161302 NR Description: histone H2A [Triticum aestivum]
  misc_feature (2)..(147): Homolog of NCBI NO: 121965 NR Description: HISTONE H2A.1
  misc_feature (1)..(147): Homolog of NCBI NO: 2130104 NR Description: histone H2A.9 - wheat
MAGRKGGDRKKAVTRSVKAGLQFPVGRIGRYLKKGRYAQRVGSGAPVYLAAVLEYLAAEVLELAGNAAKDNKKTRIIPRHLLLAVRNDQELGRLLAGVTIAHGGVIPNINSVLLPKKSAAAAEKEAKSPKKKTSTKSPKKKTAATKE

SEQ ID NO: 62963 - DNA, 831 bp, Triticum aestivum
  misc_feature (1)..(831): Ceres Seq. ID no. 13583556
cctaattccagaaccatcccctccgacctaggctatggctttcatcgtgtccaagctcgcgcgggcagccctcgcatcccgccccgttggagatattgctggtggcatctccccgtgtctctcccggctctatctggcggctggtaccagccgtcgcatgtttgcagctgcaggcggtcccaagtcaaaagaagcaccccgaatatttccccttgttgatgagaattccattaagtcgaaggaatccctatgggccttgtatgaatgctggtgcaagtattggggggtatcccgtgaccgtgaagagatggtccgccggttcaagtcatttgaggctactgcacagtgggtttacaaaatgaacaactctgggtgttcgcaagtgtctcaactgggcccgcatgcagatttttcagagagtgagtttgctgaggtggtgtttcctccacttcctgatgatgatgatgaagacataaaagagatggtgccaggtcaagatttgggccaggagcttgaggagcccttaaataattaattcgagaaattatgaacttgtcttactccatccgttcccaaatataagtctttctagagattcaacaagtgactacatacggagcaaaatgagtgaatctgcactctaaaatatgtctacatgcatacgtatgttgtagtccatttgaaatgtctaaaaagacttatatgtaggaacggatgagtatttggttgtggtaatactgtggtactgggattattgttgttgtctggttgttctcatggaaccaaattagaattgaaataactttgtgttattgctcaaaaaaaaaaaaa

SEQ ID NO: 62964 - protein, 166 aa, Triticum aestivum; identical to SEQ ID NO: 55769
  peptide (1)..(166): Ceres Seq. ID no. 13583557
  misc_feature (1)..(111): Homolog of NCBI NO: 38605767 NR Description: OSJNBa0044K18.10 [Oryza sativa (japonica
  misc_feature (63)..(135): Homolog of NCBI NO: 40786566 NR Description: putative cysteine proteinase
  misc_feature (61)..(133): Homolog of NCBI NO: 34897042 NR Description: hypothetical protein [Oryza sativa (japonica

SEQ ID NO: 62965 - protein, 125 aa, Triticum aestivum; identical to SEQ ID NO: 55770
  peptide (1)..(125): Ceres Seq. ID no. 13583558
  misc_feature (1)..(70): Homolog of NCBI NO: 38605767 NR Description: OSJNBa0044K18.10 [Oryza sativa (japonica
  misc_feature (22)..(94): Homolog of NCBI NO: 40786566 NR Description: putative cysteine proteinase
  misc_feature (20)..(92): Homolog of NCBI NO: 34897042 NR Description: hypothetical protein [Oryza sativa (japonica

SEQ ID NO: 62966 - DNA, 1112 bp, Triticum aestivum
  misc_feature (1)..(1112): Ceres Seq. ID no. 13654956
tccccgtgcactcgtccctccccttccccctttctcttttcgctccggcgagggcgacggcagatctgcgccgggcctaggatggtgaacgtcaactgggagctgcagggctgctgccagcacaaccaggtcgtcttcatcgccgccgtcggcgtctccaccgtcgtcatcctcgccctgtggaggacgttcctgctcacgcctttcaagctcatcaccgtcttcctccacgagaccagccacgccctcgcctgcaagctcacctgcggagatgttgagggcatgcaggtccatgctaatgagggtggtgttacacaaactcgcggtggcatttactggataatcttgcctgctggatatctgggttcatcattttggggaatggtgttcatactttcatctacacatctcctagctacaagaattgcggctggttgcttcatacttgcattaattattgttctctttgttgccaaaaattggtttctgcgctggctctgcattggtttcatcatattcattgctgttgtctgggttatacaagaatttacaactttccatgttctgaagtatgttattctattcataggtgttatgaatagcttattttcagtttacgatatctatgatgacaccatatcccgaagagtgaattcaagtgatgctgagaaatttgctgaaatctgcccttgcccttgcaatggcgttggatggggtgttatatggggattcatctcatttatttttctctgtgcgtcgatatatcttggactggttatattgtcctgagggcttgcacctcccatatattagcattttgacctgacagcgcaggcggtgcttgttgtttgtttccattggtccggacattggctgcagcttgtattgatccatgggggacaggttgttccaaatgtatacatagggcaatgagtttatgccataattaaggttgattgaaattggataggggcggttattgatgcgattcttccttgcgtttatagctcatgtagatggcatttgatatgcacagctgatatagtattatgttgttgttgagatggtattcatggaccaactggaatttattcagcaatgcctgcagtctc

SEQ ID NO: 62967 - protein, 262 aa, Triticum aestivum
  peptide (1)..(262): Ceres Seq. ID no. 13654957
  misc_feature (55)..(212): Homolog of NCBI NO: 24212750 NR Description: conserved hypothetical protein
  misc_feature (28)..(92): Homolog of NCBI NO: 26449599 NR Description: unknown protein [Arabidopsis thaliana]
  misc_feature (95)..(256): Homolog of NCBI NO: 23485893 NR Description: hypothetical protein [Plasmodium yoelii yoelii]
  misc_feature (43)..(258): Homolog of NCBI NO: 32405840 NR Description: hypothetical protein ( (AL451015) conserved
  misc_feature (41)..(254): Homolog of NCBI NO: 40740899 NR Description: hypothetical protein AN4854.2 [Aspergillus
  misc_feature (32)..(256): Homolog of NCBI NO: 23619420 NR Description: hypothetical protein, conserved [Plasmodium
  misc_feature (28)..(205): Homolog of NCBI NO: 15219816 NR Description: expressed protein [Arabidopsis thaliana]
SPCTRPSPSPFLFSLRRGRRQICAGPRMVNVNWELQGCCQHNQVVFIAAVGVSTVVILALWRTFLLTPFKLITVFLHETSHALACKLTCGDVEGMQVHANEGGVTQTRGGIYWIILPAGYLGSSFWGMVFILSSTHLLATRIAAGCFILALIIVLFVAKNWFLRWLCIGFIIFIAVVWVIQEFTTFHVLKYVILFIGVMNSLFSVYDIYDDTISRRVNSSDAEKFAEICPCPCNGVGWGVIWGFISFIFLCASIYLGLVILS

SEQ ID NO: 62968 - protein, 235 aa, Triticum aestivum
  peptide (1)..(235): Ceres Seq. ID no. 13654958
  misc_feature (28)..(185): Homolog of NCBI NO: 24212750 NR Description: conserved hypothetical protein
  misc_feature (1)..(65): Homolog of NCBI NO: 26449599 NR Description: unknown protein [Arabidopsis thaliana]
  misc_feature (68)..(229): Homolog of NCBI NO: 23485893 NR Description: hypothetical protein [Plasmodium yoelii yoelii]
  misc_feature (16)..(231): Homolog of NCBI NO: 32405840 NR Description: hypothetical protein ( (AL451015) conserved
  misc_feature (14)..(227): Homolog of NCBI NO: 40740899 NR Description: hypothetical protein AN4854.2 [Aspergillus
  misc_feature (5)..(229): Homolog of NCBI NO: 23619420 NR Description: hypothetical protein, conserved [Plasmodium
  misc_feature (1)..(178): Homolog of NCBI NO: 15219816 NR Description: expressed protein [Arabidopsis thaliana]
MVNVNWELQGCCQHNQVVFIAAVGVSTVVILALWRTFLLTPFKLITVFLHETSHALACKLTCGDVEGMQVHANEGGVTQTRGGIYWIILPAGYLGSSFWGMVFILSSTHLLATRIAAGCFILALIIVLFVAKNWFLRWLCIGFIIFIAVVWVIQEFTTFHVLKYVILFIGVMNSLFSVYDIYDDTISRRVNSSDAEKFAEICPCPCNGVGWGVIWGFISFIFLCASIYLGLVILS

SEQ ID NO: 62969 - protein, 168 aa, Triticum aestivum
  peptide (1)..(168): Ceres Seq. ID no. 13654959
  misc_feature (1)..(118): Homolog of NCBI NO: 24212750 NR Description: conserved hypothetical protein
  misc_feature (1)..(162): Homolog of NCBI NO: 23485893 NR Description: hypothetical protein [Plasmodium yoelii yoelii]
  misc_feature (1)..(164): Homolog of NCBI NO: 32405840 NR Description: hypothetical protein ( (AL451015) conserved
  misc_feature (1)..(160): Homolog of NCBI NO: 40740899 NR Description: hypothetical protein AN4854.2 [Aspergillus
  misc_feature (1)..(162): Homolog of NCBI NO: 23619420 NR Description: hypothetical protein, conserved [Plasmodium
  misc_feature (1)..(111): Homolog of NCBI NO: 15219816 NR Description: expressed protein [Arabidopsis thaliana]
MQVHANEGGVTQTRGGIYWIILPAGYLGSSFWGMVFILSSTHLLATRIAAGCFILALIIVLFVAKNWFLRWLCIGFIIFIAVVWVIQEFTTFHVLKYVILFIGVMNSLFSVYDIYDDTISRRVNSSDAEKFAEICPCPCNGVGWGVIWGFISFIFLCASIYLGLVILS

SEQ ID NO: 62970 - DNA, 563 bp, Triticum aestivum
  misc_feature (1)..(563): Ceres Seq. ID no. 12585220
aaggctagctctctcgctccttcgtcctcgcaagcatcacaccagatccaccgtaggagcaaggaagggagatccacctaacccaccaatggcggccgctgcttcctccagcgcgtggaaggcgaggtggctccgccccgaggcgtaccctatctttgcggcgacgggcgtggccgtggggatctgcgtcatgcagctggtgcgcaacatcaccaccaaccccgaggtccgggtgaccaaggagaacagggcggccggggtgctggacaaccacgacgagggccgccgctacgcgcgccaccccttccggaggttcatcgacggcaagtccgccgagatcatgcccggcatcaacagcttcttcaccgccccaccaaagaactagacgtcgttgtcgtcgccgtcggagagctctttcttcaacttgaagggtggaatcaatcccttcgcgagaattacattcttttttccgcatgaattcaagtactattcgccatgattgattgtcaggcgctgtactatattgatttttgtgatcatatataagtataaaacttgatctg

SEQ ID NO: 62971 - protein, 127 aa, Triticum aestivum
  peptide (1)..(127): Ceres Seq. ID no. 12585221
  misc_feature (42)..(122): Homolog of NCBI NO: 15230104 NR Description: gene_id:K17E7.15~unknown protein; protein id:
  misc_feature (42)..(124): Homolog of NCBI NO: 34394573 NR Description: hypothetical protein [Oryza sativa (japonica
  misc_feature (42)..(124): Homolog of NCBI NO: 34394572 NR Description: unknown protein [Oryza sativa (japonica
  misc_feature (43)..(124): Homolog of NCBI NO: 16506646 NR Description: B12D-like protein [Castanea sativa]
  misc_feature (41)..(119): Homolog of NCBI NO: 34395047 NR Description: putative B12D protein [Oryza sativa (japonica
  misc_feature (41)..(126): Homolog of NCBI NO: 2293568 NR Description: HvB12D homolog [Oryza sativa]
  misc_feature (41)..(127): Homolog of NCBI NO: 4530585 NR Description: B12D protein [Ipomoea batatas]
  misc_feature (41)..(124): Homolog of NCBI NO: 15228342 NR Description: B12D-like protein
  misc_feature (41)..(124): Homolog of NCBI NO: 2130028 NR Description: B12D protein - barley
  misc_feature (31)..(126): Homolog of NCBI NO: 34395050 NR Description: putative B12D protein [Oryza sativa (japonica
RLALSLLRPRKHHTRSTVGARKGDPPNPPMAAAASSSAWKARWLRPEAYPIFAATGVAVGICVMQLVRNITTNPEVRVTKENRAAGVLDNHDEGRRYARHPFRRFIDGKSAEIMPGINSFFTAPPKN

SEQ ID NO: 62972 - protein, 98 aa, Triticum aestivum
  peptide (1)..(98): Ceres Seq. ID no. 12585222
  misc_feature (13)..(93): Homolog of NCBI NO: 15230104 NR Description: gene_id:K17E7.15~unknown protein; protein id:
  misc_feature (13)..(95): Homolog of NCBI NO: 34394573 NR Description: hypothetical protein [Oryza sativa (japonica
  misc_feature (13)..(95): Homolog of NCBI NO: 34394572 NR Description: unknown protein [Oryza sativa (japonica
  misc_feature (14)..(95): Homolog of NCBI NO: 16506646 NR Description: B12D-like protein [Castanea sativa]
  misc_feature (12)..(90): Homolog of NCBI NO: 34395047 NR Description: putative B12D protein [Oryza sativa (japonica
  misc_feature (12)..(97): Homolog of NCBI NO: 2293568 NR Description: HvB12D homolog [Oryza sativa]
  misc_feature (12)..(98): Homolog of NCBI NO: 4530585 NR Description: B12D protein [Ipomoea batatas]
  misc_feature (12)..(95): Homolog of NCBI NO: 15228342 NR Description: B12D-like protein
  misc_feature (12)..(95): Homolog of NCBI NO: 2130028 NR Description: B12D protein - barley
  misc_feature (2)..(97): Homolog of NCBI NO: 34395050 NR Description: putative B12D protein [Oryza sativa (japonica
MAAAASSSAWKARWLRPEAYPIFAATGVAVGICVMQLVRNITTNPEVRVTKENRAAGVLDNHDEGRRYARHPFRRFIDGKSAEIMPGINSFFTAPPKN

SEQ ID NO: 62973 - protein, 64 aa, Triticum aestivum
  peptide (1)..(64): Ceres Seq. ID no. 12585223
  misc_feature (1)..(59): Homolog of NCBI NO: 15230104 NR Description: gene_id:K17E7.15~unknown protein; protein id:
  misc_feature (1)..(61): Homolog of NCBI NO: 34394573 NR Description: hypothetical protein [Oryza sativa (japonica
  misc_feature (1)..(61): Homolog of NCBI NO: 34394572 NR Description: unknown protein [Oryza sativa (japonica
  misc_feature (1)..(61): Homolog of NCBI NO: 16506646 NR Description: B12D-like protein [Castanea sativa]
  misc_feature (1)..(56): Homolog of NCBI NO: 34395047 NR Description: putative B12D protein [Oryza sativa (japonica
  misc_feature (1)..(63): Homolog of NCBI NO: 2293568 NR Description: HvB12D homolog [Oryza sativa]
  misc_feature (1)..(64): Homolog of NCBI NO: 4530585 NR Description: B12D protein [Ipomoea batatas]
  misc_feature (1)..(61): Homolog of NCBI NO: 15228342 NR Description: B12D-like protein
  misc_feature (1)..(61): Homolog of NCBI NO: 2130028 NR Description: B12D protein - barley
  misc_feature (1)..(63): Homolog of NCBI NO: 34395050 NR Description: putative B12D protein [Oryza sativa (japonica
MQLVRNITTNPEVRVTKENRAAGVLDNHDEGRRYARHPFRRFIDGKSAEIMPGINSFFTAPPKN

SEQ ID NO: 62974 - DNA, 1031 bp, Triticum aestivum
  misc_feature (1)..(1031): Ceres Seq. ID no. 15175015
accaacggcagggagagacccgaccagcgtcccacccaacgacccagcgtcgacctacctcctaccctcatccatccacccattgatccatcgattgatttggttggattaattgatccgcccccgccactcacgcgtcgccgcaatcgccgtccccgctcttcctcgtcgggacaccgcgttccccgtccgcagtctctgaccgcctctgccgcgcggatcgctggtccacgggcgggatggacaagctggtgcagttcgggaagaggcatggttcgtggtgcgggtcatgtccggctacgaggagaggaggatccggtcctacaggctgcagctgcagcagcgcctccagcaggctcaggctaagaagaaggagattgagaaacaaccagagcaagttattctgtcagaggttcgtcaagtggttcagcagatgcaagctctcaatcagcacctcgaagaagctgaaactgccatagatgagtatttcaaaccgatcgacaagaatgctcagatcttaatagacatgcaaatggagaaagaagagaagcaaatgaaggagatgctccaagtaatgcgaggccaaatacaaatgcaaagagaaatcgagacgatgaaagccgaggccagtgccgtggagcctgtcgacacccaagcgagtgcaacaacggctgagattcctccgaaacaagaaaacactaaatagatactgtccgctgttacgttttccataagctagttattatgtgcgcatggatggactctttacatgggctcttgctgggctaggtaataagtagggatctacggcaacacaactgccaattttgtacctcgggtggtattctttttcgctgggcagagtttctcgtcttcctgacccgtgttgtttcctgttcgagacggtaaatcatggaagctttgtgcaatttgatgtgggctgtgagttgtggaaactgcaccgtgtgcgtaaccaaaatttgagtcctgtcctaagtaggaagcacaattttaagtacttgggaagcttt

SEQ ID NO: 62975 - protein, 138 aa, Triticum aestivum
  peptide (1)..(138): Ceres Seq. ID no. 15175016
  misc_feature (1)..(124): Homolog of NCBI NO: 21618294 NR Description: unknown [Arabidopsis thaliana]
  misc_feature (1)..(124): Homolog of NCBI NO: 18414798 NR Description: expressed protein [Arabidopsis thaliana]
  misc_feature (1)..(138): Homolog of NCBI NO: 32488082 NR Description: OSJNBa0084A10.10 [Oryza sativa (japonica
MSGYEERRIRSYRLQLQQRLQQAQAKKKEIEKQPEQVILSEVRQVVQQMQALNQHLEEAETAIDEYFKPIDKNAQILIDMQMEKEEKQMKEMLQVMRGQIQMQREIETMKAEASAVEPVDTQASATTAEIPPKQENTK

SEQ ID NO: 62976 - protein, 121 aa, Triticum aestivum
  peptide (1)..(121): Ceres Seq. ID no. 15175017
TNGRERPDQRPTQRPSVDLPPTLIHPPIDPSIDLVGLIDPPPPLTRRRNRRPRSSSSGHRVPRPQSLTASAARIAGPRAGWTSWCSSGRGMVRGAGHVRLRGEEDPVLQAAAAAAPPAGSG

SEQ ID NO: 62977 - protein, 90 aa, Triticum aestivum
  peptide (1)..(90): Ceres Seq. ID no. 15175018
  misc_feature (1)..(76): Homolog of NCBI NO: 21618294 NR Description: unknown [Arabidopsis thaliana]
  misc_feature (1)..(76): Homolog of NCBI NO: 18414798 NR Description: expressed protein [Arabidopsis thaliana]
  misc_feature (1)..(90): Homolog of NCBI NO: 32488082 NR Description: OSJNBa0084A10.10 [Oryza sativa (japonica
MQALNQHLEEAETAIDEYFKPIDKNAQILIDMQMEKEEKQMKEMLQVMRGQIQMQREIETMKAEASAVEPVDTQASATTAEIPPKQENTK

SEQ ID NO: 62978 - DNA, 600 bp, Triticum aestivum
  misc_feature (1)..(600): Ceres Seq. ID no. 13596853
atttagagtccaccccctccccttcctcctctgttccacctcaccaaccgaaaccaaaccaaccaatctaccacccctctccaatggcaaccgcgcccacgtcgcaccagctcgccgccggggcgccctggagctccctcccccgcggcgggttccgggcgctcacggactccgcccccgcctccgtccgcttctccgtcggtcgccgccgcgccgcccgcctagaggtgaaagcagctggaaacatcttcggggactacttccaggttgcaacttatggagagtctcatggaggcggtgttggctgcgttatcagtggttgtccacccagaatcccactcacggaggaagacatgcaaggagaccttgatcgaaggcggccgggtcagagcagaataacaaccccaaggaaggagaccgatacttgtaaaatcctttcagggacatacgaaggaatgaccactgggacaccaattcatgttcttgtcccaaacacggatcaaagagggggtgattacactgaaatggctaaggcgtacagaccttcccatgcggatttaacttatgaccctcaaatacgtgttagatctgtgcagggag

SEQ ID NO: 62979 - protein, 199 aa, Triticum aestivum
  peptide (1)..(199): Ceres Seq. ID no. 13596854
  misc_feature (87)..(198): Pfam Name: Chorismate synthase Pfam Description: Chorismate synthase
  misc_feature (80)..(198): Homolog of NCBI NO: 47477 NR Description: ORFA partial (138 AA) [Synechocystis sp. PCC
  misc_feature (80)..(198): Homolog of NCBI NO: 17228292 NR Description: chorismate synthase [Nostoc sp. PCC 7120]
  misc_feature (80)..(198): Homolog of NCBI NO: 23126882 NR Description: hypothetical protein [Nostoc punctiforme]
  misc_feature (80)..(198): Homolog of NCBI NO: 22298006 NR Description: chorismate synthase [Thermosynechococcus
  misc_feature (44)..(198): Homolog of NCBI NO: 12229700 NR Description: Chorismate synthase, chloroplast precursor
  misc_feature (44)..(198): Homolog of NCBI NO: 11094811 NR Description: chorismate synthase precursor, putative, 3'
  misc_feature (28)..(198): Homolog of NCBI NO: 2492952 NR Description: Chorismate synthase 1, chloroplast precursor
  misc_feature (44)..(198): Homolog of NCBI NO: 18402389 NR Description: chorismate synthase
  misc_feature (27)..(198): Homolog of NCBI NO: 114182 NR Description: Chorismate synthase, chloroplast precursor
  misc_feature (28)..(198): Homolog of NCBI NO: 2492953 NR Description: Chorismate synthase 2, chloroplast precursor
LESTPSPSSSVPPHQPKPNQPIYHPSPMATAPTSHQLAAGAPWSSLPRGGFRALTDSAPASVRFSVGRRRAARLEVKAAGNIFGDYFQVATYGESHGGGVGCVISGCPPRIPLTEEDMQGDLDRRRPGQSRITTPRKETDTCKILSGTYEGMTTGTPIHVLVPNTDQRGGDYTEMAKAYRPSHADLTYDPQIRVRSVQG

SEQ ID NO: 62980 - protein, 172 aa, Triticum aestivum
  peptide (1)..(172): Ceres Seq. ID no. 13596855
  misc_feature (60)..(171): Pfam Name: Chorismate synthase Pfam Description: Chorismate synthase
  misc_feature (53)..(171): Homolog of NCBI NO: 47477 NR Description: ORFA partial (138 AA) [Synechocystis sp. PCC
  misc_feature (53)..(171): Homolog of NCBI NO: 17228292 NR Description: chorismate synthase [Nostoc sp. PCC 7120]
  misc_feature (53)..(171): Homolog of NCBI NO: 23126882 NR Description: hypothetical protein [Nostoc punctiforme]
  misc_feature (53)..(171): Homolog of NCBI NO: 22298006 NR Description: chorismate synthase [Thermosynechococcus
  misc_feature (17)..(171): Homolog of NCBI NO: 12229700 NR Description: Chorismate synthase, chloroplast precursor
  misc_feature (17)..(171): Homolog of NCBI NO: 11094811 NR Description: chorismate synthase precursor, putative, 3'
  misc_feature (1)..(171): Homolog of NCBI NO: 2492952 NR Description: Chorismate synthase 1, chloroplast precursor
  misc_feature (17)..(171): Homolog of NCBI NO: 18402389 NR Description: chorismate synthase
  misc_feature (1)..(171): Homolog of NCBI NO: 114182 NR Description: Chorismate synthase, chloroplast precursor
  misc_feature (1)..(171): Homolog of NCBI NO: 2492953 NR Description: Chorismate synthase 2, chloroplast precursor
MATAPTSHQLAAGAPWSSLPRGGFRALTDSAPASVRFSVGRRRAARLEVKAAGNIFGDYFQVATYGESHGGGVGCVISGCPPRIPLTEEDMQGDLDRRRPGQSRITTPRKETDTCKILSGTYEGMTTGTPIHVLVPNTDQRGGDYTEMAKAYRPSHADLTYDPQIRVRSVQG

SEQ ID NO: 62981 - protein, 122 aa, Triticum aestivum
  peptide (1)..(122): Ceres Seq. ID no. 13596856
FRVHPLPFLLCSTSPTETKPTNLPPLSNGNRAHVAPARRRGALELPPPRRVPGAHGLRPRLRPLLRRSPPRRPPRGESSWKHLRGLLPGCNLWRVSWRRCWLRYQWLSTQNPTHGGRHARRP

SEQ ID NO: 62982 - DNA, 1724 bp, Triticum aestivum
  misc_feature (1)..(1724): Ceres Seq. ID no. 14302438
aaaactgaacccaagggttcgctacccgcccccctcccatcctcgcgatggcggctgcgacggcgacggcggcaggagcagccgctgcggccgcctccatatccttgtttgcgtactacttcctcttcggcaggagcggctccaagttcctatgggcccgcaccaccagcgcggacgaccggaggacgcggcggaagggcctcgtggaggccgtcggcaacacgcccctcatccgcatcaacagcctctccgacgccaccgggtgtgagattctggggaaggccgaatttctgaacccgggaggcagcgtgaaggaccgtgtggcggttaagattatcgaggaggctctgaaatctggggatcttgtctgtggtggtgtagtaacagaagggagtgccggaagcacggctattagcttggccactgttgctcctgcttatggctgtaggtgccatgttgttattcctgatgatgctgccgttgagaagtctcaaataattgaagcgcttggagctactgtggaacgagtgcgtcctgtttcaatcactcacagagaccattttgtcaatattgcaagaagaagggcattggaagccaatatagcatcagcacaaagggaacctaatcacatacaaactaatggttcagcctatgttgatactaaaacgctgaactccaaacaaactaacgggtcagcacatgccagttctgaagtgcctgacactggcaaatgttaccctaattctgattcaaagggaggtttctttgctgaccagtttgagaatatggcaaactatcgagcgcattacgaatggactggtcctgagatatggaagcaaactaaagggactgttcatgcctttgttgctgccgctggtactggcggtacgattgctggagtttcacgatatcttaaggaaatgaacagaaatgtccaatgctttttaatggatccacctggatctggtctgtttaataaggtaactagaggggttatgtacacaaaagaggaggctgagggcaaaaggctgaaaaatccttttgacactattactgaaggaattggaatcaacagggtcacagcaaattttatgatggcagaactggatggcgcttaccggggaacagatagagaagctgtcgagatgtcaaggtttctgctgagaagagatggactatttgttgggagttcttcagccatgaattgtgtcggggctgtaagagttgcccgggatttaggtccaggacatacaattgtgacaattctctgcgacagtgggatgaggcatctaagtaagttcttcaatgatgaatatttggccaatcatgggttgacaccaactgctactggtctggagtttctcgatcaataaaaacttcacaggggaatgcatgatttcagcaattttgtcattcctcgttgtctgtcctgaaaacagttgatgagtgaacaccgaggcgccgaaacattccatctaacaagggaactgttggctccagataatggacctcaaattttatgtcaccctaattgaaggttcccctggaagatatagttatgtactttagagtagttgtcatagccatttagtaggggttgggatagccaaccattcagactgttgtacactgcaaatcttcttgtttttctttagcctgttgtacactgctcaagtcaccaattcatctatgtatacgcagttatttatacaatcatctatgcg

SEQ ID NO: 62983 - protein, 441 aa, Triticum aestivum
  peptide (1)..(441): Ceres Seq. ID no. 14302439
  misc_feature (52)..(410): Pfam Name: Pyridoxal-phosphate dependent enzyme Pfam Description: Pyridoxal-phosphate dependent enzyme
  misc_feature (49)..(205): Homolog of NCBI NO: 22979964 NR Description: hypothetical protein [Ralstonia metallidurans]
  misc_feature (240)..(429): Homolog of NCBI NO: 22979964 NR Description: hypothetical protein [Ralstonia metallidurans]
  misc_feature (49)..(205): Homolog of NCBI NO: 17548497 NR Description: PROBABLE CYSTEINE SYNTHASE A PROTEIN [Ralstonia
  misc_feature (234)..(429): Homolog of NCBI NO: 17548497 NR Description: PROBABLE CYSTEINE SYNTHASE A PROTEIN [Ralstonia
  misc_feature (49)..(182): Homolog of NCBI NO: 6321449 NR Description: Hypothetical ORF; Ygr012wp [Saccharomyces
  misc_feature (240)..(430): Homolog of NCBI NO: 6321449 NR Description: Hypothetical ORF; Ygr012wp [Saccharomyces
  misc_feature (50)..(182): Homolog of NCBI NO: 32422639 NR Description: hypothetical protein [Neurospora crassa]
  misc_feature (232)..(429): Homolog of NCBI NO: 32422639 NR Description: hypothetical protein [Neurospora crassa]
  misc_feature (1)..(439): Homolog of NCBI NO: 8778327 NR Description: F14J16.13 [Arabidopsis thaliana]
  misc_feature (44)..(439): Homolog of NCBI NO: 15222794 NR Description: pyridoxal-5'-phosphate-dependent enzyme, beta
MAAATATAAGAAAAAASISLFAYYFLFGRSGSKFLWARTTSADDRRTRRKGLVEAVGNTPLIRINSLSDATGCEILGKAEFLNPGGSVKDRVAVKIIEEALKSGDLVCGGVVTEGSAGSTAISLATVAPAYGCRCHVVIPDDAAVEKSQIIEALGATVERVRPVSITHRDHFVNIARRRALEANIASAQREPNHIQTNGSAYVDTKTLNSKQTNGSAHASSEVPDTGKCYPNSDSKGGFFADQFENMANYRAHYEWTGPEIWKQTKGTVHAFVAAAGTGGTIAGVSRYLKEMNRNVQCFLMDPPGSGLFNKVTRGVMYTKEEAEGKRLKNPFDTITEGIGINRVTANFMMAELDGAYRGTDREAVEMSRFLLRRDGLFVGSSSAMNCVGAVRVARDLGPGHTIVTILCDSGMRHLSKFFNDEYLANHGLTPTATGLEFLDQ

SEQ ID NO: 62984 - DNA, 869 bp, Triticum aestivum
  misc_feature (1)..(869): Ceres Seq. ID no. 13596932
cactagacgctcctccctatttagcaaatatgccatcctttgtggcgcgtcggaaaaaaccagagctcgtgctaccggcgcaagcaacaccgcacgagactctggctctctccgacgttgacgacgccatagacctgcgatttctgcagcctgccatcgagttctttcgtgctgtcgacatcgacattgatgaccacgggctggggcggcctgccacagctgccaaggtagtcaaggcggccctcgcgaaggctctggtgcactactacccgctggcaggccgtctccgggaggctgctgggggaaaactagccgtcgagtgcacaggggaaggcgtcgtgttcgtggaggcggaggcagacgtgtccatggatgagctcggcaagccgtcgcctctgccaccatacccgtgcgtggaagaactgttgtgcgaggtgggcgaccctagggttgttcttggagttcccttgttcttcatgcaggaggcactggacttccgatgggcgaagcgagttggcggcggcttacccatggtgggggacatctccttcgactctgtgagttgccacatgaggtgtaagaatggcaagggtcaggacgtgatcgtgataaacatgatattgccaggacctgcaatggacaagtttgagaaggagattgctgtttgggtgtgcaatggacaagacgaaaagtagtggtccggctcaattcgatcagcctcatacacccctactaaaataaaccccagcgagcaagtgcttaatcaccatgtcgttttgagtttgcgactatgtaggtgaggtcgtcgtaaatttgtaaacttctaaataaagtgccccctctcaataaattatgtttatgttaaacac

SEQ ID NO: 62985 - protein, 230 aa, Triticum aestivum
  peptide (1)..(230): Ceres Seq. ID no. 13596933
  misc_feature (12)..(160): Pfam Name: Transferase family Pfam Description: Transferase family
  misc_feature (10)..(163): Homolog of NCBI NO: 37530408 NR Description: putative hsr201 hypersensitivity-related protein
  misc_feature (163)..(219): Homolog of NCBI NO: 37535814 NR Description: putative hypersensitivity-related (hsr)protein
  misc_feature (13)..(160): Homolog of NCBI NO: 37535814 NR Description: putative hypersensitivity-related (hsr)protein
  misc_feature (10)..(160): Homolog of NCBI NO: 37530402 NR Description: putative hsr201 hypersensitivity-related protein
  misc_feature (160)..(223): Homolog of NCBI NO: 37530404 NR Description: putative hsr201 hypersensitivity-related protein
  misc_feature (50)..(160): Homolog of NCBI NO: 37530404 NR Description: putative hsr201 hypersensitivity-related protein
  misc_feature (163)..(230): Homolog of NCBI NO: 37532050 NR Description: putative acetyl transferase
  misc_feature (12)..(160): Homolog of NCBI NO: 37532050 NR Description: putative acetyl transferase
  misc_feature (168)..(223): Homolog of NCBI NO: 29027875 NR Description: putative acetyl transferase
  misc_feature (12)..(160): Homolog of NCBI NO: 29027875 NR Description: putative acetyl transferase
LDAPPYLANMPSFVARRKKPELVLPAQATPHETLALSDVDDAIDLRFLQPAIEFFRAVDIDIDDHGLGRPATAAKVVKAALAKALVHYYPLAGRLREAAGGKLAVECTGEGVVFVEAEADVSMDELGKPSPLPPYPCVEELLCEVGDPRVVLGVPLFFMQEALDFRWAKRVGGGLPMVGDISFDSVSCHMRCKNGKGQDVIVINMILPGPAMDKFEKEIAVWVCNGQDEK

SEQ ID NO: 62986 - protein, 221 aa, Triticum aestivum
  peptide (1)..(221): Ceres Seq. ID no. 13596934
  misc_feature (3)..(151): Pfam Name: Transferase family Pfam Description: Transferase family
  misc_feature (1)..(154): Homolog of NCBI NO: 37530408 NR Description: putative hsr201 hypersensitivity-related protein
  misc_feature (154)..(210): Homolog of NCBI NO: 37535814 NR Description: putative hypersensitivity-related (hsr)protein
  misc_feature (4)..(151): Homolog of NCBI NO: 37535814 NR Description: putative hypersensitivity-related (hsr)protein
  misc_feature (1)..(151): Homolog of NCBI NO: 37530402 NR Description: putative hsr201 hypersensitivity-related protein
  misc_feature (151)..(214): Homolog of NCBI NO: 37530404 NR Description: putative hsr201 hypersensitivity-related protein
  misc_feature (41)..(151): Homolog of NCBI NO: 37530404 NR Description: putative hsr201 hypersensitivity-related protein
  misc_feature (154)..(221): Homolog of NCBI NO: 37532050 NR Description: putative acetyl transferase
  misc_feature (3)..(151): Homolog of NCBI NO: 37532050 NR Description: putative acetyl transferase
  misc_feature (159)..(214): Homolog of NCBI NO: 29027875 NR Description: putative acetyl transferase
  misc_feature (3)..(151): Homolog of NCBI NO: 29027875 NR Description: putative acetyl transferase
MPSFVARRKKPELVLPAQATPHETLALSDVDDAIDLRFLQPAIEFFRAVDIDIDDHGLGRPATAAKVVKAALAKALVHYYPLAGRLREAAGGKLAVECTGEGVVFVEAEADVSMDELGKPSPLPPYPCVEELLCEVGDPRVVLGVPLFFMQEALDFRWAKRVGGGLPMVGDISFDSVSCHMRCKNGKGQDVIVINMILPGPAMDKFEKEIAVWVCNGQDEK

SEQ ID NO: 62987 - DNA, 473 bp, Triticum aestivum
  misc_feature (1)..(473): Ceres Seq. ID no. 12585230
acgtcgaaaccacgaccaagccaaaccaagcaagcaaccaagaagagattggtggatgagcctgaggtacatgatgagcatgagccgggtgggcgcgcgggcggcgctggccgtgcgggacaccgtcggcaggtccgccggcaaggccgacagggcgcaggcgccagcgcagcagcaggccatggccagggccggcagggcgccggcggagtcggcgcgggccaaggcaccgctggccaggagggccgccgaggagcggcggaggcgggcggcgcaggaggagtcgctccgcaccgtcatgttcctctccatgtggggccccaacgcctagcaccaaattagtattaccgattagcagtgtgcgtgcacatggtttacgtgccgtgtggttaagtgactctaagtttgcaaatctgtgcgtacaagccgaatgtaaagtaatacagttttgctaaagcacgtctaaatgtgcc

SEQ ID NO: 62988 - protein, 113 aa, Triticum aestivum
  peptide (1)..(113): Ceres Seq. ID no. 12585231
  misc_feature (29)..(87): Pfam Name: Collagen triple helix repeat (20 copies) Pfam Description: Collagen triple helix repeat (20 copies)
  misc_feature (33)..(94): Homolog of NCBI NO: 17063211 NR Description: dragline silk protein [Nephila clavipes]
  misc_feature (30)..(94): Homolog of NCBI NO: 9625624 NR Description: nuclear antigen EBNA1 [Human herpesvirus 4]
  misc_feature (33)..(94): Homolog of NCBI NO: 2914731 NR Description: dragline silk protein spidroin 1 [Nephila
  misc_feature (33)..(107): Homolog of NCBI NO: 13561998 NR Description: major ampullate spidroin 1 [Latrodectus
  misc_feature (33)..(93): Homolog of NCBI NO: 27261403 NR Description: fiber protein DP1B [synthetic construct]
  misc_feature (33)..(94): Homolog of NCBI NO: 2911274 NR Description: spidroin 1 [Nephila clavipes]
  misc_feature (31)..(94): Homolog of NCBI NO: 9625624 NR Description: nuclear antigen EBNA1 [Human herpesvirus 4]
  misc_feature (33)..(96): Homolog of NCBI NO: 1263285 NR Description: fibroin-2
  misc_feature (33)..(94): Homolog of NCBI NO: 13561998 NR Description: major ampullate spidroin 1 [Latrodectus
  misc_feature (33)..(94): Homolog of NCBI NO: 13561998 NR Description: major ampullate spidroin 1 [Latrodectus
TSKPRPSQTKQATKKRLVDEPEVHDEHEPGGRAGGAGRAGHRRQVRRQGRQGAGASAAAGHGQGRQGAGGVGAGQGTAGQEGRRGAAEAGGAGGVAPHRHVPLHVGPQRLAPN

SEQ ID NO: 62989 - protein, 109 aa, Triticum aestivum
  peptide (1)..(109): Ceres Seq. ID no. 12585232
  misc_feature (19)..(108): Homolog of NCBI NO: 38344796 NR Description: OSJNBa0043L09.16 [Oryza sativa (japonica
RRNHDQAKPSKQPRRDWWMSLRYMMSMSRVGARAALAVRDTVGRSAGKADRAQAPAQQQAMARAGRAPAESARAKAPLARRAAEERRRRAAQEESLRTVMFLSMWGPNA

SEQ ID NO: 62990 - protein, 91 aa, Triticum aestivum
  peptide (1)..(91): Ceres Seq. ID no. 12585233
  misc_feature (1)..(90): Homolog of NCBI NO: 38344796 NR Description: OSJNBa0043L09.16 [Oryza sativa (japonica
MSLRYMMSMSRVGARAALAVRDTVGRSAGKADRAQAPAQQQAMARAGRAPAESARAKAPLARRAAEERRRRAAQEESLRTVMFLSMWGPNA

SEQ ID NO: 62991 - DNA, 1162 bp, Triticum aestivum
  misc_feature (1)..(1162): Ceres Seq. ID no. 12585528
aatatctgctcatttatccccacaaagtcgagaggaagaaccctaggtacacctcatggagaacgccaaccaaggtgtggatccgcacgtgcttgatatagtcaattgcccggattgtggaaggcgggtggtgacgtttgtggcgaggcgcagccagtttgcgggcaagaggttctacaagtgccgcaaccacaacctggggagaggcgggtgtgatttctattggtggcaacaagcatatgcggagcacttggctgggcttggaccagtcgtgcctccattggcgcagatcaatcagggagaaaatggcatcggaggagcagatcaaggtggtcagatgcagccggcggatctagcaggaggccagtagatcggagggctggatgcctccaacatggcatccacggcggcccgatgttgcaaggtcttcgatccacgtggtggctgttggtcggcgtcaggaagccacaactcttgatcccgcatttatcaatatggtcatgtctgtcgggcaatatggctatttgcgttgccatcctttactggttgtggctgcaaatccgtgatcgatgcgcttgatgagtcgatccaatattagcagcttatggatgcttagtaggtgtcaagggttaagtagtattagcggtgtgcgcgtgttagccatatgcttttggcttggtaaccttgttgcttgtatgtttggacctatggctaacacgcgctccgcgagatccgcaagtaccagaagagcacggagctgctcatccgcaagctccccttccagcgcctcgtccgcgagatcgcccaggacttcaagaccgacctccgcttccagtcctccgccgtctccgcactgcaggaggccgccgaggcctacctcgtcggcctcttcgaggacaccaacctctgcgccatccacgccaagcgcgtcaccatcatgcccaaggacatccagctcgcccgccgcatccgtggcgagagggcctaggctgctccgtgcgcgtcgtcgtgtgttagatccaccttagccgttgttcagcggtcgagatgtgcgtgctcgtagtgtttgtttgtgccatggtggatgtagtgtgcctgatctgatgtcaccatcttgctgtcatcagtaatttaaatgaaaatgttggcggtctgttctaag

SEQ ID NO: 62992 - protein, 152 aa, Triticum aestivum
  peptide (1)..(152): Ceres Seq. ID no. 12585529
  misc_feature (64)..(143): Pfam Name: Mucin-like glycoprotein Pfam Description: Mucin-like glycoprotein
  misc_feature (46)..(139): Homolog of NCBI NO: 11359723 NR Description: proteophosphoglycan, membrane-associated
  misc_feature (46)..(139): Homolog of NCBI NO: 11359723 NR Description: proteophosphoglycan, membrane-associated
  misc_feature (46)..(139): Homolog of NCBI NO: 11359723 NR Description: proteophosphoglycan, membrane-associated
  misc_feature (46)..(152): Homolog of NCBI NO: 11359723 NR Description: proteophosphoglycan, membrane-associated
  misc_feature (32)..(148): Homolog of NCBI NO: 24762383 NR Description: CG12491-PA [Drosophila melanogaster]
  misc_feature (46)..(139): Homolog of NCBI NO: 11359723 NR Description: proteophosphoglycan, membrane-associated
  misc_feature (109)..(143): Homolog of NCBI NO: 12847552 NR Description: unnamed protein product [Mus musculus]
MRLMSRSNISSLWMLSRCQGLSSISGVRVLAICFWLGNLVACMFGPMANTRSARSASTRRARSCSSASSPSSASSARSPRTSRPTSASSPPPSPHCRRPPRPTSSASSRTPTSAPSTPSASPSCPRTSSSPAASVARGPRLLRARRRVLDPP

SEQ ID NO: 62993 - protein, 149 aa, Triticum aestivum
  peptide (1)..(149): Ceres Seq. ID no. 12585530
  misc_feature (61)..(140): Pfam Name: Mucin-like glycoprotein Pfam Description: Mucin-like glycoprotein
  misc_feature (43)..(136): Homolog of NCBI NO: 11359723 NR Description: proteophosphoglycan, membrane-associated
  misc_feature (43)..(136): Homolog of NCBI NO: 11359723 NR Description: proteophosphoglycan, membrane-associated
  misc_feature (43)..(136): Homolog of NCBI NO: 11359723 NR Description: proteophosphoglycan, membrane-associated
  misc_feature (43)..(149): Homolog of NCBI NO: 11359723 NR Description: proteophosphoglycan, membrane-associated
  misc_feature (29)..(145): Homolog of NCBI NO: 24762383 NR Description: CG12491-PA [Drosophila melanogaster]
  misc_feature (43)..(136): Homolog of NCBI NO: 11359723 NR Description: proteophosphoglycan, membrane-associated
  misc_feature (106)..(140): Homolog of NCBI NO: 12847552 NR Description: unnamed protein product [Mus musculus]
MSRSNISSLWMLSRCQGLSSISGVRVLAICFWLGNLVACMFGPMANTRSARSASTRRARSCSSASSPSSASSARSPRTSRPTSASSPPPSPHCRRPPRPTSSASSRTPTSAPSTPSASPSCPRTSSSPAASVARGPRLLRARRRVLDPP

SEQ ID NO: 62994 - protein, 139 aa, Triticum aestivum
  peptide (1)..(139): Ceres Seq. ID no. 12585531
  misc_feature (51)..(130): Pfam Name: Mucin-like glycoprotein Pfam Description: Mucin-like glycoprotein
  misc_feature (33)..(126): Homolog of NCBI NO: 11359723 NR Description: proteophosphoglycan, membrane-associated
  misc_feature (33)..(126): Homolog of NCBI NO: 11359723 NR Description: proteophosphoglycan, membrane-associated
  misc_feature (33)..(126): Homolog of NCBI NO: 11359723 NR Description: proteophosphoglycan, membrane-associated
  misc_feature (33)..(139): Homolog of NCBI NO: 11359723 NR Description: proteophosphoglycan, membrane-associated
  misc_feature (19)..(135): Homolog of NCBI NO: 24762383 NR Description: CG12491-PA [Drosophila melanogaster]
  misc_feature (33)..(126): Homolog of NCBI NO: 11359723 NR Description: proteophosphoglycan, membrane-associated
  misc_feature (96)..(130): Homolog of NCBI NO: 12847552 NR Description: unnamed protein product [Mus musculus]
MLSRCQGLSSISGVRVLAICFWLGNLVACMFGPMANTRSARSASTRRARSCSSASSPSSASSARSPRTSRPTSASSPPPSPHCRRPPRPTSSASSRTPTSAPSTPSASPSCPRTSSSPAASVARGPRLLRARRRVLDPP

SEQ ID NO: 62995 - protein, 104 aa, Triticum aestivum
  peptide (1)..(104): Ceres Seq. ID no. 12585532
MENANQGVDPHVLDIVNCPDCGRRVVTFVARRSQFAGKRFYKCRNHNLGRGGCDFYWWQQAYAEHLAGLGPVVPPLAQINQGENGIGGADQGGQMQPADLAGGQ

SEQ ID NO: 62996 - DNA, 789 bp, Triticum aestivum
  misc_feature (1)..(789): Ceres Seq. ID no. 13655108
acacaagtccggcgagcttctctctgatagtcctactcctgcagccccaagtctccgtcgcagcagcatccccatggccagcctcaacaacgcttcctggtccagcggcctctgcggctgcttcgacgacgtcggcggctgctgcctgacgttcttctgcccgtgcgtcgtcttcgggaggatcgccgagatcgtcgacatgggcgccacatcttgctgtgcgagcgggacggtgtacaccgcgctggcgtcgatgacggggatgggctgcttctactcctgcggctaccgctccaggctgcgggagcagtaccggctcaaggagacgccctgcggcgactgctgcgtccactggttctgcgaggcctgcgcgctctgccaggagtaccgcgagctcaagtcccgcggcttcgacatggccctcggatggcaggccaacatggagaagatggggaagaccacggcgccgcagacgcacgcggggatgactcgctagagcatccatgcggccaccgacgatgaatccattccatggtcgtcaatgtcagcttccagctcaagatgaagaatgccaccagtgtacggcgtctacttatgtcttgtcgcgagtcggtttgtgtttgtgatcgatgtgtagtgtgcctttctgttgttgtaaatcgtcgtttcccatccgtccacctccaccatctgtgatgtttatgtggacatttgaataaaagatgtatcggtcgggtctgtctgtggaagcagagtccatcatcgccctataattatgctttgaatttt

SEQ ID NO: 62997 - protein, 164 aa, Triticum aestivum
  peptide (1)..(164): Ceres Seq. ID no. 13655109
  misc_feature (33)..(133): Pfam Name: Protein of unknown function, DUF614 Pfam Description: Protein of unknown function, DUF614
  misc_feature (9)..(92): Homolog of NCBI NO: 31249752 NR Description: hypothetical protein [Oryza sativa (japonica
  misc_feature (86)..(164): Homolog of NCBI NO: 38567706 NR Description: B1358B12.4 [Oryza sativa (japonica
  misc_feature (14)..(149): Homolog of NCBI NO: 34897274 NR Description: hypothetical protein [Oryza sativa (japonica
  misc_feature (31)..(164): Homolog of NCBI NO: 27414003 NR Description: fw2.2 [Lycopersicon cheesmanii]
  misc_feature (25)..(164): Homolog of NCBI NO: 4105794 NR Description: PGPS/D12 [Petunia x hybrida]
  misc_feature (31)..(164): Homolog of NCBI NO: 27414017 NR Description: fw2.2 [Lycopersicon pennellii]
  misc_feature (31)..(164): Homolog of NCBI NO: 27414005 NR Description: fw2.2 [Lycopersicon pimpinellifolium]
  misc_feature (31)..(164): Homolog of NCBI NO: 8272628 NR Description: ORFX [Lycopersicon pennellii]
  misc_feature (31)..(164): Homolog of NCBI NO: 8272626 NR Description: ORFX [Lycopersicon esculentum]
  misc_feature (14)..(161): Homolog of NCBI NO: 34897270 NR Description: hypothetical protein [Oryza sativa (japonica
HKSGELLSDSPTPAAPSLRRSSIPMASLNNASWSSGLCGCFDDVGGCCLTFFCPCVVFGRIAEIVDMGATSCCASGTVYTALASMTGMGCFYSCGYRSRLREQYRLKETPCGDCCVHWFCEACALCQEYRELKSRGFDMALGWQANMEKMGKTTAPQTHAGMTR

SEQ ID NO: 62998 - protein, 140 aa, Triticum aestivum
  peptide (1)..(140): Ceres Seq. ID no. 13655110
  misc_feature (9)..(109): Pfam Name: Protein of unknown function, DUF614 Pfam Description: Protein of unknown function, DUF614
  misc_feature (1)..(68): Homolog of NCBI NO: 31249752 NR Description: hypothetical protein [Oryza sativa (japonica
  misc_feature (62)..(140): Homolog of NCBI NO: 38567706 NR Description: B1358B12.4 [Oryza sativa (japonica
  misc_feature (1)..(125): Homolog of NCBI NO: 34897274 NR Description: hypothetical protein [Oryza sativa (japonica
  misc_feature (7)..(140): Homolog of NCBI NO: 27414003 NR Description: fw2.2 [Lycopersicon cheesmanii]
  misc_feature (1)..(140): Homolog of NCBI NO: 4105794 NR Description: PGPS/D12 [Petunia x hybrida]
  misc_feature (7)..(140): Homolog of NCBI NO: 27414017 NR Description: fw2.2 [Lycopersicon pennellii]
  misc_feature (7)..(140): Homolog of NCBI NO: 27414005 NR Description: fw2.2 [Lycopersicon pimpinellifolium]
  misc_feature (7)..(140): Homolog of NCBI NO: 8272628 NR Description: ORFX [Lycopersicon pennellii]
  misc_feature (7)..(140): Homolog of NCBI NO: 8272626 NR Description: ORFX [Lycopersicon esculentum]
  misc_feature (1)..(137): Homolog of NCBI NO: 34897270 NR Description: hypothetical protein [Oryza sativa (japonica
MASLNNASWSSGLCGCFDDVGGCCLTFFCPCVVFGRIAEIVDMGATSCCASGTVYTALASMTGMGCFYSCGYRSRLREQYRLKETPCGDCCVHWFCEACALCQEYRELKSRGFDMALGWQANMEKMGKTTAPQTHAGMTR

SEQ ID NO: 62999 - protein, 98 aa, Triticum aestivum
  peptide (1)..(98): Ceres Seq. ID no. 13655111
  misc_feature (1)..(67): Pfam Name: Protein of unknown function, DUF614 Pfam Description: Protein of unknown function, DUF614
  misc_feature (1)..(26): Homolog of NCBI NO: 31249752 NR Description: hypothetical protein [Oryza sativa (japonica
  misc_feature (20)..(98): Homolog of NCBI NO: 38567706 NR Description: B1358B12.4 [Oryza sativa (japonica
  misc_feature (1)..(83): Homolog of NCBI NO: 34897274 NR Description: hypothetical protein [Oryza sativa (japonica
  misc_feature (1)..(98): Homolog of NCBI NO: 27414003 NR Description: fw2.2 [Lycopersicon cheesmanii]
  misc_feature (1)..(98): Homolog of NCBI NO: 4105794 NR Description: PGPS/D12 [Petunia x hybrida]
  misc_feature (1)..(98): Homolog of NCBI NO: 27414017 NR Description: fw2.2 [Lycopersicon pennellii]
  misc_feature (1)..(98): Homolog of NCBI NO: 27414005 NR Description: fw2.2 [Lycopersicon pimpinellifolium]
  misc_feature (1)..(98): Homolog of NCBI NO: 8272628 NR Description: ORFX [Lycopersicon pennellii]
  misc_feature (1)..(98): Homolog of NCBI NO: 8272626 NR Description: ORFX [Lycopersicon esculentum]
  misc_feature (1)..(95): Homolog of NCBI NO: 34897270 NR Description: hypothetical protein [Oryza sativa (japonica
MGATSCCASGTVYTALASMTGMGCFYSCGYRSRLREQYRLKETPCGDCCVHWFCEACALCQEYRELKSRGFDMALGWQANMEKMGKTTAPQTHAGMTR

SEQ ID NO: 63000 - DNA, 1061 bp, Triticum aestivum
  misc_feature (1)..(1061): Ceres Seq. ID no. 13596727
tacctagaacatcctaatcgaaaaaatagtccttcgcctgagccgctgaacccgaaccgaaccattttcactctctaaaccctacgccctcctccgccgccgcatccggccacccttcgccgccgcatccgaccatgggtagcaggctgggccgccgcgtgctccacttcgccaacctccccatcaagctcatgctccccccggcccccctatcctccgtccaggagttcgctgtcaggaccgtcccctccgcctccaaggtcgacatccgccgctgcctcgagtccgtctacggcttctccatcgccgaagtccgcaccctcaacatggagggaaagaagcaccgccgaggacccttcctcgccgccaagccagactacaagaaggcctacgtcactcttcaggccccgctctccgtttcccccgacatcttccccatcggcgcgatcctcggggagagggaacggaaggccagcgcagccgcggcgaggaggaaggttgtggaaggggcagaggtcgagggggagagggaggggaaggggaaacattggatggaggacgagagggagggcttctccagggccggatgcggcaagatcgtgtatgggaaccctgggaggctggggaacaagaggaggggacgtgccagggcgaatgagcaagctgacgaaaaggggggaaacttcccgtggaacgggatgcagctggctaccgagaaacctgctaggaaaagacactatcctcccaaggcacagggaggcatggtcttgaagcagagatcacacaggggatcagcgctgcgtggaaagagttgagttgtcgtcgcctcaaccatgagagagcaccgcgccatgaaacgcgatgcagtacgtgcatccatgactaatccgccagatccatgccgttttgcagtcacacaataaagatgcgttgatttagtatttataattggctttggttcccttttactttgctattaaagcgtgtagtgatttcagtctctcatgcacatggctggttacaatgtaacagcatttccttatctaaatttgattgtcttc

SEQ ID NO: 63001 - protein, 226 aa, Triticum aestivum
  peptide (1)..(226): Ceres Seq. ID no. 13596728
  misc_feature (8)..(102): Pfam Name: Ribosomal protein L23 Pfam Description: Ribosomal protein L23
  misc_feature (1)..(190): Homolog of NCBI NO: 21554117 NR Description: unknown [Arabidopsis thaliana]
  misc_feature (1)..(190): Homolog of NCBI NO: 15236061 NR Description: expressed protein [Arabidopsis thaliana]
  misc_feature (1)..(223): Homolog of NCBI NO: 34394046 NR Description: unknown protein [Oryza sativa (japonica
MGSRLGRRVLHFANLPIKLMLPPAPLSSVQEFAVRTVPSASKVDIRRCLESVYGFSIAEVRTLNMEGKKHRRGPFLAAKPDYKKAYVTLQAPLSVSPDIFPIGAILGERERKASAAAARRKVVEGAEVEGEREGKGKHWMEDEREGFSRAGCGKIVYGNPGRLGNKRRGRARANEQADEKGGNFPWNGMQLATEKPARKRHYPPKAQGGMVLKQRSHRGSALRGKS

SEQ ID NO: 63002 - protein, 207 aa, Triticum aestivum
  peptide (1)..(207): Ceres Seq. ID no. 13596729
  misc_feature (1)..(83): Pfam Name: Ribosomal protein L23 Pfam Description: Ribosomal protein L23
  misc_feature (1)..(171): Homolog of NCBI NO: 21554117 NR Description: unknown [Arabidopsis thaliana]
  misc_feature (1)..(171): Homolog of NCBI NO: 15236061 NR Description: expressed protein [Arabidopsis thaliana]
  misc_feature (1)..(204): Homolog of NCBI NO: 34394046 NR Description: unknown protein [Oryza sativa (japonica
MLPPAPLSSVQEFAVRTVPSASKVDIRRCLESVYGFSIAEVRTLNMEGKKHRRGPFLAAKPDYKKAYVTLQAPLSVSPDIFPIGAILGERERKASAAAARRKVVEGAEVEGEREGKGKHWMEDEREGFSRAGCGKIVYGNPGRLGNKRRGRARANEQADEKGGNFPWNGMQLATEKPARKRHYPPKAQGGMVLKQRSHRGSALRGKS

SEQ ID NO: 63003 - protein, 162 aa, Triticum aestivum
  peptide (1)..(162): Ceres Seq. ID no. 13596730
  misc_feature (1)..(126): Homolog of NCBI NO: 21554117 NR Description: unknown [Arabidopsis thaliana]
  misc_feature (1)..(126): Homolog of NCBI NO: 15236061 NR Description: expressed protein [Arabidopsis thaliana]
  misc_feature (1)..(159): Homolog of NCBI NO: 34394046 NR Description: unknown protein [Oryza sativa (japonica
MEGKKHRRGPFLAAKPDYKKAYVTLQAPLSVSPDIFPIGAILGERERKASAAAARRKVVEGAEVEGEREGKGKHWMEDEREGFSRAGCGKIVYGNPGRLGNKRRGRARANEQADEKGGNFPWNGMQLATEKPARKRHYPPKAQGGMVLKQRSHRGSALRGKS

SEQ ID NO: 63004 - DNA, 977 bp, Triticum aestivum
  misc_feature (1)..(977): Ceres Seq. ID no. 13655287
ctccactcccgcaacccgctgctcctctcctggtgcgccgctcgacctcctcctttctcccactcaggtgcgccgccggccggccctcttcctctctccctccctctcaggatacaagtggaacaaggcatgggtgtaggtgctactcaggcgaagcacaccctcctctcctaaggaaatcatcgagcgagcaaggcccacttctaatgctcgttgcgtcctccccgattcccacccgtctcttcttcatagcgagcaccggtggcggctggtagagaggcgagccgagaggtgcagcgggctacaagtggagagatcaagcgagcgatgggccggaggatcctcaacgacgcgctgcgcacgatggtgaacgcggagcggcgggggaaggctacggcgcaactccagcccatctccggcgtcatgatctcgttcctcaatatcatgaagcaccgaggttacataaaaaatttcgacgtattcgatccacatagggttggaaaaatcaccgtggaacttcagggaaggattaaagattgcaaagctctcacttacaggcaggacctcagagccacggaaatagaaaaatacagaactaggatgcttccaacacggcagtggggctatgttgtggtgaccaccccaaatggcgttttagatcacgaggaagcaattaggcagaatgtgggcggccaggtcctcggttacttccattgaggaggaaacacagttatcccatgccgaatcagccctgggctgcattgtttatctttctgttatgactgaggtcattttatttggacatttagagcttgctgcttttgttcatggccaacagaaaatgggattacatgtcaaaagtagtatgtctggcgacactgacataaatattgtaatccttctttgggacagatatttctgtaggcgtaatacacccatgtactttgagatacacgagtaacattctagttcgagct

SEQ ID NO: 63005 - protein, 129 aa, Triticum aestivum
  peptide (1)..(129): Ceres Seq. ID no. 13655288
  misc_feature (6)..(129): Pfam Name: Ribosomal protein S8 Pfam Description: Ribosomal protein S8
  misc_feature (5)..(129): Homolog of NCBI NO: 2130985 NR Description: r-protein BnS15a [Brassica napus]
  misc_feature (5)..(129): Homolog of NCBI NO: 15231316 NR Description: 40S ribosomal protein S15A (RPS15aD) [Arabidopsis
  misc_feature (5)..(129): Homolog of NCBI NO: 15225502 NR Description: 40S ribosomal protein S15A (RPS15aC) [Arabidopsis
  misc_feature (5)..(129): Homolog of NCBI NO: 6683481 NR Description: wrp15a [Citrullus lanatus]
  misc_feature (5)..(129): Homolog of NCBI NO: 15223001 NR Description: 40S ribosomal protein S15A (RPS15aA) [Arabidopsis
  misc_feature (5)..(129): Homolog of NCBI NO: 133793 NR Description: 40S RIBOSOMAL PROTEIN S15A (PPCB8)
  misc_feature (5)..(129): Homolog of NCBI NO: 13560779 NR Description: cytoplasmic ribosomal protein S15a [Daucus carota]
  misc_feature (5)..(129): Homolog of NCBI NO: 28411802 NR Description: ribosomal protein S15 [Oryza sativa (japonica
  misc_feature (1)..(129): Homolog of NCBI NO: 15224834 NR Description: 40S ribosomal protein S15A (RPS15aB) [Arabidopsis
  misc_feature (1)..(129): Homolog of NCBI NO: 15233571 NR Description: 40S ribosomal protein S15A (RPS15aE) [Arabidopsis
MGRRILNDALRTMVNAERRGKATAQLQPISGVMISFLNIMKHRGYIKNFDVFDPHRVGKITVELQGRIKDCKALTYRQDLRATEIEKYRTRMLPTRQWGYVVVTTPNGVLDHEEAIRQNVGGQVLGYFH

SEQ ID NO: 63006 - protein, 117 aa, Triticum aestivum
  peptide (1)..(117): Ceres Seq. ID no. 13655289
  misc_feature (1)..(117): Pfam Name: Ribosomal protein S8 Pfam Description: Ribosomal protein S8
  misc_feature (1)..(117): Homolog of NCBI NO: 2130985 NR Description: r-protein BnS15a [Brassica napus]
  misc_feature (1)..(117): Homolog of NCBI NO: 15231316 NR Description: 40S ribosomal protein S15A (RPS15aD) [Arabidopsis
  misc_feature (1)..(117): Homolog of NCBI NO: 15225502 NR Description: 40S ribosomal protein S15A (RPS15aC) [Arabidopsis
  misc_feature (1)..(117): Homolog of NCBI NO: 6683481 NR Description: wrp15a [Citrullus lanatus]
  misc_feature (1)..(117): Homolog of NCBI NO: 15223001 NR Description: 40S ribosomal protein S15A (RPS15aA) [Arabidopsis
  misc_feature (1)..(117): Homolog of NCBI NO: 133793 NR Description: 40S RIBOSOMAL PROTEIN S15A (PPCB8)
  misc_feature (1)..(117): Homolog of NCBI NO: 13560779 NR Description: cytoplasmic ribosomal protein S15a [Daucus carota]
  misc_feature (1)..(117): Homolog of NCBI NO: 28411802 NR Description: ribosomal protein S15 [Oryza sativa (japonica
  misc_feature (1)..(117): Homolog of NCBI NO: 15224834 NR Description: 40S ribosomal protein S15A (RPS15aB) [Arabidopsis
  misc_feature (1)..(117): Homolog of NCBI NO: 15233571 NR Description: 40S ribosomal protein S15A (RPS15aE) [Arabidopsis
MVNAERRGKATAQLQPISGVMISFLNIMKHRGYIKNFDVFDPHRVGKITVELQGRIKDCKALTYRQDLRATEIEKYRTRMLPTRQWGYVVVTTPNGVLDHEEAIRQNVGGQVLGYFH

SEQ ID NO: 63007 - protein, 97 aa, Triticum aestivum
  peptide (1)..(97): Ceres Seq. ID no. 13655290
  misc_feature (1)..(97): Pfam Name: Ribosomal protein S8 Pfam Description: Ribosomal protein S8
  misc_feature (1)..(97): Homolog of NCBI NO: 2130985 NR Description: r-protein BnS15a [Brassica napus]
  misc_feature (1)..(97): Homolog of NCBI NO: 15231316 NR Description: 40S ribosomal protein S15A (RPS15aD) [Arabidopsis
  misc_feature (1)..(97): Homolog of NCBI NO: 15225502 NR Description: 40S ribosomal protein S15A (RPS15aC) [Arabidopsis
  misc_feature (1)..(97): Homolog of NCBI NO: 6683481 NR Description: wrp15a [Citrullus lanatus]
  misc_feature (1)..(97): Homolog of NCBI NO: 15223001 NR Description: 40S ribosomal protein S15A (RPS15aA) [Arabidopsis
  misc_feature (1)..(97): Homolog of NCBI NO: 133793 NR Description: 40S RIBOSOMAL PROTEIN S15A (PPCB8)
  misc_feature (1)..(97): Homolog of NCBI NO: 13560779 NR Description: cytoplasmic ribosomal protein S15a [Daucus carota]
  misc_feature (1)..(97): Homolog of NCBI NO: 28411802 NR Description: ribosomal protein S15 [Oryza sativa (japonica
  misc_feature (1)..(97): Homolog of NCBI NO: 15224834 NR Description: 40S ribosomal protein S15A (RPS15aB) [Arabidopsis
  misc_feature (1)..(97): Homolog of NCBI NO: 15233571 NR Description: 40S ribosomal protein S15A (RPS15aE) [Arabidopsis
MISFLNIMKHRGYIKNFDVFDPHRVGKITVELQGRIKDCKALTYRQDLRATEIEKYRTRMLPTRQWGYVVVTTPNGVLDHEEAIRQNVGGQVLGYFH

SEQ ID NO: 63008 - DNA, 1031 bp, Triticum aestivum
  misc_feature (1)..(1031): Ceres Seq. ID no. 13598257
ttttttcaaccagacaccgcccctcttcttgctctctgctctcctctcctctcctcttctctcctctcccacacgcgtcctaaagcaagcaagctcggacgccatgagcaaggactgcggcaaccacggcgaggacgacatccggcgcacgtgccggcgcttcctggccttcctcttcttcctggccctggtggtggccgtcatcgccctcatcgtctacctcgtcctccgccccacgcacccgcgcttctatctccaggacgcctcgctccggcagctggacgtgctcaccgccaacgcctccgccgcggcgggcgtgctctccaccgtgctccaggtcaccgtcgcctcccgcaaccccaacgaccgcgtcggcgtctactacgaccgcctcgacgtctacgcctcctacaagtaccagcagatcacgctggcctccgcgctcccgccggtgtaccagggccacggcgacgtcgaggtgtggtccccggtgctctccggcccgaacgtccccttcgcgccctacctcgccgacgcgctcgccaaggacgtccaggccgggtacctcatcctccaggtgaagatcgacggccgcgtccggtggaaggtgggcagctggatctccggccactaccacatcttcgtgacctgccccgccttcctcatcggcaccggcggcaacggcgcgcccggggccaacgggctcaggttccagaccgccacctactgccacgtcgaggtctagccgtccgtccgtacgtgctctgcttcctcttcttcttcgtcatcttcctctgctccgtcggcggcggcgaggtaggtttcttgcgggtggcgcgcgcgcgtgcgcgtagccaagaagatcatcaaggctgaaggccaagggggtggtacatggtggtaataagtgttagcgtcgaggggtataggtgtaaaaaggaaaagagaatttagtgttggttactcctactaaattgtgttttgctcgtttttaattgttggtaaggtatttattccacgtttaattgtcg

SEQ ID NO: 63009 - protein, 291 aa, Triticum aestivum
  peptide (1)..(291): Ceres Seq. ID no. 13598258
  misc_feature (38)..(206): Pfam Name: Herpesvirus UL87 family Pfam Description: Herpesvirus UL87 family
FFQPDTAPLLALCSPLLSSSLLSHTRPKASKLGRHEQGLRQPRRGRHPAHVPALPGLPLLPGPGGGRHRPHRLPRPPPHAPALLSPGRLAPAAGRAHRQRLRRGGRALHRAPGHRRLPQPQRPRRRLLRPPRRLRLLQVPADHAGLRAPAGVPGPRRRRGVVPGALRPERPLRALPRRRARQGRPGRVPHPPGEDRRPRPVEGGQLDLRPLPHLRDLPRLPHRHRRQRRARGQRAQVPDRHLLPRRGLAVRPYVLCFLFFFVIFLCSVGGGEVGFLRVARARARSQEDHQG

SEQ ID NO: 63010 - protein, 247 aa, Triticum aestivum
  peptide (1)..(247): Ceres Seq. ID no. 13598259
  misc_feature (36)..(245): Homolog of NCBI NO: 15233951 NR Description: harpin-induced protein 1 family (HIN1)
  misc_feature (36)..(247): Homolog of NCBI NO: 15240001 NR Description: harpin-induced protein, putative (HIN1)
  misc_feature (36)..(247): Homolog of NCBI NO: 15227538 NR Description: harpin-induced protein 1 family (HIN1)
  misc_feature (39)..(247): Homolog of NCBI NO: 22326984 NR Description: harpin-induced protein 1 family (HIN1)
  misc_feature (35)..(247): Homolog of NCBI NO: 15231227 NR Description: harpin-induced protein 1 family (HIN1)
  misc_feature (37)..(247): Homolog of NCBI NO: 18399308 NR Description: harpin-induced protein 1 family (HIN1)
  misc_feature (37)..(247): Homolog of NCBI NO: 28392929 NR Description: putative VAMP protein SEC22 [Arabidopsis thaliana]
  misc_feature (37)..(247): Homolog of NCBI NO: 15229906 NR Description: harpin-induced protein 1 family (HIN1)
  misc_feature (37)..(247): Homolog of NCBI NO: 38637038 NR Description: harpin-induced protein 1 family (HIN1)-like
  misc_feature (35)..(247): Homolog of NCBI NO: 38344036 NR Description: OJ991214_12.17 [Oryza sativa (japonica
FFNQTPPLFLLSALLSSPLLSSPTRVLKQASSDAMSKDCGNHGEDDIRRTCRRFLAFLFFLALVVAVIALIVYLVLRPTHPRFYLQDASLRQLDVLTANASAAAGVLSTVLQVTVASRNPNDRVGVYYDRLDVYASYKYQQITLASALPPVYQGHGDVEVWSPVLSGPNVPFAPYLADALAKDVQAGYLILQVKIDGRVRWKVGSWISGHYHIFVTCPAFLIGTGGNGAPGANGLRFQTATYCHVEV

SEQ ID NO: 63011 - protein, 213 aa, Triticum aestivum
  peptide (1)..(213): Ceres Seq. ID no. 13598260
  misc_feature (2)..(211): Homolog of NCBI NO: 15233951 NR Description: harpin-induced protein 1 family (HIN1)
  misc_feature (2)..(213): Homolog of NCBI NO: 15240001 NR Description: harpin-induced protein, putative (HIN1)
  misc_feature (2)..(213): Homolog of NCBI NO: 15227538 NR Description: harpin-induced protein 1 family (HIN1)
  misc_feature (5)..(213): Homolog of NCBI NO: 22326984 NR Description: harpin-induced protein 1 family (HIN1)
  misc_feature (1)..(213): Homolog of NCBI NO: 15231227 NR Description: harpin-induced protein 1 family (HIN1)
  misc_feature (3)..(213): Homolog of NCBI NO: 18399308 NR Description: harpin-induced protein 1 family (HIN1)
  misc_feature (3)..(213): Homolog of NCBI NO: 28392929 NR Description: putative VAMP protein SEC22 [Arabidopsis thaliana]
  misc_feature (3)..(213): Homolog of NCBI NO: 15229906 NR Description: harpin-induced protein 1 family (HIN1)
  misc_feature (3)..(213): Homolog of NCBI NO: 38637038 NR Description: harpin-induced protein 1 family (HIN1)-like
  misc_feature (1)..(213): Homolog of NCBI NO: 38344036 NR Description: OJ991214_12.17 [Oryza sativa (japonica
MSKDCGNHGEDDIRRTCRRFLAFLFFLALVVAVIALIVYLVLRPTHPRFYLQDASLRQLDVLTANASAAAGVLSTVLQVTVASRNPNDRVGVYYDRLDVYASYKYQQITLASALPPVYQGHGDVEVWSPVLSGPNVPFAPYLADALAKDVQAGYLILQVKIDGRVRWKVGSWISGHYHIFVTCPAFLIGTGGNGAPGANGLRFQTATYCHVEV

SEQ ID NO: 63012 - DNA, 1058 bp, Triticum aestivum
  misc_feature (1)..(1058): Ceres Seq. ID no. 13596742
gaatactcctaaattagtttagtgatttcgggtcccacgcccgtatcgctgctcctctcctgcgccgctggatctcctccttcctcccactcaggatacaaggggaagaaggcaggggtctaggtgctactccggcgcggcggcagagccaagcacacccatctctcttcaagcttggcccgcccagcaatttgtttgtagctccgccactgctgagacccctagtgttcccagccacgcctcgcccactcgcgctgtgtgtgcctcggagatggccggcgcgtcattttttgataggatggtttcccagcttcggtcgacatccaagtactacactggatatcccaaggatctagggccatcaagaatcataccgttcacatcagagcgtcagtttgtgcagctattacatgaaggacggcctgtagttgtggcctttaccattaagtgcacttatacacagcatcttgacaaagtactggagaaagctgctgctacattttatcctcatataaagtttgttcgggtggaatgcccaaagtatcctgggttttgcctcacgaggcaaaagaccgagtatccatttcttgaagtattttacaacccagaacaggctgctaacccaggtaagattgtggatccgagcatcacgaaatactccgcaaaagtcctacctttcaactatgaccagagcgtgtatggatttcgagagtattttaagaagtatgggttcaagtattccgaagcaaactaactaggtttgtcatggtgaagccctgcagagtcagccagtccaactggcatgatgaggcctagtatttgaatttactttcagcctgtactaacaaacagtgatactgcattcttaagaatcagcaccccctgcatactgggctggctctgccttggcaaatggttggaaaaatggcaaagctgttagctaggtttccagtattctcaatcaagattgtagtagaatttctggatgttgcatgttgttctttgtcgaatctctgaactgcattttcagactcgctattaataaaattctgcggccc

SEQ ID NO: 63013 - protein, 160 aa, Triticum aestivum
  peptide (1)..(160): Ceres Seq. ID no. 15221964
  misc_feature (1)..(158): Homolog of NCBI NO: 15242070 NR Description: hypothetical protein [Arabidopsis thaliana]
MAGASFFDRMVSQLRSTSKYYTGYPKDLGPSRIIPFTSERQFVQLLHEGRPVVVAFTIKCTYTQHLDKVLEKAAATFYPHIKFVRVECPKYPGFCLTRQKTEYPFLEVFYNPEQAANPGKIVDPSITKYSAKVLPFNYDQSVYGFREYFKKYGFKYSEAN

SEQ ID NO: 63014 - protein, 151 aa, Triticum aestivum
  peptide (1)..(151): Ceres Seq. ID no. 15221965
  misc_feature (1)..(149): Homolog of NCBI NO: 15242070 NR Description: hypothetical protein [Arabidopsis thaliana]
MVSQLRSTSKYYTGYPKDLGPSRIIPFTSERQFVQLLHEGRPVVVAFTIKCTYTQHLDKVLEKAAATFYPHIKFVRVECPKYPGFCLTRQKTEYPFLEVFYNPEQAANPGKIVDPSITKYSAKVLPFNYDQSVYGFREYFKKYGFKYSEAN

SEQ ID NO: 63015 - DNA, 1078 bp, Triticum aestivum
  misc_feature (1)..(1078): Ceres Seq. ID no. 12615764
attattccttcccctgtcgcctcgatcgaagccgacgagctcagccggcgccggagcagggacggggacgcccgtcgcaggccgcctcgccgcccgagtcgccgccgtccggggcccttctcgcctggaggcaaagatggagcctggaaggaaacctctgagtctgctggacctatgcatccggagcgccgtcgacaacctcaggaccctcaacagcgtcgacatcgtgcctgacgagctgctcaagagaatcctgccccactgcaccttggagcagctgaggcacatcgagagttgcacacatgcggaccttaccgacgttacagatgtgctgtggaagagattcttccagcgcgagttcggtgaggaaaatatgaaccttgccatcaagagaatgaaggagaacagggtgcgttacaaatggaagaaactctttgaggcaagaacagaaaagcaaaagcaagttgaagcaagaatgtcggctgggctgaaaaacaaatatcaagcagcaaacgctgcgaaacagagcaaacaaattaaagtttgtacgaagatcccaccgaacagcaaaagaagtttttggggaggaagtggatccagcagcctagccaactccagctacaagagccctatattgaaaaaggcaaggatggaggttgacagtcgggcgaaaatgcaagctgctatccaaaggaacactgttgcaaggtcatcacagccagcaaggctgacctttcctagcgaacagacatcgaggacgacgacaattcatcgacctaattcaacgataaccatcaccaaaccagttggtccgaacaggcccattcaaaagcagaacaccagacccaaattttagaggccactgccatgacatcatgcttgtgaccgtggagttcgccatgattgcgcggaaatcgtagttcctgtggacattcaacaagtctttgtgagacagggaagagtcttgtttgtagttgccccagctgagcacttgtatctttaggggagcaaacaatatctgcaccaaacattttttcaaaattagattcaatcaaatcattgaaatgcatgagcttcg

SEQ ID NO: 63016 - protein, 284 aa, Triticum aestivum
  peptide (1)..(284): Ceres Seq. ID no. 12615765
  misc_feature (50)..(176): Homolog of NCBI NO: 25370823 NR Description: hypothetical protein At2g42780 [imported] -
  misc_feature (50)..(267): Homolog of NCBI NO: 18406058 NR Description: expressed protein
LFLPLSPRSKPTSSAGAGAGTGTPVAGRLAARVAAVRGPSRLEAKMEPGRKPLSLLDLCIRSAVDNLRTLNSVDIVPDELLKRILPHCTLEQLRHIESCTHADLTDVTDVLWKRFFQREFGEENMNLAIKRMKENRVRYKWKKLFEARTEKQKQVEARMSAGLKNKYQAANAAKQSKQIKVCTKIPPNSKRSFWGGSGSSSLANSSYKSPILKKARMEVDSRAKMQAAIQRNTVARSSQPARLTFPSEQTSRTTTIHRPNSTITITKPVGPNRPIQKQNTRPKF

SEQ ID NO: 63017 - protein, 239 aa, Triticum aestivum
  peptide (1)..(239): Ceres Seq. ID no. 12615766
  misc_feature (5)..(131): Homolog of NCBI NO: 25370823 NR Description: hypothetical protein At2g42780 [imported] -
  misc_feature (5)..(222): Homolog of NCBI NO: 18406058 NR Description: expressed protein
MEPGRKPLSLLDLCIRSAVDNLRTLNSVDIVPDELLKRILPHCTLEQLRHIESCTHADLTDVTDVLWKRFFQREFGEENMNLAIKRMKENRVRYKWKKLFEARTEKQKQVEARMSAGLKNKYQAANAAKQSKQIKVCTKIPPNSKRSFWGGSGSSSLANSSYKSPILKKARMEVDSRAKMQAAIQRNTVARSSQPARLTFPSEQTSRTTTIHRPNSTITITKPVGPNRPIQKQNTRPKF

SEQ ID NO: 63018 - protein, 160 aa, Triticum aestivum
  peptide (1)..(160): Ceres Seq. ID no. 12615767
  misc_feature (1)..(52): Homolog of NCBI NO: 25370823 NR Description: hypothetical protein At2g42780 [imported] -
  misc_feature (1)..(143): Homolog of NCBI NO: 18406058 NR Description: expressed protein
MNLAIKRMKENRVRYKWKKLFEARTEKQKQVEARMSAGLKNKYQAANAAKQSKQIKVCTKIPPNSKRSFWGGSGSSSLANSSYKSPILKKARMEVDSRAKMQAAIQRNTVARSSQPARLTFPSEQTSRTTTIHRPNSTITITKPVGPNRPIQKQNTRPKF

SEQ ID NO: 63019 - DNA, 1214 bp, Triticum aestivum
  misc_feature (1)..(1214): Ceres Seq. ID no. 13596762
agagagagagaggtagccaagaacgccatggcctccgctgcttgctagctagccagccagtagtatataaggagcggcaccgcctgtgcgacccggccccgtatcccaagtcagtcgtctcatgctccggtccacgcacccgctcagccccagcagcagcagctcggccccggcgtccagctccggcgagacgatggtggggggcgcgccgagcggggcgaagctgctgcagatcctgaacgtgcgcgtggtgggcaccggcgagcgcgtggtggtgctgtcgcacggcttcggcacggaccagtcggcgtggagccgcgtgctgccgtacctcatccgtgagcaccgcgtggtgctctacgacctcgtctgcgccggcagcgtcaacccggaccacttcgacttccgccgctacaacaacctggacgcctacgtggacgacctcctctccatcctcgacgcgctccgcatcccgcgctgcgccttcgtcggccactccgtctccgccatgatcggcatcctcgcctccatccgccgccccgacctcttcgccaagctcgtcctcatcggcgcctcgcctaggttcttgaacgacagcgactaccacggcgggttcgagctggaggagatccagcaggtgttccaggcgatgtcggccaactacgaggcgtgggccaaggggtacgcgccgctggcggtgggcgcggacgtgccggcggcggtgcaggagttcagccggacgctgttcaacatgcggccggacatctcgctccacgtctgccagagcgtgttcaagacggacctccgcggcgtgctgggcatggtgcaggcgccgtgcgtggtggtgcagaccacccgcgacgtctccgtgccggccaacgtggcggcgtacctcagggcccacctcggcgggcgcaccaccatcgagcccctgccgacggagggccacctcccccacctcagcgcccccagcctcctcgcccaggtgctccgccgcgcgctcgcccggttctagcacgagaaaaaagtgagagagaagaaattactgcagctgcctgctggtttcaccgacccgcgcgtacgtacggggtctaccccgtatttcttctctgtatttttaccgcatccgcatgaatttgtacttgcctcatagactcggaagaaaatgccaggagtgtgtcctgtagcacgtatgagcactcgaaatatttctc

SEQ ID NO: 63020 - protein, 297 aa, Triticum aestivum
  peptide (1)..(297): Ceres Seq. ID no. 13596763
  misc_feature (75)..(291): Pfam Name: alpha/beta hydrolase fold Pfam Description: alpha/beta hydrolase fold
  misc_feature (40)..(290): Homolog of NCBI NO: 16331466 NR Description: hypothetical protein [Synechocystis sp. PCC 6803]
  misc_feature (39)..(295): Homolog of NCBI NO: 34912326 NR Description: P0451D05.26 [Oryza sativa (japonica
  misc_feature (41)..(295): Homolog of NCBI NO: 22298700 NR Description: ORF_ID:tlr1157~hypothetical protein
  misc_feature (35)..(294): Homolog of NCBI NO: 15230110 NR Description: hydrolase, alpha/beta fold family [Arabidopsis
  misc_feature (40)..(291): Homolog of NCBI NO: 24216360 NR Description: Predicted hydrolases or acyltransferases,
  misc_feature (40)..(156): Homolog of NCBI NO: 40736991 NR Description: putative hydrolases [Oryza sativa (japonica
  misc_feature (155)..(292): Homolog of NCBI NO: 40736991 NR Description: putative hydrolases [Oryza sativa (japonica
  misc_feature (40)..(291): Homolog of NCBI NO: 15235567 NR Description: hydrolase, alpha/beta fold family [Arabidopsis
  misc_feature (35)..(296): Homolog of NCBI NO: 18396732 NR Description: esterase/lipase/thioesterase family [Arabidopsis
  misc_feature (35)..(296): Homolog of NCBI NO: 21593927 NR Description: unknown [Arabidopsis thaliana]
MLRSTHPLSPSSSSSAPASSSGETMVGGAPSGAKLLQILNVRVVGTGERVVVLSHGFGTDQSAWSRVLPYLIREHRVVLYDLVCAGSVNPDHFDFRRYNNLDAYVDDLLSILDALRIPRCAFVGHSVSAMIGILASIRRPDLFAKLVLIGASPRFLNDSDYHGGFELEEIQQVFQAMSANYEAWAKGYAPLAVGADVPAAVQEFSRTLFNMRPDISLHVCQSVFKTDLRGVLGMVQAPCVVVQTTRDVSVPANVAAYLRAHLGGRTTIEPLPTEGHLPHLSAPSLLAQVLRRALARF

SEQ ID NO: 63021 - protein, 273 aa, Triticum aestivum
  peptide (1)..(273): Ceres Seq. ID no. 13596764
  misc_feature (51)..(267): Pfam Name: alpha/beta hydrolase fold Pfam Description: alpha/beta hydrolase fold
  misc_feature (16)..(266): Homolog of NCBI NO: 16331466 NR Description: hypothetical protein [Synechocystis sp. PCC 6803]
  misc_feature (15)..(271): Homolog of NCBI NO: 34912326 NR Description: P0451D05.26 [Oryza sativa (japonica
  misc_feature (17)..(271): Homolog of NCBI NO: 22298700 NR Description: ORF_ID:tlr1157~hypothetical protein
  misc_feature (11)..(270): Homolog of NCBI NO: 15230110 NR Description: hydrolase, alpha/beta fold family [Arabidopsis
  misc_feature (16)..(267): Homolog of NCBI NO: 24216360 NR Description: Predicted hydrolases or acyltransferases,
  misc_feature (16)..(132): Homolog of NCBI NO: 40736991 NR Description: putative hydrolases [Oryza sativa (japonica
  misc_feature (131)..(268): Homolog of NCBI NO: 40736991 NR Description: putative hydrolases [Oryza sativa (japonica
  misc_feature (16)..(267): Homolog of NCBI NO: 15235567 NR Description: hydrolase, alpha/beta fold family [Arabidopsis
  misc_feature (11)..(272): Homolog of NCBI NO: 18396732 NR Description: esterase/lipase/thioesterase family [Arabidopsis
  misc_feature (11)..(272): Homolog of NCBI NO: 21593927 NR Description: unknown [Arabidopsis thaliana]
MVGGAPSGAKLLQILNVRVVGTGERVVVLSHGFGTDQSAWSRVLPYLIREHRVVLYDLVCAGSVNPDHFDFRRYNNLDAYVDDLLSILDALRIPRCAFVGHSVSAMIGILASIRRPDLFAKLVLIGASPRFLNDSDYHGGFELEEIQQVFQAMSANYEAWAKGYAPLAVGADVPAAVQEFSRTLFNMRPDISLHVCQSVFKTDLRGVLGMVQAPCVVVQTTRDVSVPANVAAYLRAHLGGRTTIEPLPTEGHLPHLSAPSLLAQVLRRALARF

SEQ ID NO: 63022 - protein, 168 aa, Triticum aestivum
  peptide (1)..(168): Ceres Seq. ID no. 13596765
  misc_feature (1)..(162): Pfam Name: alpha/beta hydrolase fold Pfam Description: alpha/beta hydrolase fold
  misc_feature (1)..(161): Homolog of NCBI NO: 16331466 NR Description: hypothetical protein [Synechocystis sp. PCC 6803]
  misc_feature (1)..(166): Homolog of NCBI NO: 34912326 NR Description: P0451D05.26 [Oryza sativa (japonica
  misc_feature (1)..(166): Homolog of NCBI NO: 22298700 NR Description: ORF_ID:tlr1157~hypothetical protein
  misc_feature (1)..(165): Homolog of NCBI NO: 15230110 NR Description: hydrolase, alpha/beta fold family [Arabidopsis
  misc_feature (1)..(162): Homolog of NCBI NO: 24216360 NR Description: Predicted hydrolases or acyltransferases,
  misc_feature (1)..(27): Homolog of NCBI NO: 40736991 NR Description: putative hydrolases [Oryza sativa (japonica
  misc_feature (26)..(163): Homolog of NCBI NO: 40736991 NR Description: putative hydrolases [Oryza sativa (japonica
  misc_feature (1)..(162): Homolog of NCBI NO: 15235567 NR Description: hydrolase, alpha/beta fold family [Arabidopsis
  misc_feature (1)..(167): Homolog of NCBI NO: 18396732 NR Description: esterase/lipase/thioesterase family [Arabidopsis
  misc_feature (1)..(167): Homolog of NCBI NO: 21593927 NR Description: unknown [Arabidopsis thaliana]
MIGILASIRRPDLFAKLVLIGASPRFLNDSDYHGGFELEEIQQVFQAMSANYEAWAKGYAPLAVGADVPAAVQEFSRTLFNMRPDISLHVCQSVFKTDLRGVLGMVQAPCVVVQTTRDVSVPANVAAYLRAHLGGRTTIEPLPTEGHLPHLSAPSLLAQVLRRALARF

SEQ ID NO: 63023 - DNA, 1055 bp, Triticum aestivum
  misc_feature (1)..(1055): Ceres Seq. ID no. 12585294
atcccatcccagtcagccaaacgcccaacaccacctcgtgacttcgtccgcagaccttccctcgcgcttcgactcccactccgatctccggccatggccgcggcgcgccccggatcccctgcccccagacggctgcccccctccacgctcctcctcctggccgccgtcctcctcgcggcctcgccgccggcgcgcgccctccggttcgacctcgagtccggccacaccaagtgcatctccgacgagatcaaggtcgactctatggccgtcggcaagtacagcgtggtcgcccccgaccccagctaccccgacgcacagctccccgagtcgcaccgcgtctccctcagggtgacgtcgccgtacgggaacagcatgcactactccgagaacgtgcagtcggggcacttcgccttcacggcggtggaggccggggactacctggcctgcttctgggcgcctgaccacaagccacccgtcaccgtcaccttcgagttcgactggaagagcggcgtcacggccaaggactggtccaacgtcgccaagaagggcaaggtcgatatgatggaactagagctgaagaagctagaggataccatcaaatctattcacgaggaaatgttttatctacgtgaaagggaggagcaaatgcagaacatcaacaggcagacgaactcgaggatggggtggctgagtttcctctcacttggcatctgcttatccgtggcagggctgcagctgtggcatctgaagacctttttcgagagaaagaagttgctgtagtttcccccatgatcacaaacaaatcgttgcgaattagggtatattgtttctgccagctattaacctatgtttccgagcgaatactcgaaccatcagtaagaaagaaaccgtcgatcatcatacttgtgaaatgcctttctgtgccctagcttctctccaatcaaatacagttgtaaaatgttctttttttcttgaacaggggtgaaatgtttctgttgatggtttcaaaaaaaaaaaaaaaagaaaaaagaatgaattnacaaatgctgagaagc

SEQ ID NO: 63024 - protein, 259 aa, Triticum aestivum
  peptide (1)..(259): Ceres Seq. ID no. 12585295
  misc_feature (50)..(259): Pfam Name: emp24/gp25L/p24 family Pfam Description: emp24/gp25L/p24 family
  misc_feature (48)..(259): Homolog of NCBI NO: 15227591 NR Description: putative Golgi-associated membrane trafficking
  misc_feature (50)..(259): Homolog of NCBI NO: 12597802 NR Description: unknown protein [Arabidopsis thaliana]
  misc_feature (49)..(259): Homolog of NCBI NO: 22330523 NR Description: unknown protein
  misc_feature (48)..(259): Homolog of NCBI NO: 8778403 NR Description: F16A14.23 [Arabidopsis thaliana]
  misc_feature (48)..(259): Homolog of NCBI NO: 15223027 NR Description: unknown protein; protein id: At1g14010.1
  misc_feature (43)..(259): Homolog of NCBI NO: 21618241 NR Description: unknown [Arabidopsis thaliana]
  misc_feature (43)..(259): Homolog of NCBI NO: 18396016 NR Description: expressed protein
  misc_feature (50)..(259): Homolog of NCBI NO: 18921314 NR Description: putative transmembrane protein [Oryza sativa]
  misc_feature (32)..(212): Homolog of NCBI NO: 34913282 NR Description: P0519E12.19 [Oryza sativa (japonica
  misc_feature (32)..(259): Homolog of NCBI NO: 33146897 NR Description: putative transmembrane protein
IPSQSAKRPTPPRDFVRRPSLALRLPLRSPAMAAARPGSPAPRRLPPSTLLLLAAVLLAASPPARALRFDLESGHTKCISDEIKVDSMAVGKYSVVAPDPSYPDAQLPESHRVSLRVTSPYGNSMHYSENVQSGHFAFTAVEAGDYLACFWAPDHKPPVTVTFEFDWKSGVTAKDWSNVAKKGKVDMMELELKKLEDTIKSIHEEMFYLREREEQMQNINRQTNSRMGWLSFLSLGICLSVAGLQLWHLKTFFERKKLL

SEQ ID NO: 63025 - protein, 228 aa, Triticum aestivum
  peptide (1)..(228): Ceres Seq. ID no. 12585296
  misc_feature (19)..(228): Pfam Name: emp24/gp25L/p24 family Pfam Description: emp24/gp25L/p24 family
  misc_feature (17)..(228): Homolog of NCBI NO: 15227591 NR Description: putative Golgi-associated membrane trafficking
  misc_feature (19)..(228): Homolog of NCBI NO: 12597802 NR Description: unknown protein [Arabidopsis thaliana]
  misc_feature (18)..(228): Homolog of NCBI NO: 22330523 NR Description: unknown protein
  misc_feature (17)..(228): Homolog of NCBI NO: 8778403 NR Description: F16A14.23 [Arabidopsis thaliana]
  misc_feature (17)..(228): Homolog of NCBI NO: 15223027 NR Description: unknown protein; protein id: At1g14010.1
  misc_feature (12)..(228): Homolog of NCBI NO: 21618241 NR Description: unknown [Arabidopsis thaliana]
  misc_feature (12)..(228): Homolog of NCBI NO: 18396016 NR Description: expressed protein
  misc_feature (19)..(228): Homolog of NCBI NO: 18921314 NR Description: putative transmembrane protein [Oryza sativa]
  misc_feature (1)..(181): Homolog of NCBI NO: 34913282 NR Description: P0519E12.19 [Oryza sativa (japonica
  misc_feature (1)..(228): Homolog of NCBI NO: 33146897 NR Description: putative transmembrane protein
MAAARPGSPAPRRLPPSTLLLLAAVLLAASPPARALRFDLESGHTKCISDEIKVDSMAVGKYSVVAPDPSYPDAQLPESHRVSLRVTSPYGNSMHYSENVQSGHFAFTAVEAGDYLACFWAPDHKPPVTVTFEFDWKSGVTAKDWSNVAKKGKVDMMELELKKLEDTIKSIHEEMFYLREREEQMQNINRQTNSRMGWLSFLSLGICLSVAGLQLWHLKTFFERKKLL

SEQ ID NO: 63026 - protein, 172 aa, Triticum aestivum
  peptide (1)..(172): Ceres Seq. ID no. 12585297
  misc_feature (1)..(172): Pfam Name: emp24/gp25L/p24 family Pfam Description: emp24/gp25L/p24 family
  misc_feature (1)..(172): Homolog of NCBI NO: 15227591 NR Description: putative Golgi-associated membrane trafficking
  misc_feature (1)..(172): Homolog of NCBI NO: 12597802 NR Description: unknown protein [Arabidopsis thaliana]
  misc_feature (1)..(172): Homolog of NCBI NO: 22330523 NR Description: unknown protein
  misc_feature (1)..(172): Homolog of NCBI NO: 8778403 NR Description: F16A14.23 [Arabidopsis thaliana]
  misc_feature (1)..(172): Homolog of NCBI NO: 15223027 NR Description: unknown protein; protein id: At1g14010.1
  misc_feature (1)..(172): Homolog of NCBI NO: 21618241 NR Description: unknown [Arabidopsis thaliana]
  misc_feature (1)..(172): Homolog of NCBI NO: 18396016 NR Description: expressed protein
  misc_feature (1)..(172): Homolog of NCBI NO: 18921314 NR Description: putative transmembrane protein [Oryza sativa]
  misc_feature (1)..(125): Homolog of NCBI NO: 34913282 NR Description: P0519E12.19 [Oryza sativa (japonica
  misc_feature (1)..(172): Homolog of NCBI NO: 33146897 NR Description: putative transmembrane protein
MAVGKYSVVAPDPSYPDAQLPESHRVSLRVTSPYGNSMHYSENVQSGHFAFTAVEAGDYLACFWAPDHKPPVTVTFEFDWKSGVTAKDWSNVAKKGKVDMMELELKKLEDTIKSIHEEMFYLREREEQMQNINRQTNSRMGWLSFLSLGICLSVAGLQLWHLKTFFERKKLL

SEQ ID NO: 63027 - DNA, 1304 bp, Triticum aestivum
  misc_feature (1)..(1304): Ceres Seq. ID no. 12615365
ccaaaccagtatcgacaagacgtcaaaaccctagaccggcgacgcgttcccctctctcgccgccggattcccctccgcccgtgcgtctcgcggacgtcttcgcgctcgccggctgctgttctcggttcgcccaccaccagcaatgtcttctcagatgaataaccgcatccagtccgctggaaagcgcgcgcgcacagacggtagccggcgtgaggacgactggatttgccccagctgtaacaacgtcaacttcgcattccgcaccacctgcaacatgcgcaactgcgaccagtccaggcccgcagatcacacggctatgcagactccaccccactactcggtgccggggcggtacatgccgccggggacgcctccgtccatgtacctcaccggggctcctcccccgtatggctccaacctctataatgggcatcccatgccacgctatggcattcctcagctccctccgggctctggatatccgtatggctatggcgggcgagtcccgatggggagcccctatgggccaatgcatatggcggcaccacccccatattctagtggttctatggttggtgcaggtggaatgtacagcatcagcatgcccatggatagatatggcttgggctcacccgctggtcctggggcaatgggcacaagggctggttcctattctgacgaaggctcacagaagaaatctgctggagctggacgtgataatgattggaagtgccctaattgcaacaacattaacttcgcctttcggacagtctgtaacatgagaaaatgcaacacaccaagacctgacacccagggatccaaacctgacagttcaagagctccaaaaccaaagactccagagggtagctggaagtgtgaaaagtgcaataacataaactatcctttccggacaaaatgcaaccgtccaagttgtggggaagaaaagccattgcaggcaaacagtcctgatgatctggctacagatcaggacaatcagtgagtcctagaacagtaatgaggtcaagaaggttcagcgtcgtcgtcaagtttcagtctgaatgtctggggtccatctgtgtccgtagtcgctgctgtcgtttcaagtttcttccccttgggaccatatagttgagtcacagcctcatggtaaacgttgtgaagttggcaactggagtcatggcttttcatatctctacagattttgatcaagatcatccatttgttaataccctcctgaaatttgtttgcttgtcgtggacactggactcaggggaaattgctatttgttataatggattctagct

SEQ ID NO: 63028 - protein, 285 aa, Triticum aestivum
  peptide (1)..(285): Ceres Seq. ID no. 12615366
  misc_feature (53)..(167): Pfam Name: Extensin-like region Pfam Description: Extensin-like region
  misc_feature (96)..(283): Homolog of NCBI NO: 33146999 NR Description: putative p53 binding protein
  misc_feature (11)..(54): Homolog of NCBI NO: 18698995 NR Description: p53 binding protein [Oryza sativa]
  misc_feature (188)..(274): Homolog of NCBI NO: 15227939 NR Description: similar to putative zinc finger protein; protein
  misc_feature (173)..(268): Homolog of NCBI NO: 15865325 NR Description: putative non-ribosomal nucleolar protein
  misc_feature (182)..(274): Homolog of NCBI NO: 18698995 NR Description: p53 binding protein [Oryza sativa]
  misc_feature (2)..(274): Homolog of NCBI NO: 33146999 NR Description: putative p53 binding protein
  misc_feature (45)..(285): Homolog of NCBI NO: 25404955 NR Description: protein F1N21.14 [imported] - Arabidopsis
  misc_feature (3)..(285): Homolog of NCBI NO: 22330480 NR Description: similar to RRM-containing RNA-binding protein,
  misc_feature (1)..(285): Homolog of NCBI NO: 27817857 NR Description: OJ1081_B12.5 [Oryza sativa (japonica
MSSQMNNRIQSAGKRARTDGSRREDDWICPSCNNVNFAFRTTCNMRNCDQSRPADHTAMQTPPHYSVPGRYMPPGTPPSMYLTGAPPPYGSNLYNGHPMPRYGIPQLPPGSGYPYGYGGRVPMGSPYGPMHMAAPPPYSSGSMVGAGGMYSISMPMDRYGLGSPAGPGAMGTRAGSYSDEGSQKKSAGAGRDNDWKCPNCNNINFAFRTVCNMRKCNTPRPDTQGSKPDSSRAPKPKTPEGSWKCEKCNNINYPFRTKCNRPSCGEEKPLQANSPDDLATDQDNQ

SEQ ID NO: 63029 - protein, 281 aa, Triticum aestivum
  peptide (1)..(281): Ceres Seq. ID no. 12615367
  misc_feature (49)..(163): Pfam Name: Extensin-like region Pfam Description: Extensin-like region
  misc_feature (92)..(279): Homolog of NCBI NO: 33146999 NR Description: putative p53 binding protein
  misc_feature (7)..(50): Homolog of NCBI NO: 18698995 NR Description: p53 binding protein [Oryza sativa]
  misc_feature (184)..(270): Homolog of NCBI NO: 15227939 NR Description: similar to putative zinc finger protein; protein
  misc_feature (169)..(264): Homolog of NCBI NO: 15865325 NR Description: putative non-ribosomal nucleolar protein
  misc_feature (178)..(270): Homolog of NCBI NO: 18698995 NR Description: p53 binding protein [Oryza sativa]
  misc_feature (1)..(270): Homolog of NCBI NO: 33146999 NR Description: putative p53 binding protein
  misc_feature (41)..(281): Homolog of NCBI NO: 25404955 NR Description: protein F1N21.14 [imported] - Arabidopsis
  misc_feature (1)..(281): Homolog of NCBI NO: 22330480 NR Description: similar to RRM-containing RNA-binding protein,
  misc_feature (1)..(281): Homolog of NCBI NO: 27817857 NR Description: OJ1081_B12.5 [Oryza sativa (japonica
MNNRIQSAGKRARTDGSRREDDWICPSCNNVNFAFRTTCNMRNCDQSRPADHTAMQTPPHYSVPGRYMPPGTPPSMYLTGAPPPYGSNLYNGHPMPRYGIPQLPPGSGYPYGYGGRVPMGSPYGPMHMAAPPPYSSGSMVGAGGMYSISMPMDRYGLGSPAGPGAMGTRAGSYSDEGSQKKSAGAGRDNDWKCPNCNNINFAFRTVCNMRKCNTPRPDTQGSKPDSSRAPKPKTPEGSWKCEKCNNINYPFRTKCNRPSCGEEKPLQANSPDDLATDQDNQ

SEQ ID NO: 63030 - protein, 241 aa, Triticum aestivum
  peptide (1)..(241): Ceres Seq. ID no. 12615368
  misc_feature (9)..(123): Pfam Name: Extensin-like region Pfam Description: Extensin-like region
  misc_feature (52)..(239): Homolog of NCBI NO: 33146999 NR Description: putative p53 binding protein
  misc_feature (144)..(230): Homolog of NCBI NO: 15227939 NR Description: similar to putative zinc finger protein; protein
  misc_feature (129)..(224): Homolog of NCBI NO: 15865325 NR Description: putative non-ribosomal nucleolar protein
  misc_feature (138)..(230): Homolog of NCBI NO: 18698995 NR Description: p53 binding protein [Oryza sativa]
  misc_feature (1)..(230): Homolog of NCBI NO: 33146999 NR Description: putative p53 binding protein
  misc_feature (1)..(241): Homolog of NCBI NO: 25404955 NR Description: protein F1N21.14 [imported] - Arabidopsis
  misc_feature (1)..(241): Homolog of NCBI NO: 22330480 NR Description: similar to RRM-containing RNA-binding protein,
  misc_feature (1)..(241): Homolog of NCBI NO: 27817857 NR Description: OJ1081_B12.5 [Oryza sativa (japonica
MRNCDQSRPADHTAMQTPPHYSVPGRYMPPGTPPSMYLTGAPPPYGSNLYNGHPMPRYGIPQLPPGSGYPYGYGGRVPMGSPYGPMHMAAPPPYSSGSMVGAGGMYSISMPMDRYGLGSPAGPGAMGTRAGSYSDEGSQKKSAGAGRDNDWKCPNCNNINFAFRTVCNMRKCNTPRPDTQGSKPDSSRAPKPKTPEGSWKCEKCNNINYPFRTKCNRPSCGEEKPLQANSPDDLATDQDNQ

SEQ ID NO: 63031 - DNA, 1828 bp, Triticum aestivum
  misc_feature (1)..(1828): Ceres Seq. ID no. 13596935
cattataccacaccaaaccagcaccagcacacggcataccacaagcagcagcagcagccgccgccgtggacttcgacgctcaagtactcgagctctagcgcttcgctctgtagcggctctcgcacggatcaaagccgatggcgacggcggtccaccagctctccttctccgcgccgagcgcgggcgccaggcggcggcagagccgggcgtccgcgtccgcgtccacgacggaccggcacgaggtgctatcgccgaatcgccggctgccgctgcggaaggtgccgggcgagcacggcccgccgctgctgggcgcgctcaaggaccggctcgagtacttctacgggcccggcgggcgcgacggcttcttcgcggcccgcgtccgcgcgcaccgctccacggtggtgcgcctcaacatgccccccggccccttcgtggccaaggacccccgcgtggtggcgctcctcgacgccgcctccttcccggtcctcttcgacacctcgctcgtcgacaagaccgacctcttcaccggcaccttcatgccctccaccgacctcaccggcggctaccgcgtgctctcctacgtcgaccccgccgagcccaaccacgcgccgctcaagtcgctcctcttccacctcctcacccaccgccgccagcacgtcatccccacgttccgcgaggtctacggcggcctcttcggccgcatggagaacgacctcgcccgcgtcggcaaggccgacttcggcaactacaacgacgacgccgccttcggcttcctctgccaggcgctcctcggccgtgaccccgtcgactcgccgctccgcgacgaagggcccaagctggtagccaagtggcttctgttccagatcagcccgctgctcagcctcggcctggcgggcctgcccaccctcgtggaggacggcctcctccacagcttccgcctcccgccggcgctcattaagaaggactacggccgcctcgccgacttcttccgcgacgccggcaaggcggtgatcgacgagggcgagcggctgggcatcgcgcgggaggaggcggtgcacaacatcctcttcgccatgtgcttcaactccttcggcggcatcaagatcctgttcccgtcgctggtgaagtggctgggccgcgccggcgggcgggtgcacggccggctcgcgacggaggtgcgcgccgtcgtgcgcgccaacggcggggaggtgacgatgcgggcgctggccgagatgccgctggtgaagtcagccgtgtacgaggcgctgcggatcgagccgccggtggcgatgcagtacgggcgcgcgaagcgggacatggtggtggagagccacgactacgggtacgaggtgcgggagggggagctgctgttcgggtaccagcccatggccaccaaggacccgcgcgtgttcccgcgcgccgaggactacgtgcccgacaggttcctgggcgaggacggcgagcggctgctccggtacgtggtgtggtccaacggtcccgagtcggcgacgcccacgctgcaggacaagcagtgcgccggcaaggacttcgtggtgctcatcgcgcgcctcctcgtcgccgagctcttcctccggtacgactccttcgacgtccaggtcgggtcctcgccgctcgggtcgtcggtcaccatcacatcgcttaagaaggccaccttctgaggcatcgccacgtgtactcatttttttccctctgcttttctcgatcgatgccagtattacaccatgcatgcgatacgctagcatggagtgatagaggatttgtgcaacaaaaatttcttttcctagcaaagatgagcccgatttttccc

SEQ ID NO: 63032 - protein, 513 aa, Triticum aestivum
  peptide (1)..(513): Ceres Seq. ID no. 13596936
  misc_feature (342)..(448): Pfam Name: Cytochrome P450 Pfam Description: Cytochrome P450
  misc_feature (37)..(512): Homolog of NCBI NO: 25089839 NR Description: Allene oxide synthase (Rubber particle protein)
  misc_feature (8)..(511): Homolog of NCBI NO: 7677376 NR Description: allene oxide synthase [Lycopersicon esculentum]
  misc_feature (36)..(511): Homolog of NCBI NO: 23956572 NR Description: allene oxide synthase [Solanum tuberosum]
  misc_feature (38)..(513): Homolog of NCBI NO: 1352186 NR Description: Allene oxide synthase, chloroplast precursor
  misc_feature (1)..(513): Homolog of NCBI NO: 15239032 NR Description: allene oxide synthase / cytochrome P450 74A
  misc_feature (42)..(511): Homolog of NCBI NO: 16973300 NR Description: allene oxide synthase [Nicotiana attenuata]
  misc_feature (24)..(513): Homolog of NCBI NO: 21616113 NR Description: allene oxide synthase [Cucumis melo]
  misc_feature (36)..(513): Homolog of NCBI NO: 29373135 NR Description: allene oxide synthase [Citrus sinensis]
  misc_feature (22)..(513): Homolog of NCBI NO: 7581989 NR Description: allene oxide synthase [Lycopersicon esculentum]
  misc_feature (42)..(513): Homolog of NCBI NO: 20160362 NR Description: allene oxide synthase [Solanum tuberosum]
MATAVHQLSFSAPSAGARRRQSRASASASTTDRHEVLSPNRRLPLRKVPGEHGPPLLGALKDRLEYFYGPGGRDGFFAARVRAHRSTVVRLNMPPGPFVAKDPRVVALLDAASFPVLFDTSLVDKTDLFTGTFMPSTDLTGGYRVLSYVDPAEPNHAPLKSLLFHLLTHRRQHVIPTFREVYGGLFGRMENDLARVGKADFGNYNDDAAFGFLCQALLGRDPVDSPLRDEGPKLVAKWLLFQISPLLSLGLAGLPTLVEDGLLHSFRLPPALIKKDYGRLADFFRDAGKAVIDEGERLGIAREEAVHNILFAMCFNSFGGIKILFPSLVKWLGRAGGRVHGRLATEVRAVVRANGGEVTMRALAEMPLVKSAVYEALRIEPPVAMQYGRAKRDMVVESHDYGYEVREGELLFGYQPMATKDPRVFPRAEDYVPDRFLGEDGERLLRYVVWSNGPESATPTLQDKQCAGKDFVVLIARLLVAELFLRYDSFDVQVGSSPLGSSVTITSLKKATF

SEQ ID NO: 63033 - protein, 421 aa, Triticum aestivum
  peptide (1)..(421): Ceres Seq. ID no. 13596937
  misc_feature (250)..(356): Pfam Name: Cytochrome P450 Pfam Description: Cytochrome P450
  misc_feature (1)..(420): Homolog of NCBI NO: 25089839 NR Description: Allene oxide synthase (Rubber particle protein)
  misc_feature (1)..(419): Homolog of NCBI NO: 7677376 NR Description: allene oxide synthase [Lycopersicon esculentum]
  misc_feature (1)..(419): Homolog of NCBI NO: 23956572 NR Description: allene oxide synthase [Solanum tuberosum]
  misc_feature (1)..(421): Homolog of NCBI NO: 1352186 NR Description: Allene oxide synthase, chloroplast precursor
  misc_feature (1)..(421): Homolog of NCBI NO: 15239032 NR Description: allene oxide synthase / cytochrome P450 74A
  misc_feature (1)..(419): Homolog of NCBI NO: 16973300 NR Description: allene oxide synthase [Nicotiana attenuata]
  misc_feature (1)..(421): Homolog of NCBI NO: 21616113 NR Description: allene oxide synthase [Cucumis melo]
  misc_feature (1)..(421): Homolog of NCBI NO: 29373135 NR Description: allene oxide synthase [Citrus sinensis]
  misc_feature (1)..(421): Homolog of NCBI NO: 7581989 NR Description: allene oxide synthase [Lycopersicon esculentum]
  misc_feature (1)..(421): Homolog of NCBI NO: 20160362 NR Description: allene oxide synthase [Solanum tuberosum]
MPPGPFVAKDPRVVALLDAASFPVLFDTSLVDKTDLFTGTFMPSTDLTGGYRVLSYVDPAEPNHAPLKSLLFHLLTHRRQHVIPTFREVYGGLFGRMENDLARVGKADFGNYNDDAAFGFLCQALLGRDPVDSPLRDEGPKLVAKWLLFQISPLLSLGLAGLPTLVEDGLLHSFRLPPALIKKDYGRLADFFRDAGKAVIDEGERLGIAREEAVHNILFAMCFNSFGGIKILFPSLVKWLGRAGGRVHGRLATEVRAVVRANGGEVTMRALAEMPLVKSAVYEALRIEPPVAMQYGRAKRDMVVESHDYGYEVREGELLFGYQPMATKDPRVFPRAEDYVPDRFLGEDGERLLRYVVWSNGPESATPTLQDKQCAGKDFVVLIARLLVAELFLRYDSFDVQVGSSPLGSSVTITSLKKATF

SEQ ID NO: 63034 - protein, 380 aa, Triticum aestivum
  peptide (1)..(380): Ceres Seq. ID no. 13596938
  misc_feature (209)..(315): Pfam Name: Cytochrome P450 Pfam Description: Cytochrome P450
  misc_feature (1)..(379): Homolog of NCBI NO: 25089839 NR Description: Allene oxide synthase (Rubber particle protein)
  misc_feature (1)..(378): Homolog of NCBI NO: 7677376 NR Description: allene oxide synthase [Lycopersicon esculentum]
  misc_feature (1)..(378): Homolog of NCBI NO: 23956572 NR Description: allene oxide synthase [Solanum tuberosum]
  misc_feature (1)..(380): Homolog of NCBI NO: 1352186 NR Description: Allene oxide synthase, chloroplast precursor
  misc_feature (1)..(380): Homolog of NCBI NO: 15239032 NR Description: allene oxide synthase / cytochrome P450 74A
  misc_feature (1)..(378): Homolog of NCBI NO: 16973300 NR Description: allene oxide synthase [Nicotiana attenuata]
  misc_feature (1)..(380): Homolog of NCBI NO: 21616113 NR Description: allene oxide synthase [Cucumis melo]
  misc_feature (1)..(380): Homolog of NCBI NO: 29373135 NR Description: allene oxide synthase [Citrus sinensis]
  misc_feature (1)..(380): Homolog of NCBI NO: 7581989 NR Description: allene oxide synthase [Lycopersicon esculentum]
  misc_feature (1)..(380): Homolog of NCBI NO: 20160362 NR Description: allene oxide synthase [Solanum tuberosum]
MPSTDLTGGYRVLSYVDPAEPNHAPLKSLLFHLLTHRRQHVIPTFREVYGGLFGRMENDLARVGKADFGNYNDDAAFGFLCQALLGRDPVDSPLRDEGPKLVAKWLLFQISPLLSLGLAGLPTLVEDGLLHSFRLPPALIKKDYGRLADFFRDAGKAVIDEGERLGIAREEAVHNILFAMCFNSFGGIKILFPSLVKWLGRAGGRVHGRLATEVRAVVRANGGEVTMRALAEMPLVKSAVYEALRIEPPVAMQYGRAKRDMVVESHDYGYEVREGELLFGYQPMATKDPRVFPRAEDYVPDRFLGEDGERLLRYVVWSNGPESATPTLQDKQCAGKDFVVLIARLLVAELFLRYDSFDVQVGSSPLGSSVTITSLKKATF

SEQ ID NO: 63035 - DNA, 2223 bp, Triticum aestivum
  misc_feature (1)..(2223): Ceres Seq. ID no. 12778278
tcacttctccctccctccctccaataattctcttctctcctctccgcctccgcaccaccatcagaggaaagccagcgggaaggggggaaatccccatgcccccacccctcgccggaccagatccccggcgggccggcgcggagccttaggcggggaccggcctgaccgatgggcggggaggccccggagccgcggcggctcagccgcgcgcttagcttggacggcagcggcgtcccggaggaggcgctgcacctggtgctcggctacgtcgacgacccgcgcgaccgcgaggcggcctcgctggcgtgccgccgctggcaccacatcgacgcgctcacgcggaagcacgtcaccgtgcccttctgctacgccgtgtccccggcgcgcctgctcgcgcgcttcccgcgcctcgagtcgctcggggtcaagggcaagccccgcgccgccatgtacggcctcatccccgacgactggggcgcctacgctcggccctgggtggccgagctcgccgccccgctcgagtgcctcaaggcgctccacctgcggcgcatggtcgtcaccgacgacgacctcgccgccctcgtccgcgcccgcggccacatgctgcaggagctcaagctcgacaagtgctccggattctccaccgacgccctccgcctcgtcgcccgctcctgcagatcactgagaactttgtttctggaagagtgtacaattactgataatggcactgtatggctccatgaccttgctgccaacaatcctgttctggtgaccttgaacttctacttgacttacctcagagtggagccagctgacctcgagcttctcgccaggaattgcaagtcactaatttcattgaagattagcgactgcgacctttcagatttaattggatttttccaaatagctacatcattgcaagaatttgctggagcagaaatcagtgagcaaatgtatggaaatgttaagcttccttcaaagctttgctccttcggacttaccttcatggggacaaatgagatgcacataatctttcctttttctgctgtactcaagaagctggatttgcagtacagtttcctcaccactgaagatcattgccagctcattgcaaaatgtccgaacttactagttcttgcggtaaggaatgtgattggggatagaggactgggggttgtcggtgacacatgcaagaagctacaaaggctcagagttgagcgaggggaagatgatcctggtatgcaagaagaggaaggcggaatttctcaagtaggcctaacagctatagccgtaggttgccgtgaactggaaaatatagctgcctatgtgtctgatatcacaaatggggccctggaatccatcggaacgttctgcaaaaatctccatgactttcgccttgtcctgcttgacagacaagagacgataacagatttgccgctggacaatggtgcccgcgcgctgctgaggggctgcaccaagcttcggaggttcgctctatacctgagaccaggggggctttcagatgtaggcctcggctacattggacagcacagtggaaccatccagtacatgcttctgggtaacgttgggcaaacggatggtggattgatcagtttcgcagccgggtgccggaacctgcggaagcttgaactgaggagctgttgcttcagcgagcgggctctggcgctcgccatacggcaaatgccttccctgaggtatgtgtgggtgcagggctacagggcctctcagaccggccgtgacctcatgctcatggcgcggcccttctggaacatcgagtttacgcctcccagcacggagaccgcgggccggctgatggaagatggggagccctgcgttgataggcaagctcaggtgctggcatactactccctttctgggaagaggtccgactacccgcagtctgttgttcctctgtatcctgcgtgactgtaaatacattaagccggtatggtgtctctctgggacggcccctggctggccctctgcgcttctcgggcaataaggatgtttgtatgtgggtattgtatggatctggtagattttctagctgctgtgtactggaataagcgcattggtatttttgcctggtactcctatctaatcttaggaagatgtatactaaagtaacattgtgcgagtgaactgtgacactattgcgcttgcttcgcaggcataagcttgtctggtttccgcggcctgctc

SEQ ID NO: 63036 - protein, 592 aa, Triticum aestivum
  peptide (1)..(592): Ceres Seq. ID no. 12778279
  misc_feature (22)..(63): Pfam Name: F-box domain Pfam Description: F-box domain
  misc_feature (19)..(586): Homolog of NCBI NO: 15027885 NR Description: putative F-box protein GRR1 protein 1, AtFBL18
  misc_feature (19)..(586): Homolog of NCBI NO: 12658970 NR Description: GRR1-like protein 1 [Arabidopsis thaliana]
  misc_feature (19)..(586): Homolog of NCBI NO: 18412177 NR Description: F-box protein GRR1-like protein 1, AtFBL18
  misc_feature (24)..(586): Homolog of NCBI NO: 18405209 NR Description: coronatine-insensitive 1 (COI1), AtFBL2
  misc_feature (30)..(591): Homolog of NCBI NO: 40218003 NR Description: coronatine-insensitive 1 [Lycopersicon
  misc_feature (1)..(592): Homolog of NCBI NO: 34902000 NR Description: unknown protein [Oryza sativa (japonica
  misc_feature (1)..(592): Homolog of NCBI NO: 34908378 NR Description: P0529E05.15 [Oryza sativa (japonica
MGGEAPEPRRLSRALSLDGSGVPEEALHLVLGYVDDPRDREAASLACRRWHHIDALTRKHVTVPFCYAVSPARLLARFPRLESLGVKGKPRAAMYGLIPDDWGAYARPWVAELAAPLECLKALHLRRMVVTDDDLAALVRARGHMLQELKLDKCSGFSTDALRLVARSCRSLRTLFLEECTITDNGTVWLHDLAANNPVLVTLNFYLTYLRVEPADLELLARNCKSLISLKISDCDLSDLIGFFQIATSLQEFAGAEISEQMYGNVKLPSKLCSFGLTFMGTNEMHIIFPFSAVLKKLDLQYSFLTTEDHCQLIAKCPNLLVLAVRNVIGDRGLGVVGDTCKKLQRLRVERGEDDPGMQEEEGGISQVGLTAIAVGCRELENIAAYVSDITNGALESIGTFCKNLHDFRLVLLDRQETITDLPLDNGARALLRGCTKLRRFALYLRPGGLSDVGLGYIGQHSGTIQYMLLGNVGQTDGGLISFAAGCRNLRKLELRSCCFSERALALAIRQMPSLRYVWVQGYRASQTGRDLMLMARPFWNIEFTPPSTETAGRLMEDGEPCVDRQAQVLAYYSLSGKRSDYPQSVVPLYPA

SEQ ID NO: 63037 - protein, 499 aa, Triticum aestivum
  peptide (1)..(499): Ceres Seq. ID no. 12778280
  misc_feature (1)..(493): Homolog of NCBI NO: 15027885 NR Description: putative F-box protein GRR1 protein 1, AtFBL18
  misc_feature (1)..(493): Homolog of NCBI NO: 12658970 NR Description: GRR1-like protein 1 [Arabidopsis thaliana]
  misc_feature (1)..(493): Homolog of NCBI NO: 18412177 NR Description: F-box protein GRR1-like protein 1, AtFBL18
  misc_feature (1)..(493): Homolog of NCBI NO: 18405209 NR Description: coronatine-insensitive 1 (COI1), AtFBL2
  misc_feature (1)..(498): Homolog of NCBI NO: 40218003 NR Description: coronatine-insensitive 1 [Lycopersicon
  misc_feature (1)..(499): Homolog of NCBI NO: 34902000 NR Description: unknown protein [Oryza sativa (japonica
  misc_feature (1)..(499): Homolog of NCBI NO: 34908378 NR Description: P0529E05.15 [Oryza sativa (japonica
MYGLIPDDWGAYARPWVAELAAPLECLKALHLRRMVVTDDDLAALVRARGHMLQELKLDKCSGFSTDALRLVARSCRSLRTLFLEECTITDNGTVWLHDLAANNPVLVTLNFYLTYLRVEPADLELLARNCKSLISLKISDCDLSDLIGFFQIATSLQEFAGAEISEQMYGNVKLPSKLCSFGLTFMGTNEMHIIFPFSAVLKKLDLQYSFLTTEDHCQLIAKCPNLLVLAVRNVIGDRGLGVVGDTCKKLQRLRVERGEDDPGMQEEEGGISQVGLTAIAVGCRELENIAAYVSDITNGALESIGTFCKNLHDFRLVLLDRQETITDLPLDNGARALLRGCTKLRRFALYLRPGGLSDVGLGYIGQHSGTIQYMLLGNVGQTDGGLISFAAGCRNLRKLELRSCCFSERALALAIRQMPSLRYVWVQGYRASQTGRDLMLMARPFWNIEFTPPSTETAGRLMEDGEPCVDRQAQVLAYYSLSGKRSDYPQSVVPLYPA

SEQ ID NO: 63038 - protein, 465 aa, Triticum aestivum
  peptide (1)..(465): Ceres Seq. ID no. 12778281
  misc_feature (1)..(459): Homolog of NCBI NO: 15027885 NR Description: putative F-box protein GRR1 protein 1, AtFBL18
  misc_feature (1)..(459): Homolog of NCBI NO: 12658970 NR Description: GRR1-like protein 1 [Arabidopsis thaliana]
  misc_feature (1)..(459): Homolog of NCBI NO: 18412177 NR Description: F-box protein GRR1-like protein 1, AtFBL18
  misc_feature (1)..(459): Homolog of NCBI NO: 18405209 NR Description: coronatine-insensitive 1 (COI1), AtFBL2
  misc_feature (1)..(464): Homolog of NCBI NO: 40218003 NR Description: coronatine-insensitive 1 [Lycopersicon
  misc_feature (1)..(465): Homolog of NCBI NO: 34902000 NR Description: unknown protein [Oryza sativa (japonica
  misc_feature (1)..(465): Homolog of NCBI NO: 34908378 NR Description: P0529E05.15 [Oryza sativa (japonica
MVVTDDDLAALVRARGHMLQELKLDKCSGFSTDALRLVARSCRSLRTLFLEECTITDNGTVWLHDLAANNPVLVTLNFYLTYLRVEPADLELLARNCKSLISLKISDCDLSDLIGFFQIATSLQEFAGAEISEQMYGNVKLPSKLCSFGLTFMGTNEMHIIFPFSAVLKKLDLQYSFLTTEDHCQLIAKCPNLLVLAVRNVIGDRGLGVVGDTCKKLQRLRVERGEDDPGMQEEEGGISQVGLTAIAVGCRELENIAAYVSDITNGALESIGTFCKNLHDFRLVLLDRQETITDLPLDNGARALLRGCTKLRRFALYLRPGGLSDVGLGYIGQHSGTIQYMLLGNVGQTDGGLISFAAGCRNLRKLELRSCCFSERALALAIRQMPSLRYVWVQGYRASQTGRDLMLMARPFWNIEFTPPSTETAGRLMEDGEPCVDRQAQVLAYYSLSGKRSDYPQSVVPLYPA

SEQ ID NO: 63039 - DNA, 718 bp, Triticum aestivum
  misc_feature (1)..(718): Ceres Seq. ID no. 13662276
agaacatcctaatcgaaaaaagtgttcacatctcatcctgcatctccatctccattattagtcttggttgctgtgtccacaacacaatggctccgcgttcaggtgctcttgctctcaaggcggccgccgttgctgccgttctggccatgctggtagtgccttccttggggcgctgtcatggctctccctcgccagcactgccaccgacaacctccacaccaccacctccggcgccgttgccaccaactctggcgccggcgccaggacagatatcatgcaatgactgttattcgcagtgctacttgtcctgcgacgcctccattcccttgcagtgcagcctatactgcgaccgtgaagattcctgcaactcctgcaagaccggggccatcgaggaatgcaggaccagcaaaaactgcaccgacagctgcgacgagtgcaacgacgctcccaactttaaatgtgccttctcctgcaccacccgaaactgcatcgggtgtcattacggggcgggccagatgtgcaataaagcgtgcagagaggagtgctccgcacccaaatgcgtaccctagaggcctggaaactagctaaagcatgtgcgtcgcatggtcaatgcgtcttcctgtgatgcatctatgtgcacattgtgtatgagatgctatgacatcgaataatatgggaagttgtatgtttttatctggaagaaaaatcgttgagtatc

SEQ ID NO: 63040 - protein, 188 aa, Triticum aestivum
  peptide (1)..(188): Ceres Seq. ID no. 13662277
  misc_feature (64)..(98): Homolog of NCBI NO: 34881078 NR Description: similar to mena protein [Rattus norvegicus]
NILIEKSVHISSCISISIISLGCCVHNTMAPRSGALALKAAAVAAVLAMLVVPSLGRCHGSPSPALPPTTSTPPPPAPLPPTLAPAPGQISCNDCYSQCYLSCDASIPLQCSLYCDREDSCNSCKTGAIEECRTSKNCTDSCDECNDAPNFKCAFSCTTRNCIGCHYGAGQMCNKACREECSAPKCVP

SEQ ID NO: 63041 - protein, 160 aa, Triticum aestivum
  peptide (1)..(160): Ceres Seq. ID no. 13662278
  misc_feature (36)..(70): Homolog of NCBI NO: 34881078 NR Description: similar to mena protein [Rattus norvegicus]
MAPRSGALALKAAAVAAVLAMLVVPSLGRCHGSPSPALPPTTSTPPPPAPLPPTLAPAPGQISCNDCYSQCYLSCDASIPLQCSLYCDREDSCNSCKTGAIEECRTSKNCTDSCDECNDAPNFKCAFSCTTRNCIGCHYGAGQMCNKACREECSAPKCVP

SEQ ID NO: 63042 - protein, 140 aa, Triticum aestivum
  peptide (1)..(140): Ceres Seq. ID no. 13662279
  misc_feature (16)..(50): Homolog of NCBI NO: 34881078 NR Description: similar to mena protein [Rattus norvegicus]
MLVVPSLGRCHGSPSPALPPTTSTPPPPAPLPPTLAPAPGQISCNDCYSQCYLSCDASIPLQCSLYCDREDSCNSCKTGAIEECRTSKNCTDSCDECNDAPNFKCAFSCTTRNCIGCHYGAGQMCNKACREECSAPKCVP

SEQ ID NO: 63043 - DNA, 528 bp, Triticum aestivum
  misc_feature (1)..(528): Ceres Seq. ID no. 13583869
tcgaaaaaatttcaagggacgttgctaaattcgtggttcaaggtcaccaagaacgaacacttcagctatttagacttgaagacgtggccatgggaatatggatccagcaatacaaagacagtggccagcaagtgaactatgccaacgatgagcgcttctacaacgaaggatgcgactctgattacgtcctcgcccactaccagagcccgaggcttatgatgtgcttgtgggagaagctccagaaggaatctcaagcagtgtgctgtgaataactctgaatcagtgttagcacgagccgtgcaaggacgcggtagatcagttagtcttgttgttgttgttgttgttggtggtggtggtggtggtggtatgcgtccagcatttttatgtgggtgggaagtttgtgtgtaacagttgtaacaaccggcgatcatcgttcttttgttccgatcaacgtttttgtttcacggaagagagtgttgatccatgtatatgaatgttgttctcaaatgagactttgagagagattgc

SEQ ID NO: 63044 - protein, 89 aa, Triticum aestivum
  peptide (1)..(89): Ceres Seq. ID no. 13583870
  misc_feature (3)..(88): Homolog of NCBI NO: 25403289 NR Description: protein T7N9.18 [imported] - Arabidopsis thaliana
  misc_feature (3)..(88): Homolog of NCBI NO: 22330635 NR Description: galactosyltransferase family [Arabidopsis
  misc_feature (3)..(88): Homolog of NCBI NO: 25406380 NR Description: hypothetical protein F25A4.23 [imported] -
  misc_feature (3)..(88): Homolog of NCBI NO: 25403275 NR Description: protein T24P13.20 [imported] - Arabidopsis
  misc_feature (3)..(88): Homolog of NCBI NO: 15223352 NR Description: galactosyltransferase family [Arabidopsis
  misc_feature (3)..(88): Homolog of NCBI NO: 34393273 NR Description: galactosyltransferase family-like protein
  misc_feature (3)..(88): Homolog of NCBI NO: 29150362 NR Description: putative galactosyltransferase
  misc_feature (21)..(84): Homolog of NCBI NO: 34894810 NR Description: P0554D10.8 [Oryza sativa (japonica
  misc_feature (3)..(89): Homolog of NCBI NO: 18397574 NR Description: galactosyltransferase family [Arabidopsis
  misc_feature (3)..(89): Homolog of NCBI NO: 6437545 NR Description: unknown protein [Arabidopsis thaliana]
EKISRDVAKFVVQGHQERTLQLFRLEDVAMGIWIQQYKDSGQQVNYANDERFYNEGCDSDYVLAHYQSPRLMMCLWEKLQKESQAVCCE

SEQ ID NO: 63045 - protein, 60 aa, Triticum aestivum
  peptide (1)..(60): Ceres Seq. ID no. 13583871
  misc_feature (1)..(59): Homolog of NCBI NO: 25403289 NR Description: protein T7N9.18 [imported] - Arabidopsis thaliana
  misc_feature (1)..(59): Homolog of NCBI NO: 22330635 NR Description: galactosyltransferase family [Arabidopsis
  misc_feature (1)..(59): Homolog of NCBI NO: 25406380 NR Description: hypothetical protein F25A4.23 [imported] -
  misc_feature (1)..(59): Homolog of NCBI NO: 25403275 NR Description: protein T24P13.20 [imported] - Arabidopsis
  misc_feature (1)..(59): Homolog of NCBI NO: 15223352 NR Description: galactosyltransferase family [Arabidopsis
  misc_feature (1)..(59): Homolog of NCBI NO: 34393273 NR Description: galactosyltransferase family-like protein
  misc_feature (1)..(59): Homolog of NCBI NO: 29150362 NR Description: putative galactosyltransferase
  misc_feature (1)..(55): Homolog of NCBI NO: 34894810 NR Description: P0554D10.8 [Oryza sativa (japonica
  misc_feature (1)..(60): Homolog of NCBI NO: 18397574 NR Description: galactosyltransferase family [Arabidopsis
  misc_feature (1)..(60): Homolog of NCBI NO: 6437545 NR Description: unknown protein [Arabidopsis thaliana]
MGIWIQQYKDSGQQVNYANDERFYNEGCDSDYVLAHYQSPRLMMCLWEKLQKESQAVCCE

SEQ ID NO: 63046 - protein, 44 aa, Triticum aestivum
  peptide (1)..(44): Ceres Seq. ID no. 13583872
SKKFQGTLLNSWFKVTKNEHFSYLDLKTWPWEYGSSNTKTVASK

SEQ ID NO: 63047 - DNA, 825 bp, Triticum aestivum
  misc_feature (1)..(825): Ceres Seq. ID no. 12585313
aaagcagaaaagaaagatcatcgagcttccaatccaggtcttcactcatcaccggtgcaatacgtgcgcgagtacaaaaccgcacagacatgtcgacggtggaggaggagctgtccgagtgcgaggtgctgtggccggagacgcgccacggcgctccggggagcgcgtgggggccatcgacggcggctcccagggcctccagggcccgccggcagtgctctgcgccggtggacattcccagggccgcgcacctgtccggcgggcgcgctggcctggacgacgacgaggaggaggaggaggacggcgccatggtgccgccgcacctgatggtgtcgcgcaggtggtcggaggggaaggcggcggcggccttctcgctgcggtccgggcccgggcgcgcgcaccgggacctcaaccacctgcgcaactccgtgctgcggatgaccggcttcatcgaagggtgacggacgaggcggacccgtcatctgtgcatatgtgcgagaaaagtcagtcaccacgcgtcttcccgacggtgttggccggtcaattttgttcggctcatcttccccgtggttgccaatcaaattaattaatttgcatccgttggttgatgcaaatcggccagtagtgagttaggattttttttttggaatggaatagtatacatttttctgaataatctacgactgtactactccctccgtccgaatacttgttatcaaaatgaacaaaaaacgatgtatttagaactaaaatacatttagatacatcctcttttattcattttaatgaaaagtatttccagacaaagggagtatgagattcttc

SEQ ID NO: 63048 - protein, 194 aa, Triticum aestivum
  peptide (1)..(194): Ceres Seq. ID no. 12585314
KQKRKIIELPIQVFTHHRCNTCASTKPHRHVDGGGGAVRVRGAVAGDAPRRSGERVGAIDGGSQGLQGPPAVLCAGGHSQGRAPVRRARWPGRRRGGGGGRRHGAAAPDGVAQVVGGEGGGGLLAAVRARARAPGPQPPAQLRAADDRLHRRVTDEADPSSVHMCEKSQSPRVFPTVLAGQFCSAHLPRGCQSN

SEQ ID NO: 63049 - protein, 152 aa, Triticum aestivum
  peptide (1)..(152): Ceres Seq. ID no. 12585315
  misc_feature (35)..(148): Pfam Name: Protein of unknown function, DUF584 Pfam Description: Protein of unknown function, DUF584
  misc_feature (57)..(149): Homolog of NCBI NO: 27817998 NR Description: OSJNBb0041J06.3 [Oryza sativa (japonica
  misc_feature (34)..(151): Homolog of NCBI NO: 25354620 NR Description: hypothetical protein AT4g04630 [imported] -
  misc_feature (59)..(151): Homolog of NCBI NO: 15220508 NR Description: hypothetical protein; protein id: At1g29640.1
  misc_feature (34)..(151): Homolog of NCBI NO: 18412629 NR Description: putative protein
  misc_feature (34)..(151): Homolog of NCBI NO: 26452217 NR Description: unknown protein [Arabidopsis thaliana]
  misc_feature (67)..(151): Homolog of NCBI NO: 18403527 NR Description: expressed protein
  misc_feature (35)..(148): Homolog of NCBI NO: 34910794 NR Description: P0042A10.26 [Oryza sativa (japonica
SRKERSSSFQSRSSLITGAIRARVQNRTDMSTVEEELSECEVLWPETRHGAPGSAWGPSTAAPRASRARRQCSAPVDIPRAAHLSGGRAGLDDDEEEEEDGAMVPPHLMVSRRWSEGKAAAAFSLRSGPGRAHRDLNHLRNSVLRMTGFIEG

SEQ ID NO: 63050 - protein, 123 aa, Triticum aestivum
  peptide (1)..(123): Ceres Seq. ID no. 12585316
  misc_feature (6)..(119): Pfam Name: Protein of unknown function, DUF584 Pfam Description: Protein of unknown function, DUF584
  misc_feature (28)..(120): Homolog of NCBI NO: 27817998 NR Description: OSJNBb0041J06.3 [Oryza sativa (japonica
  misc_feature (5)..(122): Homolog of NCBI NO: 25354620 NR Description: hypothetical protein AT4g04630 [imported] -
  misc_feature (30)..(122): Homolog of NCBI NO: 15220508 NR Description: hypothetical protein; protein id: At1g29640.1
  misc_feature (5)..(122): Homolog of NCBI NO: 18412629 NR Description: putative protein
  misc_feature (5)..(122): Homolog of NCBI NO: 26452217 NR Description: unknown protein [Arabidopsis thaliana]
  misc_feature (38)..(122): Homolog of NCBI NO: 18403527 NR Description: expressed protein
  misc_feature (6)..(119): Homolog of NCBI NO: 34910794 NR Description: P0042A10.26 [Oryza sativa (japonica
MSTVEEELSECEVLWPETRHGAPGSAWGPSTAAPRASRARRQCSAPVDIPRAAHLSGGRAGLDDDEEEEEDGAMVPPHLMVSRRWSEGKAAAAFSLRSGPGRAHRDLNHLRNSVLRMTGFIEG

SEQ ID NO: 63051 - DNA, 1080 bp, Triticum aestivum
  misc_feature (1)..(1080): Ceres Seq. ID no. 13596939
atcatagattacttccaagtagataattgaatattaaataagtaaaaattctgcacaatgtagtactgataacatggtgttagttcctatgttttttttgcttaaagcctatattagtcgaatttaattggtttttacagttacacccacagattacagcattcaatgagttcgatttgtggcagaatcaatgttgttcgttgttctgttccatgattcctagcagttttttgtttcatcataggtggtcacattcagattcagatttttataattacattcagattttttttacttaatgatgatatgtgtagccatcctccctggcgctgcaatctgtgagtatgttggtgcattgccgaggactggagagaaaaggtcagggtctgatatgcatatgccagcacttcatgttgagaacaattccgaggcaccatcggcaccggagtactgtatcgatgctggatccgttggaagtttcgcaaggttcataaaccacagctgcaaccctaacctctttgcccagtgtgtcctaaccaatcaccacgacatcaagctagaaaaggtgatgctttttgctgccgacacggtagcacctaacgtcgacaactgcgatgtcaggaactccctcacaattgccgaatatgtcgctgaaattacaacttctacagacagaccaaggagttgagttgtgaggcccccacctacatgacacaccaaactgatatcaatgagaaaaggcgtagtattcccattgactggttgactgaggtgcaatacaagcttgagctactaggtgaaacactattccttgctgtcaacatcattgatagatcaatgcatagaaaaacatgtctcgagttttctcttgaatgaaacctgcaagtttctcaactatttagtgaagcttaccttgaaaagaactataaatactacaggaaggagagcaagacaatgacagttcgttggaatatggatttttagaggatatttatgggttcaaacctctgtaattacatattactttccttgctgatgctattgctcatgttataaaactgtcctacttcgcaaaaaatg

SEQ ID NO: 63052 - protein, 129 aa, Triticum aestivum
  peptide (1)..(129): Ceres Seq. ID no. 15222006
  misc_feature (25)..(100): Pfam Name: SET domain Pfam Description: SET domain
  misc_feature (7)..(94): Homolog of NCBI NO: 33317792 NR Description: Unknown [Homo sapiens]
  misc_feature (15)..(101): Homolog of NCBI NO: 22121718 NR Description: SET domain-containing protein SET104 [Zea mays]
  misc_feature (10)..(100): Homolog of NCBI NO: 15226918 NR Description: SET-domain transcriptional regulator family
  misc_feature (24)..(100): Homolog of NCBI NO: 13517749 NR Description: SUVH4 [Arabidopsis thaliana]
  misc_feature (24)..(100): Homolog of NCBI NO: 27502110 NR Description: SET domain histone methyltransferase SUVH4
  misc_feature (24)..(100): Homolog of NCBI NO: 15240758 NR Description: SET-domain transcriptional regulator family
  misc_feature (86)..(120): Homolog of NCBI NO: 3913236 NR Description: G2/mitotic-specific cyclin 2 (B-like cyclin)
  misc_feature (25)..(100): Homolog of NCBI NO: 22121716 NR Description: SET domain-containing protein SET118 [Zea mays]
  misc_feature (25)..(100): Homolog of NCBI NO: 34907056 NR Description: putative SUVH4 [Oryza sativa (japonica
MMICVAILPGAAICEYVGALPRTGEKRSGSDMHMPALHVENNSEAPSAPEYCIDAGSVGSFARFINHSCNPNLFAQCVLTNHHDIKLEKVMLFAADTVAPNVDNCDVRNSLTIAEYVAEITTSTDRPRS

SEQ ID NO: 63053 - protein, 128 aa, Triticum aestivum
  peptide (1)..(128): Ceres Seq. ID no. 15222007
  misc_feature (24)..(99): Pfam Name: SET domain Pfam Description: SET domain
  misc_feature (6)..(93): Homolog of NCBI NO: 33317792 NR Description: Unknown [Homo sapiens]
  misc_feature (14)..(100): Homolog of NCBI NO: 22121718 NR Description: SET domain-containing protein SET104 [Zea mays]
  misc_feature (9)..(99): Homolog of NCBI NO: 15226918 NR Description: SET-domain transcriptional regulator family
  misc_feature (23)..(99): Homolog of NCBI NO: 13517749 NR Description: SUVH4 [Arabidopsis thaliana]
  misc_feature (23)..(99): Homolog of NCBI NO: 27502110 NR Description: SET domain histone methyltransferase SUVH4
  misc_feature (23)..(99): Homolog of NCBI NO: 15240758 NR Description: SET-domain transcriptional regulator family
  misc_feature (85)..(119): Homolog of NCBI NO: 3913236 NR Description: G2/mitotic-specific cyclin 2 (B-like cyclin)
  misc_feature (24)..(99): Homolog of NCBI NO: 22121716 NR Description: SET domain-containing protein SET118 [Zea mays]
  misc_feature (24)..(99): Homolog of NCBI NO: 34907056 NR Description: putative SUVH4 [Oryza sativa (japonica
MICVAILPGAAICEYVGALPRTGEKRSGSDMHMPALHVENNSEAPSAPEYCIDAGSVGSFARFINHSCNPNLFAQCVLTNHHDIKLEKVMLFAADTVAPNVDNCDVRNSLTIAEYVAEITTSTDRPRS

SEQ ID NO: 63054 - protein, 98 aa, Triticum aestivum
  peptide (1)..(98): Ceres Seq. ID no. 15222008
  misc_feature (1)..(69): Pfam Name: SET domain Pfam Description: SET domain
  misc_feature (1)..(63): Homolog of NCBI NO: 33317792 NR Description: Unknown [Homo sapiens]
  misc_feature (1)..(70): Homolog of NCBI NO: 22121718 NR Description: SET domain-containing protein SET104 [Zea mays]
  misc_feature (1)..(69): Homolog of NCBI NO: 15226918 NR Description: SET-domain transcriptional regulator family
  misc_feature (1)..(69): Homolog of NCBI NO: 13517749 NR Description: SUVH4 [Arabidopsis thaliana]
  misc_feature (1)..(69): Homolog of NCBI NO: 27502110 NR Description: SET domain histone methyltransferase SUVH4
  misc_feature (1)..(69): Homolog of NCBI NO: 15240758 NR Description: SET-domain transcriptional regulator family
  misc_feature (55)..(89): Homolog of NCBI NO: 3913236 NR Description: G2/mitotic-specific cyclin 2 (B-like cyclin)
  misc_feature (1)..(69): Homolog of NCBI NO: 22121716 NR Description: SET domain-containing protein SET118 [Zea mays]
  misc_feature (1)..(69): Homolog of NCBI NO: 34907056 NR Description: putative SUVH4 [Oryza sativa (japonica
MHMPALHVENNSEAPSAPEYCIDAGSVGSFARFINHSCNPNLFAQCVLTNHHDIKLEKVMLFAADTVAPNVDNCDVRNSLTIAEYVAEITTSTDRPRS

SEQ ID NO: 63055 - DNA, 595 bp, Triticum aestivum
  misc_feature (1)..(595): Ceres Seq. ID no. 15225794
cccaagcatgagctcctctcccccgctctcctccacccctcccatggccgcccccagctcctgggcctccccgttccacgaaaagagagcttagcgctgccgagccctccgtcctctccacttcccggctgctttctccgtccgtccggtcgtcaatcttcgtcgagcagagagagggagggaggaggtcgtcagattcgcgcgagatccatggggaagtacgtggagctgctggacatgggggtgcgcatcgccgcgcggttccactcccactgcccgcagacggcccgcatgtactaccacccccccgcctcctcctccgccgcccccggcgccggcgacggcggccggatggtgcccggagaaggcgccgtggccatggccatgatgaagaggcagcagcgggccgccatcgacgccacggagatcatcctctacaccgtcgtctaggccggccggttgctgctgcgctcatccggatttatcgtaccattgaagggagagagagatgctatcttattttattgttacctttgttttattttcgaatcgaggagagggaaatgaaagacgggagtgaatgttcgattgattg

SEQ ID NO: 63056 - protein, 149 aa, Triticum aestivum
  peptide (1)..(149): Ceres Seq. ID no. 15225795
  misc_feature (73)..(119): Homolog of NCBI NO: 37534372 NR Description: unknown protein [Oryza sativa (japonica
  misc_feature (71)..(127): Homolog of NCBI NO: 15230306 NR Description: expressed protein [Arabidopsis thaliana]
  misc_feature (71)..(116): Homolog of NCBI NO: 37534370 NR Description: unknown protein [Oryza sativa (japonica
  misc_feature (71)..(149): Homolog of NCBI NO: 33146906 NR Description: unknown protein [Oryza sativa (japonica
PKHELLSPALLHPSHGRPQLLGLPVPRKESLALPSPPSSPLPGCFLRPSGRQSSSSREREGGGRQIRARSMGKYVELLDMGVRIAARFHSHCPQTARMYYHPPASSSAAPGAGDGGRMVPGEGAVAMAMMKRQQRAAIDATEIILYTVV

SEQ ID NO: 63057 - protein, 79 aa, Triticum aestivum
  peptide (1)..(79): Ceres Seq. ID no. 15225796
  misc_feature (3)..(49): Homolog of NCBI NO: 37534372 NR Description: unknown protein [Oryza sativa (japonica
  misc_feature (1)..(57): Homolog of NCBI NO: 15230306 NR Description: expressed protein [Arabidopsis thaliana]
  misc_feature (1)..(46): Homolog of NCBI NO: 37534370 NR Description: unknown protein [Oryza sativa (japonica
  misc_feature (1)..(79): Homolog of NCBI NO: 33146906 NR Description: unknown protein [Oryza sativa (japonica
MGKYVELLDMGVRIAARFHSHCPQTARMYYHPPASSSAAPGAGDGGRMVPGEGAVAMAMMKRQQRAAIDATEIILYTVV

SEQ ID NO: 63058 - DNA, 1232 bp, Triticum aestivum
  misc_feature (1)..(1232): Ceres Seq. ID no. 15178699
cattccaatcaagaaaggcatcaagccactccagtattcctcctttgcccgtgagtgtgtcctctcagtacgtgggtgtgtgtgagttcatctgtacgtgagtgagagtgagagcagcttgtgtgcagccgctggttttagctaggcttcctctgattagtacaaagtgagagctagctatttgtagtttcgggctaacaattggcatcagagcctcaggttatgccgaagcatatgccgaaggaaggcgtcgccggcgacggctccaagaccgccgggcagagctcggctgaggacacccgtgcggtggacgcgctcgcgctgcgaggcaggccgggaggtgagctgggtgcgccacgctccgtgcgagacgtgggcatgtccagtacctccttccctctcctcacgcggaccaactaccccagttggtccatcatgacaaatgtcatcatggagacgaggcatatgtggaaagccgtggaaaccgacgatgtcgagtacaaggaggaccggcgggcgatggaagcgatcttgcggtccgtcccagaggagatggtgctcacccttggcgccaaggagacggccaaggaagcatgggagaccatcaagactctgcgcatcggcgtggagcgcgtacgggagtcgaaggcccagaccttgcgcctctagtacgaggaaatccggttcaaggccggtgaacaagtcgacgacttcgccttgtggctgcaaggtctcgtcaacgagctcggaacactcggagatcccatcgacaacaagatggtcattctcaagttcctccgcgtcgtccccaggcagtacaagcaactggcctggtccatcgagagtttggtggatctctccaccatgacgatcgaggagctggtagggcggctgaaggttgtcgaggggcgcggcgacgaagccgacaatcgtgttggcggtgaactactgctcaccaaggagtagtgggacgcgcagcttcagcagtgcggctgcgacggctcttccggcagagggggaggagcccccacaggaagcagaggtcgcggaagaggcggaggccgcacccagagcgctggcggcaaccgcggtgcgcaagccaaggcgggcagggcgaggcgctggcaactactatataattgcatgtgatgtttattatgtttatgcatcttgtttacttagaacgacggtagtaaataagatgatcccttacagcaaaaaaaaaaaaaaaa

SEQ ID NO: 63059 - protein, 148 aa, Triticum aestivum
  peptide (1)..(148): Ceres Seq. ID no. 15178700
  misc_feature (6)..(148): Homolog of NCBI NO: 22758275 NR Description: Putative gag-pol polyprotein
  misc_feature (6)..(148): Homolog of NCBI NO: 34905130 NR Description: P0686C03.48 [Oryza sativa (japonica
  misc_feature (13)..(148): Homolog of NCBI NO: 37532710 NR Description: putative retroelement [Oryza sativa (japonica
  misc_feature (35)..(148): Homolog of NCBI NO: 38346799 NR Description: OSJNBa0088A01.6 [Oryza sativa (japonica
  misc_feature (35)..(148): Homolog of NCBI NO: 34915242 NR Description: P0045F02.15 [Oryza sativa (japonica
  misc_feature (36)..(148): Homolog of NCBI NO: 37534596 NR Description: putative gag-pol polyprotein
  misc_feature (15)..(148): Homolog of NCBI NO: 37535062 NR Description: putative lectin receptor kinase
  misc_feature (36)..(148): Homolog of NCBI NO: 38567926 NR Description: OSJNBa0033H08.2 [Oryza sativa (japonica
  misc_feature (18)..(148): Homolog of NCBI NO: 37535062 NR Description: putative lectin receptor kinase
  misc_feature (10)..(148): Homolog of NCBI NO: 37532690 NR Description: putative retroelement [Oryza sativa (japonica
MPKHMPKEGVAGDGSKTAGQSSAEDTRAVDALALRGRPGGELGAPRSVRDVGMSSTSFPLLTRTNYPSWSIMTNVIMETRHMWKAVETDDVEYKEDRRAMEAILRSVPEEMVLTLGAKETAKEAWETIKTLRIGVERVRESKAQTLRL

SEQ ID NO: 63060 - protein, 144 aa, Triticum aestivum
  peptide (1)..(144): Ceres Seq. ID no. 15178701
  misc_feature (2)..(144): Homolog of NCBI NO: 22758275 NR Description: Putative gag-pol polyprotein
  misc_feature (2)..(144): Homolog of NCBI NO: 34905130 NR Description: P0686C03.48 [Oryza sativa (japonica
  misc_feature (9)..(144): Homolog of NCBI NO: 37532710 NR Description: putative retroelement [Oryza sativa (japonica
  misc_feature (31)..(144): Homolog of NCBI NO: 38346799 NR Description: OSJNBa0088A01.6 [Oryza sativa (japonica
  misc_feature (31)..(144): Homolog of NCBI NO: 34915242 NR Description: P0045F02.15 [Oryza sativa (japonica
  misc_feature (32)..(144): Homolog of NCBI NO: 37534596 NR Description: putative gag-pol polyprotein
  misc_feature (11)..(144): Homolog of NCBI NO: 37535062 NR Description: putative lectin receptor kinase
  misc_feature (32)..(144): Homolog of NCBI NO: 38567926 NR Description: OSJNBa0033H08.2 [Oryza sativa (japonica
  misc_feature (14)..(144): Homolog of NCBI NO: 37535062 NR Description: putative lectin receptor kinase
  misc_feature (6)..(144): Homolog of NCBI NO: 37532690 NR Description: putative retroelement [Oryza sativa (japonica
MPKEGVAGDGSKTAGQSSAEDTRAVDALALRGRPGGELGAPRSVRDVGMSSTSFPLLTRTNYPSWSIMTNVIMETRHMWKAVETDDVEYKEDRRAMEAILRSVPEEMVLTLGAKETAKEAWETIKTLRIGVERVRESKAQTLRL

SEQ ID NO: 63061 - protein, 141 aa, Triticum aestivum
  peptide (1)..(141): Ceres Seq. ID no. 15178702
MSSWRRGICGKPWKPTMSSTRRTGGRWKRSCGPSQRRWCSPLAPRRRPRKHGRPSRLCASAWSAYGSRRPRPCASSTRKSGSRPVNKSTTSPCGCKVSSTSSEHSEIPSTTRWSFSSSSASSPGSTSNWPGPSRVWWISPP

SEQ ID NO: 63062 - DNA, 752 bp, Triticum aestivum
  misc_feature (1)..(752): Ceres Seq. ID no. 12585325
atcttcccctccgacttcgccatggacagcaccgccccgaactcttcttccgccgccgccgtcgccgccgcggccgcggccgcttccgcttccggtaacggcgtacaagggggaacgggtggggaccgtcccgaggacccgtcgaagcagaacctggcgcaggtcacgggctcgatccagaagaccctgggcctgctccaccagctcaacctcaacgtctcctccttcagctccgcgtcccagctccccctcctccagcgcctgaacgcgctcgtggcggagctcgacacgatgcagaagctcgccgacgggtgcaacatccaggtgcccatggaggtcgtcaatttgattgatgacgggaagaaccccgatgagttcaccagggacgtgctcaacagctgcatcgccaagaaccagatcaccaagggcaagaccgatgctttcaagagcctgaggaagcatcttcttgaggagctggaagaagcttttccagatgacgttgaagcgtacagacagatacgtgctacctctgctgctgagtcaaagaggttggctcagtcccaaagtgctttgcctaatggagatgccaaagtgaaacctgagcattgacagaataacccaagtgcaaagagcaagatcttgctttatatttcctatagtttttcttaggaaggctttgtgaaccaacaactgatataaccttgtatgtgctgctccctcatatgagtgatcaatatttatgtatattagtc

SEQ ID NO: 63063 - protein, 202 aa, Triticum aestivum
  peptide (1)..(202): Ceres Seq. ID no. 12585326
  misc_feature (86)..(201): Homolog of NCBI NO: 29841376 NR Description: similar to GenBank Accession Number BC003353
  misc_feature (66)..(177): Homolog of NCBI NO: 9799628 NR Description: Nut2 [Drosophila melanogaster]
  misc_feature (66)..(174): Homolog of NCBI NO: 31216855 NR Description: ENSANGP00000021242 [Anopheles gambiae]
  misc_feature (59)..(174): Homolog of NCBI NO: 13097162 NR Description: Similar to CG5057 gene product [Homo sapiens]
  misc_feature (59)..(174): Homolog of NCBI NO: 34873422 NR Description: similar to DNA segment, Chr 13, Wayne State
  misc_feature (59)..(174): Homolog of NCBI NO: 20070410 NR Description: DNA segment, Chr 13, Wayne State University 50,
  misc_feature (37)..(174): Homolog of NCBI NO: 29145113 NR Description: similar to DNA segment, Chr 13, Wayne State
  misc_feature (13)..(181): Homolog of NCBI NO: 25403266 NR Description: protein T24P13.4 [imported] - Arabidopsis
  misc_feature (46)..(201): Homolog of NCBI NO: 15238215 NR Description: putative protein; protein id: At5g41910.1
  misc_feature (13)..(201): Homolog of NCBI NO: 18396004 NR Description: Expressed protein
IFPSDFAMDSTAPNSSSAAAVAAAAAAASASGNGVQGGTGGDRPEDPSKQNLAQVTGSIQKTLGLLHQLNLNVSSFSSASQLPLLQRLNALVAELDTMQKLADGCNIQVPMEVVNLIDDGKNPDEFTRDVLNSCIAKNQITKGKTDAFKSLRKHLLEELEEAFPDDVEAYRQIRATSAAESKRLAQSQSALPNGDAKVKPEH

SEQ ID NO: 63064 - protein, 195 aa, Triticum aestivum
  peptide (1)..(195): Ceres Seq. ID no. 12585327
  misc_feature (79)..(194): Homolog of NCBI NO: 29841376 NR Description: similar to GenBank Accession Number BC003353
  misc_feature (59)..(170): Homolog of NCBI NO: 9799628 NR Description: Nut2 [Drosophila melanogaster]
  misc_feature (59)..(167): Homolog of NCBI NO: 31216855 NR Description: ENSANGP00000021242 [Anopheles gambiae]
  misc_feature (52)..(167): Homolog of NCBI NO: 13097162 NR Description: Similar to CG5057 gene product [Homo sapiens]
  misc_feature (52)..(167): Homolog of NCBI NO: 34873422 NR Description: similar to DNA segment, Chr 13, Wayne State
  misc_feature (52)..(167): Homolog of NCBI NO: 20070410 NR Description: DNA segment, Chr 13, Wayne State University 50,
  misc_feature (30)..(167): Homolog of NCBI NO: 29145113 NR Description: similar to DNA segment, Chr 13, Wayne State
  misc_feature (6)..(174): Homolog of NCBI NO: 25403266 NR Description: protein T24P13.4 [imported] - Arabidopsis
  misc_feature (39)..(194): Homolog of NCBI NO: 15238215 NR Description: putative protein; protein id: At5g41910.1
  misc_feature (6)..(194): Homolog of NCBI NO: 18396004 NR Description: Expressed protein
MDSTAPNSSSAAAVAAAAAAASASGNGVQGGTGGDRPEDPSKQNLAQVTGSIQKTLGLLHQLNLNVSSFSSASQLPLLQRLNALVAELDTMQKLADGCNIQVPMEVVNLIDDGKNPDEFTRDVLNSCIAKNQITKGKTDAFKSLRKHLLEELEEAFPDDVEAYRQIRATSAAESKRLAQSQSALPNGDAKVKPEH

SEQ ID NO: 63065 - protein, 105 aa, Triticum aestivum
  peptide (1)..(105): Ceres Seq. ID no. 12585328
  misc_feature (1)..(104): Homolog of NCBI NO: 29841376 NR Description: similar to GenBank Accession Number BC003353
  misc_feature (1)..(80): Homolog of NCBI NO: 9799628 NR Description: Nut2 [Drosophila melanogaster]
  misc_feature (1)..(77): Homolog of NCBI NO: 31216855 NR Description: ENSANGP00000021242 [Anopheles gambiae]
  misc_feature (1)..(77): Homolog of NCBI NO: 13097162 NR Description: Similar to CG5057 gene product [Homo sapiens]
  misc_feature (1)..(77): Homolog of NCBI NO: 34873422 NR Description: similar to DNA segment, Chr 13, Wayne State
  misc_feature (1)..(77): Homolog of NCBI NO: 20070410 NR Description: DNA segment, Chr 13, Wayne State University 50,
  misc_feature (1)..(77): Homolog of NCBI NO: 29145113 NR Description: similar to DNA segment, Chr 13, Wayne State
  misc_feature (1)..(84): Homolog of NCBI NO: 25403266 NR Description: protein T24P13.4 [imported] - Arabidopsis
  misc_feature (1)..(104): Homolog of NCBI NO: 15238215 NR Description: putative protein; protein id: At5g41910.1
  misc_feature (1)..(104): Homolog of NCBI NO: 18396004 NR Description: Expressed protein
MQKLADGCNIQVPMEVVNLIDDGKNPDEFTRDVLNSCIAKNQITKGKTDAFKSLRKHLLEELEEAFPDDVEAYRQIRATSAAESKRLAQSQSALPNGDAKVKPEH

SEQ ID NO: 63066 - DNA, 431 bp, Triticum aestivum
  misc_feature (1)..(431): Ceres Seq. ID no. 12585579
agcgtcgcctcgactcaaccagagcacataataagaatcaaacaacgcaacctctgcgcgcgagagatcgacacatccatcggaatcacaagacagagatgagctcgtcggcggccaagaagggggcgtcgctggtggcggcgacgagcatggcggccgtggaggcgctcaaggaccaggcggggctgtgccgctgggactacgcgctccgctcgctctaccaccgcgccgtcccggcgtccctatcctcctcctcccagcacgccgggagcggcagcgcggcggccgtcggcagggctgcgcggcccaggcgatccgaggaggagaagctgcacaaggcgtaccacatcgtctgctggggacccaactgaactgattgtaatagccaaactgattagcactaataagcacattcgtgttctgcttctcct

SEQ ID NO: 63067 - protein, 122 aa, Triticum aestivum
  peptide (1)..(122): Ceres Seq. ID no. 12585580
  misc_feature (35)..(122): Homolog of NCBI NO: 30681389 NR Description: wound-induced protein, putative [Arabidopsis
  misc_feature (47)..(122): Homolog of NCBI NO: 15234987 NR Description: probable wound-induced protein
  misc_feature (45)..(122): Homolog of NCBI NO: 82114 NR Description: wound-induced protein - tomato (fragment)
  misc_feature (35)..(122): Homolog of NCBI NO: 38344804 NR Description: OSJNBa0043L09.24 [Oryza sativa (japonica
  misc_feature (35)..(122): Homolog of NCBI NO: 38344805 NR Description: OSJNBa0043L09.25 [Oryza sativa (japonica
  misc_feature (33)..(122): Homolog of NCBI NO: 38344798 NR Description: OSJNBa0043L09.18 [Oryza sativa (japonica
  misc_feature (33)..(122): Homolog of NCBI NO: 38636812 NR Description: unknown protein [Oryza sativa (japonica
  misc_feature (35)..(122): Homolog of NCBI NO: 38344803 NR Description: OSJNBa0043L09.23 [Oryza sativa (japonica
  misc_feature (35)..(122): Homolog of NCBI NO: 38344799 NR Description: OSJNBa0043L09.19 [Oryza sativa (japonica
RRLDSTRAHNKNQTTQPLRARDRHIHRNHKTEMSSSAAKKGASLVAATSMAAVEALKDQAGLCRWDYALRSLYHRAVPASLSSSSQHAGSGSAAAVGRAARPRRSEEEKLHKAYHIVCWGPN

SEQ ID NO: 63068 - protein, 90 aa, Triticum aestivum
  peptide (1)..(90): Ceres Seq. ID no. 12585581
  misc_feature (3)..(90): Homolog of NCBI NO: 30681389 NR Description: wound-induced protein, putative [Arabidopsis
  misc_feature (15)..(90): Homolog of NCBI NO: 15234987 NR Description: probable wound-induced protein
  misc_feature (13)..(90): Homolog of NCBI NO: 82114 NR Description: wound-induced protein - tomato (fragment)
  misc_feature (3)..(90): Homolog of NCBI NO: 38344804 NR Description: OSJNBa0043L09.24 [Oryza sativa (japonica
  misc_feature (3)..(90): Homolog of NCBI NO: 38344805 NR Description: OSJNBa0043L09.25 [Oryza sativa (japonica
  misc_feature (1)..(90): Homolog of NCBI NO: 38344798 NR Description: OSJNBa0043L09.18 [Oryza sativa (japonica
  misc_feature (1)..(90): Homolog of NCBI NO: 38636812 NR Description: unknown protein [Oryza sativa (japonica
  misc_feature (3)..(90): Homolog of NCBI NO: 38344803 NR Description: OSJNBa0043L09.23 [Oryza sativa (japonica
  misc_feature (3)..(90): Homolog of NCBI NO: 38344799 NR Description: OSJNBa0043L09.19 [Oryza sativa (japonica
MSSSAAKKGASLVAATSMAAVEALKDQAGLCRWDYALRSLYHRAVPASLSSSSQHAGSGSAAAVGRAARPRRSEEEKLHKAYHIVCWGPN

SEQ ID NO: 63069 - protein, 73 aa, Triticum aestivum
  peptide (1)..(73): Ceres Seq. ID no. 12585582
  misc_feature (1)..(73): Homolog of NCBI NO: 30681389 NR Description: wound-induced protein, putative [Arabidopsis
  misc_feature (1)..(73): Homolog of NCBI NO: 15234987 NR Description: probable wound-induced protein
  misc_feature (1)..(73): Homolog of NCBI NO: 82114 NR Description: wound-induced protein - tomato (fragment)
  misc_feature (1)..(73): Homolog of NCBI NO: 38344804 NR Description: OSJNBa0043L09.24 [Oryza sativa (japonica
  misc_feature (1)..(73): Homolog of NCBI NO: 38344805 NR Description: OSJNBa0043L09.25 [Oryza sativa (japonica
  misc_feature (1)..(73): Homolog of NCBI NO: 38344798 NR Description: OSJNBa0043L09.18 [Oryza sativa (japonica
  misc_feature (1)..(73): Homolog of NCBI NO: 38636812 NR Description: unknown protein [Oryza sativa (japonica
  misc_feature (1)..(73): Homolog of NCBI NO: 38344803 NR Description: OSJNBa0043L09.23 [Oryza sativa (japonica
  misc_feature (1)..(73): Homolog of NCBI NO: 38344799 NR Description: OSJNBa0043L09.19 [Oryza sativa (japonica
MAAVEALKDQAGLCRWDYALRSLYHRAVPASLSSSSQHAGSGSAAAVGRAARPRRSEEEKLHKAYHIVCWGPN

SEQ ID NO: 63070 - DNA, 1065 bp, Triticum aestivum
  misc_feature (1)..(1065): Ceres Seq. ID no. 13596609
ctagaacatcctaatcgaaaagatttgttcccgtttcatttggtgtctttgctcagcagcgtgtctctgttgagctctagctgtactgcatcgttatccaatactggcgatacttgtggtgggttttgggttttggatgagcacccacaatgacgagtgccggcggtcactcacaatccctgtcatgggtcttggaggagtcatttttctcatgtcgctggcgggatttgtgggtgcttggaagaacatttcttgcttgctttggacatatctaataatgctgttcgtggtcctggtggcaatcatggtcttcacagtgcttgcgtttatcattacaaatactggaactggtcatgctgttcctgggtccagatataaagagtatcgtcttcaggactacagttcttggttcgtcaaacagctcaatgacactgataaatggactcatctgagaagttgccttgtgaagtcggatgattgcaatagcttgtcaaaaagatataagactctaaaacaatacaagctcgctgagctgactcccattgagtctggctgttgccgcccaccagcggagtgtggatatccagctttgaatgcttccaattttgatctgagctaccatccggtgagcacaaacgtcgactgcaaactgtacaaaaatgatcggttcctcaggtgctatgactgtaattcttgcaaagctggtgttgcgcaatacatgaagacagagtggcgagtggttgccatcttcaatgtgatattgtttatcattttgtcattcgtgtactttgttggctgctgcgcacgtcgacatgctggaggtagtgattctaaagttcctcgaagatgactcttactttgaagtgaatcctctctatgattcacgtgtcacagcgagagttagctttaccgtcccttgtaaaacattgttcattcaagttcagctgatgaaatggagtgtcaaggcttctgttctgtgggcgatttctttgtgccagtagcattttggacatctatgaaaatgaacgtcccacaatcttctgaaatacagcctcatgatcttgt

SEQ ID NO: 63071 - protein, 237 aa, Triticum aestivum
  peptide (1)..(237): Ceres Seq. ID no. 13596610
  misc_feature (1)..(213): Pfam Name: Tetraspanin family Pfam Description: Tetraspanin family
  misc_feature (1)..(235): Homolog of NCBI NO: 15231187 NR Description: senescence-associated protein family [Arabidopsis
  misc_feature (1)..(226): Homolog of NCBI NO: 21537169 NR Description: senescence-associated protein-like protein
  misc_feature (1)..(226): Homolog of NCBI NO: 15234743 NR Description: senescence-associated protein family [Arabidopsis
  misc_feature (1)..(226): Homolog of NCBI NO: 15234374 NR Description: senescence-associated protein, putative
  misc_feature (1)..(232): Homolog of NCBI NO: 20197174 NR Description: hypothetical protein [Arabidopsis thaliana]
  misc_feature (1)..(226): Homolog of NCBI NO: 3551954 NR Description: senescence-associated protein 5 [Hemerocallis
  misc_feature (1)..(226): Homolog of NCBI NO: 29367553 NR Description: senescence-associated protein-like protein
  misc_feature (45)..(213): Homolog of NCBI NO: 25404415 NR Description: hypothetical protein F9N12.12 [imported] -
  misc_feature (1)..(233): Homolog of NCBI NO: 30696823 NR Description: senescence-associated protein family [Arabidopsis
  misc_feature (1)..(237): Homolog of NCBI NO: 37535820 NR Description: putative senescence-associated protein
MSTHNDECRRSLTIPVMGLGGVIFLMSLAGFVGAWKNISCLLWTYLIMLFVVLVAIMVFTVLAFIITNTGTGHAVPGSRYKEYRLQDYSSWFVKQLNDTDKWTHLRSCLVKSDDCNSLSKRYKTLKQYKLAELTPIESGCCRPPAECGYPALNASNFDLSYHPVSTNVDCKLYKNDRFLRCYDCNSCKAGVAQYMKTEWRVVAIFNVILFIILSFVYFVGCCARRHAGGSDSKVPRR

SEQ ID NO: 63072 - protein, 221 aa, Triticum aestivum
  peptide (1)..(221): Ceres Seq. ID no. 13596611
  misc_feature (1)..(197): Pfam Name: Tetraspanin family Pfam Description: Tetraspanin family
  misc_feature (1)..(219): Homolog of NCBI NO: 15231187 NR Description: senescence-associated protein family [Arabidopsis
  misc_feature (1)..(210): Homolog of NCBI NO: 21537169 NR Description: senescence-associated protein-like protein
  misc_feature (1)..(210): Homolog of NCBI NO: 15234743 NR Description: senescence-associated protein family [Arabidopsis
  misc_feature (1)..(210): Homolog of NCBI NO: 15234374 NR Description: senescence-associated protein, putative
  misc_feature (1)..(216): Homolog of NCBI NO: 20197174 NR Description: hypothetical protein [Arabidopsis thaliana]
  misc_feature (1)..(210): Homolog of NCBI NO: 3551954 NR Description: senescence-associated protein 5 [Hemerocallis
  misc_feature (1)..(210): Homolog of NCBI NO: 29367553 NR Description: senescence-associated protein-like protein
  misc_feature (29)..(197): Homolog of NCBI NO: 25404415 NR Description: hypothetical protein F9N12.12 [imported] -
  misc_feature (1)..(217): Homolog of NCBI NO: 30696823 NR Description: senescence-associated protein family [Arabidopsis
  misc_feature (1)..(221): Homolog of NCBI NO: 37535820 NR Description: putative senescence-associated protein
MGLGGVIFLMSLAGFVGAWKNISCLLWTYLIMLFVVLVAIMVFTVLAFIITNTGTGHAVPGSRYKEYRLQDYSSWFVKQLNDTDKWTHLRSCLVKSDDCNSLSKRYKTLKQYKLAELTPIESGCCRPPAECGYPALNASNFDLSYHPVSTNVDCKLYKNDRFLRCYDCNSCKAGVAQYMKTEWRVVAIFNVILFIILSFVYFVGCCARRHAGGSDSKVPRR

SEQ ID NO: 63073 - protein, 212 aa, Triticum aestivum
  peptide (1)..(212): Ceres Seq. ID no. 13596612
  misc_feature (1)..(188): Pfam Name: Tetraspanin family Pfam Description: Tetraspanin family
  misc_feature (1)..(210): Homolog of NCBI NO: 15231187 NR Description: senescence-associated protein family [Arabidopsis
  misc_feature (1)..(201): Homolog of NCBI NO: 21537169 NR Description: senescence-associated protein-like protein
  misc_feature (1)..(201): Homolog of NCBI NO: 15234743 NR Description: senescence-associated protein family [Arabidopsis
  misc_feature (1)..(201): Homolog of NCBI NO: 15234374 NR Description: senescence-associated protein, putative
  misc_feature (1)..(207): Homolog of NCBI NO: 20197174 NR Description: hypothetical protein [Arabidopsis thaliana]
  misc_feature (1)..(201): Homolog of NCBI NO: 3551954 NR Description: senescence-associated protein 5 [Hemerocallis
  misc_feature (1)..(201): Homolog of NCBI NO: 29367553 NR Description: senescence-associated protein-like protein
  misc_feature (20)..(188): Homolog of NCBI NO: 25404415 NR Description: hypothetical protein F9N12.12 [imported] -
  misc_feature (1)..(208): Homolog of NCBI NO: 30696823 NR Description: senescence-associated protein family [Arabidopsis
  misc_feature (1)..(212): Homolog of NCBI NO: 37535820 NR Description: putative senescence-associated protein
MSLAGFVGAWKNISCLLWTYLIMLFVVLVAIMVFTVLAFIITNTGTGHAVPGSRYKEYRLQDYSSWFVKQLNDTDKWTHLRSCLVKSDDCNSLSKRYKTLKQYKLAELTPIESGCCRPPAECGYPALNASNFDLSYHPVSTNVDCKLYKNDRFLRCYDCNSCKAGVAQYMKTEWRVVAIFNVILFIILSFVYFVGCCARRHAGGSDSKVPRR

SEQ ID NO: 63074 - DNA, 1035 bp, Triticum aestivum
  misc_feature (1)..(1035): Ceres Seq. ID no. 15179752
gccgcctctccccataccctcgccgtctcctctcccacgaagcgcagctcgtcgaggtaagcaccggtcccccgaacccgccgctgtcccctccccgcttcgatctaagcctgaaggatctgtggttgattgcgtccgcgcagatggcctccgaggcggcgaaggtgccggtgccggagtcggtgaacttcaagaggaagaggggagaggtctgggccgccgcgaagaagcagaaggtcgccgacgagaagaagaaggacgcggagaacaccaaggtcatctacgcccgcgccaaggagtacgccggggagtatgaggctcaggacaaggagctggtgcaacttaagcgtgaggcccggatgaagggtgggttctatgtcagtcctgaggcaaagctgctgtttgtcgtccgtatccgtggtatcaatgctatgcacccaaagaccaagaagatcttgcagcttttgcgtttgaggcagatttttaatggtgtgttccttaaggtcaacaaggccaccattaacatgctgcgtcgggttgagccatatgttgcttacgggtaccctaacctcaagagtgtcagggagctgatctacaagagaggttacggaaagctcaacaagcaaaggatccttctgaccaacaacaaagtcatcgaggagggtttggggaagcacaacatcatttgcattgaggaccttgtgcatgagatcttgaccgtcggcccacacttcaaggaggctaacaacttcctgtggccattcaagctcaaggctccgctcggtggcctgaagaagaagaggaaccactacgtcgagggtggtgatgctggcaaccgcgagaactacatcaaccagctcgttagaaggatgaactaggttgaatgagcatgataatagcctgtgttggaaggataaacttgtttcacattaggaagcggatgatgaatatgcatgcgttttttgtatcgagaactagacatgtttggatgaaatcccacatttcctctagaaatactaagttttttagcttgtt

SEQ ID NO: 63075 - protein, 291 aa, Triticum aestivum
  peptide (1)..(291): Ceres Seq. ID no. 15179753
  misc_feature (131)..(183): Pfam Name: Ribosomal protein L30p/L7e Pfam Description: Ribosomal protein L30p/L7e
  misc_feature (43)..(291): Homolog of NCBI NO: 27660180 NR Description: similar to ribosomal protein L7, cytosolic
  misc_feature (53)..(290): Homolog of NCBI NO: 28630259 NR Description: ribosomal protein L7 [Branchiostoma lanceolatum]
  misc_feature (53)..(291): Homolog of NCBI NO: 27311547 NR Description: Unknown protein [Arabidopsis thaliana]
  misc_feature (53)..(291): Homolog of NCBI NO: 30689623 NR Description: 60S ribosomal protein L7 (RPL7C) [Arabidopsis
  misc_feature (53)..(291): Homolog of NCBI NO: 30689617 NR Description: 60S ribosomal protein L7 (RPL7C) [Arabidopsis
  misc_feature (53)..(291): Homolog of NCBI NO: 15226212 NR Description: 60S ribosomal protein L7 (RPL7B) [Arabidopsis
  misc_feature (48)..(291): Homolog of NCBI NO: 15231288 NR Description: 60S ribosomal protein L7 (RPL7D) [Arabidopsis
  misc_feature (55)..(291): Homolog of NCBI NO: 445613 NR Description: ribosomal protein L7
  misc_feature (48)..(291): Homolog of NCBI NO: 38637548 NR Description: putative 60S ribosomal protein L7
  misc_feature (48)..(291): Homolog of NCBI NO: 38346542 NR Description: OSJNBa0035M09.3 [Oryza sativa (japonica
RLSPYPRRLLSHEAQLVEVSTGPPNPPLSPPRFDLSLKDLWLIASAQMASEAAKVPVPESVNFKRKRGEVWAAAKKQKVADEKKKDAENTKVIYARAKEYAGEYEAQDKELVQLKREARMKGGFYVSPEAKLLFVVRIRGINAMHPKTKKILQLLRLRQIFNGVFLKVNKATINMLRRVEPYVAYGYPNLKSVRELIYKRGYGKLNKQRILLTNNKVIEEGLGKHNIICIEDLVHEILTVGPHFKEANNFLWPFKLKAPLGGLKKKRNHYVEGGDAGNRENYINQLVRRMN

SEQ ID NO: 63076 - protein, 244 aa, Triticum aestivum
  peptide (1)..(244): Ceres Seq. ID no. 15179754
  misc_feature (84)..(136): Pfam Name: Ribosomal protein L30p/L7e Pfam Description: Ribosomal protein L30p/L7e
  misc_feature (1)..(244): Homolog of NCBI NO: 27660180 NR Description: similar to ribosomal protein L7, cytosolic
  misc_feature (6)..(243): Homolog of NCBI NO: 28630259 NR Description: ribosomal protein L7 [Branchiostoma lanceolatum]
  misc_feature (6)..(244): Homolog of NCBI NO: 27311547 NR Description: Unknown protein [Arabidopsis thaliana]
  misc_feature (6)..(244): Homolog of NCBI NO: 30689623 NR Description: 60S ribosomal protein L7 (RPL7C) [Arabidopsis
  misc_feature (6)..(244): Homolog of NCBI NO: 30689617 NR Description: 60S ribosomal protein L7 (RPL7C) [Arabidopsis
  misc_feature (6)..(244): Homolog of NCBI NO: 15226212 NR Description: 60S ribosomal protein L7 (RPL7B) [Arabidopsis
  misc_feature (1)..(244): Homolog of NCBI NO: 15231288 NR Description: 60S ribosomal protein L7 (RPL7D) [Arabidopsis
  misc_feature (8)..(244): Homolog of NCBI NO: 445613 NR Description: ribosomal protein L7
  misc_feature (1)..(244): Homolog of NCBI NO: 38637548 NR Description: putative 60S ribosomal protein L7
  misc_feature (1)..(244): Homolog of NCBI NO: 38346542 NR Description: OSJNBa0035M09.3 [Oryza sativa (japonica
MASEAAKVPVPESVNFKRKRGEVWAAAKKQKVADEKKKDAENTKVIYARAKEYAGEYEAQDKELVQLKREARMKGGFYVSPEAKLLFVVRIRGINAMHPKTKKILQLLRLRQIFNGVFLKVNKATINMLRRVEPYVAYGYPNLKSVRELIYKRGYGKLNKQRILLTNNKVIEEGLGKHNIICIEDLVHEILTVGPHFKEANNFLWPFKLKAPLGGLKKKRNHYVEGGDAGNRENYINQLVRRMN

SEQ ID NO: 63077 - protein, 172 aa, Triticum aestivum
  peptide (1)..(172): Ceres Seq. ID no. 15179755
  misc_feature (12)..(64): Pfam Name: Ribosomal protein L30p/L7e Pfam Description: Ribosomal protein L30p/L7e
  misc_feature (1)..(172): Homolog of NCBI NO: 27660180 NR Description: similar to ribosomal protein L7, cytosolic
  misc_feature (1)..(171): Homolog of NCBI NO: 28630259 NR Description: ribosomal protein L7 [Branchiostoma lanceolatum]
  misc_feature (1)..(172): Homolog of NCBI NO: 27311547 NR Description: Unknown protein [Arabidopsis thaliana]
  misc_feature (1)..(172): Homolog of NCBI NO: 30689623 NR Description: 60S ribosomal protein L7 (RPL7C) [Arabidopsis
  misc_feature (1)..(172): Homolog of NCBI NO: 30689617 NR Description: 60S ribosomal protein L7 (RPL7C) [Arabidopsis
  misc_feature (1)..(172): Homolog of NCBI NO: 15226212 NR Description: 60S ribosomal protein L7 (RPL7B) [Arabidopsis
  misc_feature (1)..(172): Homolog of NCBI NO: 15231288 NR Description: 60S ribosomal protein L7 (RPL7D) [Arabidopsis
  misc_feature (1)..(172): Homolog of NCBI NO: 445613 NR Description: ribosomal protein L7
  misc_feature (1)..(172): Homolog of NCBI NO: 38637548 NR Description: putative 60S ribosomal protein L7
  misc_feature (1)..(172): Homolog of NCBI NO: 38346542 NR Description: OSJNBa0035M09.3 [Oryza sativa (japonica
MKGGFYVSPEAKLLFVVRIRGINAMHPKTKKILQLLRLRQIFNGVFLKVNKATINMLRRVEPYVAYGYPNLKSVRELIYKRGYGKLNKQRILLTNNKVIEEGLGKHNIICIEDLVHEILTVGPHFKEANNFLWPFKLKAPLGGLKKKRNHYVEGGDAGNRENYINQLVRRMN

SEQ ID NO: 63078 - DNA, 798 bp, Triticum aestivum
  misc_feature (1)..(798): Ceres Seq. ID no. 12584967
aggctacggtaaccggcccaaagaccatgggataattcttcttcttcttcttcccctgggcagttgggctcctagggtttgaacgagcacacgagccaccagcccaccaccaccaccactatcacccaccatgaaacggtcgccaccacgcgatgacgcggcggcggcgggcagcagcggaggaggagggttcaacaaggggaaggggaggtggggcgggaagaagcggaacgagcagcggctgggaggcagcggcggggcgctctccctcgcggccttcgccaacgccaagtccaggaccaccggctacaacccggcactcatcaagaagcagaaggagttctacaggaatgctaaattgattagcaagtacaagaagtcgaagaagcaccaaaatcagtcaaactatcctccacaatttccaacccttgaggaaggaggtgctgatgcatcggatgtgccaaaaccacatgataagaggaagaagcgcacttcacaaagcttgaatgtggagtacgagaagaaacgtgtagaggacgagaaggcaaagaaggagcgggatgcgatgatacaggccaagaaggaggagcgagagaagtctgaagcaaagagaaaggagcttagggagaagatgttcaagaggacacgatccgggcagcctgtgatgaaatacaggattgagcatctcttggagactgcactagaaagctcaaacaagtgagttatgatatgttctaagactaatgccacactaattaaaacaaatcagtccagtgcagtgataagtttgtattagtg

SEQ ID NO: 63079 - protein, 196 aa, Triticum aestivum
  peptide (1)..(196): Ceres Seq. ID no. 12584968
  misc_feature (85)..(167): Pfam Name: Hsp90 protein Pfam Description: Hsp90 protein
  misc_feature (77)..(194): Homolog of NCBI NO: 19115190 NR Description: very hypothetical protein [Schizosaccharomyces
  misc_feature (22)..(194): Homolog of NCBI NO: 15236259 NR Description: unknown protein; protein id: At4g03180.1,
MKRSPPRDDAAAAGSSGGGGFNKGKGRWGGKKRNEQRLGGSGGALSLAAFANAKSRTTGYNPALIKKQKEFYRNAKLISKYKKSKKHQNQSNYPPQFPTLEEGGADASDVPKPHDKRKKRTSQSLNVEYEKKRVEDEKAKKERDAMIQAKKEEREKSEAKRKELREKMFKRTRSGQPVMKYRIEHLLETALESSNK

SEQ ID NO: 63080 - DNA, 1209 bp, Triticum aestivum
  misc_feature (1)..(1209): Ceres Seq. ID no. 13596648
agcgccttccccatttccacaaccgcccgtcctcctcctcctccccctcccacgctacagcagagcagcagcagcagccccgtcgatctactccgcgctcctctcccccccagacccggccgctcctcgccgccatggcgcctcgcgtgccctcctccctcctcctcgtcggcgccgcgctgctcctgggcctggcggccggcgcggcgcgggcgtccaacgaggagggggacgcgctgtacgcgctgcggatgcggctgtcggaccccaacggcgtgctccagagctgggatcccaccctcgtcaacccctgcacctggttccacgtcacctgcgacaccgccagccgcgtcgtgcgcctggatttaggcaactccaacgtctccggctccatcggccccgagctcagccgccttgtgaatcttcagtacctggagctgtacaggaacaacctcaacggcgagatcccaaaagagttgggcaagctgaagaatttgatcagcttggatctgtatgccaataagctcaccggaagaatccccaagtcgctttccaagctcagctcgctgagattcatgcgtttgaacaacaacaaacttgctggatcaattccacgggagctggccaaactctccaaccttaaagtcattgatttgtctaacaatgacttatgtgggacgatccctgtcgatggtccattctcaagcttccctcttagaagcttcgagaacaacagcagactgaacggcccggagctgcaaggattggtttcctatgactttggatgctagaaagcgctgatgcacacgacaatgcacgtggaaggaaggcaaaaaattatagtagtacaacaaatagtaggaagcttagcactacaacatgtatggcttgcgatacatgcagcagaagatgaagaaggtatgtgagcatagggtctgcgttcggtactcagaccccagaaggaaaataatgggatgtgagaagtcttagcttgatcgattgttattgccgtattgtaaattgtaataagctgcttagtaccgcagctaagctgaccgcttgggtccattgagtaagcctttgccagttcggaactaaatcccagctgatgaagaatgtatctcaagttttatctacaaacgatccacatctctttgttatgtcaaaaaaaaaaaaaaaaaacctatagtgagtcgtattccaatacgg

SEQ ID NO: 63081 - protein, 262 aa, Triticum aestivum
  peptide (1)..(262): Ceres Seq. ID no. 13596649
  misc_feature (212)..(244): Pfam Name: Leucine Rich Repeat Pfam Description: Leucine Rich Repeat
  misc_feature (56)..(250): Homolog of NCBI NO: 38679443 NR Description: benzothiadiazole-induced somatic embryogenesis
  misc_feature (56)..(250): Homolog of NCBI NO: 40253600 NR Description: putative somatic embryogenesis receptor kinase 1
  misc_feature (55)..(262): Homolog of NCBI NO: 27497122 NR Description: floral organ regulator 1 [Oryza sativa (japonica
  misc_feature (48)..(262): Homolog of NCBI NO: 7489030 NR Description: leucine-rich repeat protein LRP - tomato
  misc_feature (55)..(262): Homolog of NCBI NO: 29468120 NR Description: leucine-rich repeat protein [Oryza sativa]
  misc_feature (55)..(262): Homolog of NCBI NO: 15242153 NR Description: leucine rich repeat protein (LRP), putative
  misc_feature (55)..(262): Homolog of NCBI NO: 34146800 NR Description: At3g43740 [Arabidopsis thaliana]
  misc_feature (51)..(262): Homolog of NCBI NO: 30385250 NR Description: leucine-rich repeat protein [x Citrofortunella
  misc_feature (58)..(262): Homolog of NCBI NO: 34903344 NR Description: unnamed protein product [Oryza sativa (japonica
  misc_feature (45)..(262): Homolog of NCBI NO: 34896972 NR Description: putative leucine-rich repeat protein
RLPHFHNRPSSSSSPSHATAEQQQQPRRSTPRSSPPQTRPLLAAMAPRVPSSLLLVGAALLLGLAAGAARASNEEGDALYALRMRLSDPNGVLQSWDPTLVNPCTWFHVTCDTASRVVRLDLGNSNVSGSIGPELSRLVNLQYLELYRNNLNGEIPKELGKLKNLISLDLYANKLTGRIPKSLSKLSSLRFMRLNNNKLAGSIPRELAKLSNLKVIDLSNNDLCGTIPVDGPFSSFPLRSFENNSRLNGPELQGLVSYDFGC

SEQ ID NO: 63082 - protein, 218 aa, Triticum aestivum
  peptide (1)..(218): Ceres Seq. ID no. 13596650
  misc_feature (168)..(200): Pfam Name: Leucine Rich Repeat Pfam Description: Leucine Rich Repeat
  misc_feature (12)..(206): Homolog of NCBI NO: 38679443 NR Description: benzothiadiazole-induced somatic embryogenesis
  misc_feature (12)..(206): Homolog of NCBI NO: 40253600 NR Description: putative somatic embryogenesis receptor kinase 1
  misc_feature (11)..(218): Homolog of NCBI NO: 27497122 NR Description: floral organ regulator 1 [Oryza sativa (japonica
  misc_feature (4)..(218): Homolog of NCBI NO: 7489030 NR Description: leucine-rich repeat protein LRP - tomato
  misc_feature (11)..(218): Homolog of NCBI NO: 29468120 NR Description: leucine-rich repeat protein [Oryza sativa]
  misc_feature (11)..(218): Homolog of NCBI NO: 15242153 NR Description: leucine rich repeat protein (LRP), putative
  misc_feature (11)..(218): Homolog of NCBI NO: 34146800 NR Description: At3g43740 [Arabidopsis thaliana]
  misc_feature (7)..(218): Homolog of NCBI NO: 30385250 NR Description: leucine-rich repeat protein [x Citrofortunella
  misc_feature (14)..(218): Homolog of NCBI NO: 34903344 NR Description: unnamed protein product [Oryza sativa (japonica
  misc_feature (1)..(218): Homolog of NCBI NO: 34896972 NR Description: putative leucine-rich repeat protein
MAPRVPSSLLLVGAALLLGLAAGAARASNEEGDALYALRMRLSDPNGVLQSWDPTLVNPCTWFHVTCDTASRVVRLDLGNSNVSGSIGPELSRLVNLQYLELYRNNLNGEIPKELGKLKNLISLDLYANKLTGRIPKSLSKLSSLRFMRLNNNKLAGSIPRELAKLSNLKVIDLSNNDLCGTIPVDGPFSSFPLRSFENNSRLNGPELQGLVSYDFGC

SEQ ID NO: 63083 - protein, 179 aa, Triticum aestivum
  peptide (1)..(179): Ceres Seq. ID no. 13596651
  misc_feature (129)..(161): Pfam Name: Leucine Rich Repeat Pfam Description: Leucine Rich Repeat
  misc_feature (1)..(167): Homolog of NCBI NO: 38679443 NR Description: benzothiadiazole-induced somatic embryogenesis
  misc_feature (1)..(167): Homolog of NCBI NO: 40253600 NR Description: putative somatic embryogenesis receptor kinase 1
  misc_feature (1)..(179): Homolog of NCBI NO: 27497122 NR Description: floral organ regulator 1 [Oryza sativa (japonica
  misc_feature (1)..(179): Homolog of NCBI NO: 7489030 NR Description: leucine-rich repeat protein LRP - tomato
  misc_feature (1)..(179): Homolog of NCBI NO: 29468120 NR Description: leucine-rich repeat protein [Oryza sativa]
  misc_feature (1)..(179): Homolog of NCBI NO: 15242153 NR Description: leucine rich repeat protein (LRP), putative
  misc_feature (1)..(179): Homolog of NCBI NO: 34146800 NR Description: At3g43740 [Arabidopsis thaliana]
  misc_feature (1)..(179): Homolog of NCBI NO: 30385250 NR Description: leucine-rich repeat protein [x Citrofortunella
  misc_feature (1)..(179): Homolog of NCBI NO: 34903344 NR Description: unnamed protein product [Oryza sativa (japonica
  misc_feature (1)..(179): Homolog of NCBI NO: 34896972 NR Description: putative leucine-rich repeat protein
MRLSDPNGVLQSWDPTLVNPCTWFHVTCDTASRVVRLDLGNSNVSGSIGPELSRLVNLQYLELYRNNLNGEIPKELGKLKNLISLDLYANKLTGRIPKSLSKLSSLRFMRLNNNKLAGSIPRELAKLSNLKVIDLSNNDLCGTIPVDGPFSSFPLRSFENNSRLNGPELQGLVSYDFGC

SEQ ID NO: 63084 - DNA, 847 bp, Triticum aestivum
  misc_feature (1)..(847): Ceres Seq. ID no. 13583591
aatcgaaaacccctgactccgccgagcgagcatcacctttccgccgctgctcgccgcacgccgccccgccgaccgagaccctcaggcccgccccactctagcccgcccgcccgcatggctgccgatcgccggcccggcgtctgagggagcgggcggctgcgctcgggggccagtccggcggcgcgatggagctgtccgggagccccggcacgtggagcggcctctcgctgcggctcggccagttcctcttcgccgccgcgtccgtctgcgtcatgtcctccgcgatcggcttcgccaactacaccgccttctgctacttgattgcatcaatgggactacaagcactctggagcttgggacttgcgtgtcttgatggctatgctttgagaatgaaaaaggaactcaacagtgctgttctcgtgagcttatttgttgttggagattgggtaacgtcgatcctgtcgttcgccgcttcatgctcagcaggaagcgtcgttgttctcttcgacaaggatgcgtacttctgcagcagggacccgcatctcccctgtgggacatttgagcttgcgaccgcgtttgcattcctttcctgggcgcttagtgccacatctgcccttgtgatgttttggctcctcgcttcatcttgattagatatgtaggagctctgtctgtacctagtgttgtttggtcctgtctggttatataccgactgatgtgtcaagcagactacataggaatagactgctaattccagagaatagatgggcaatggtcgcaagttccatggagtcttaaattttagagccatgcttcagtgtttcgggccaaagataacttggttcctggc

SEQ ID NO: 63085 - protein, 153 aa, Triticum aestivum
  peptide (1)..(153): Ceres Seq. ID no. 13583592
  misc_feature (5)..(138): Pfam Name: Domain of unknown function (DUF588) Pfam Description: Domain of unknown function (DUF588)
  misc_feature (1)..(99): Homolog of NCBI NO: 7939530 NR Description: gb|AAD20689.1~gene_id:K14B15.11~similar to
  misc_feature (1)..(152): Homolog of NCBI NO: 22330130 NR Description: hypothetical protein [Arabidopsis thaliana]
  misc_feature (2)..(152): Homolog of NCBI NO: 30687069 NR Description: expressed protein [Arabidopsis thaliana]
  misc_feature (2)..(152): Homolog of NCBI NO: 25408537 NR Description: hypothetical protein At2g37200 [imported] -
  misc_feature (7)..(136): Homolog of NCBI NO: 26006486 NR Description: Unknown protein [Oryza sativa (japonica
  misc_feature (1)..(152): Homolog of NCBI NO: 11357817 NR Description: hypothetical protein F5K20.150 - Arabidopsis
  misc_feature (1)..(153): Homolog of NCBI NO: 30686969 NR Description: expressed protein [Arabidopsis thaliana]
  misc_feature (2)..(152): Homolog of NCBI NO: 18401722 NR Description: expressed protein [Arabidopsis thaliana]
  misc_feature (2)..(152): Homolog of NCBI NO: 18409932 NR Description: expressed protein [Arabidopsis thaliana]
  misc_feature (2)..(150): Homolog of NCBI NO: 15241672 NR Description: hypothetical protein [Arabidopsis thaliana]
MELSGSPGTWSGLSLRLGQFLFAAASVCVMSSAIGFANYTAFCYLIASMGLQALWSLGLACLDGYALRMKKELNSAVLVSLFVVGDWVTSILSFAASCSAGSVVVLFDKDAYFCSRDPHLPCGTFELATAFAFLSWALSATSALVMFWLLASS

SEQ ID NO: 63086 - protein, 124 aa, Triticum aestivum
  peptide (1)..(124): Ceres Seq. ID no. 13583593
  misc_feature (1)..(109): Pfam Name: Domain of unknown function (DUF588) Pfam Description: Domain of unknown function (DUF588)
  misc_feature (1)..(70): Homolog of NCBI NO: 7939530 NR Description: gb|AAD20689.1~gene_id:K14B15.11~similar to
  misc_feature (1)..(123): Homolog of NCBI NO: 22330130 NR Description: hypothetical protein [Arabidopsis thaliana]
  misc_feature (1)..(123): Homolog of NCBI NO: 30687069 NR Description: expressed protein [Arabidopsis thaliana]
  misc_feature (1)..(123): Homolog of NCBI NO: 25408537 NR Description: hypothetical protein At2g37200 [imported] -
  misc_feature (1)..(107): Homolog of NCBI NO: 26006486 NR Description: Unknown protein [Oryza sativa (japonica
  misc_feature (1)..(123): Homolog of NCBI NO: 11357817 NR Description: hypothetical protein F5K20.150 - Arabidopsis
  misc_feature (1)..(124): Homolog of NCBI NO: 30686969 NR Description: expressed protein [Arabidopsis thaliana]
  misc_feature (1)..(123): Homolog of NCBI NO: 18401722 NR Description: expressed protein [Arabidopsis thaliana]
  misc_feature (1)..(123): Homolog of NCBI NO: 18409932 NR Description: expressed protein [Arabidopsis thaliana]
  misc_feature (1)..(121): Homolog of NCBI NO: 15241672 NR Description: hypothetical protein [Arabidopsis thaliana]
MSSAIGFANYTAFCYLIASMGLQALWSLGLACLDGYALRMKKELNSAVLVSLFVVGDWVTSILSFAASCSAGSVVVLFDKDAYFCSRDPHLPCGTFELATAFAFLSWALSATSALVMFWLLASS

SEQ ID NO: 63087 - protein, 105 aa, Triticum aestivum
  peptide (1)..(105): Ceres Seq. ID no. 13583594
  misc_feature (1)..(90): Pfam Name: Domain of unknown function (DUF588) Pfam Description: Domain of unknown function (DUF588)
  misc_feature (1)..(51): Homolog of NCBI NO: 7939530 NR Description: gb|AAD20689.1~gene_id:K14B15.11~similar to
  misc_feature (1)..(104): Homolog of NCBI NO: 22330130 NR Description: hypothetical protein [Arabidopsis thaliana]
  misc_feature (1)..(104): Homolog of NCBI NO: 30687069 NR Description: expressed protein [Arabidopsis thaliana]
  misc_feature (1)..(104): Homolog of NCBI NO: 25408537 NR Description: hypothetical protein At2g37200 [imported] -
  misc_feature (1)..(88): Homolog of NCBI NO: 26006486 NR Description: Unknown protein [Oryza sativa (japonica
  misc_feature (1)..(104): Homolog of NCBI NO: 11357817 NR Description: hypothetical protein F5K20.150 - Arabidopsis
  misc_feature (1)..(105): Homolog of NCBI NO: 30686969 NR Description: expressed protein [Arabidopsis thaliana]
  misc_feature (1)..(104): Homolog of NCBI NO: 18401722 NR Description: expressed protein [Arabidopsis thaliana]
  misc_feature (1)..(104): Homolog of NCBI NO: 18409932 NR Description: expressed protein [Arabidopsis thaliana]
  misc_feature (1)..(102): Homolog of NCBI NO: 15241672 NR Description: hypothetical protein [Arabidopsis thaliana]
MGLQALWSLGLACLDGYALRMKKELNSAVLVSLFVVGDWVTSILSFAASCSAGSVVVLFDKDAYFCSRDPHLPCGTFELATAFAFLSWALSATSALVMFWLLASS

SEQ ID NO: 63088 - DNA, 1193 bp, Triticum aestivum
  misc_feature (1)..(1193): Ceres Seq. ID no. 13598420
accttcccgtcgtctccctccccaacgccgcggcgaactgacccaccacccccaaaccctcgccgccgatggagcagccgccgtcctcgccgccgccccccgcggcggccacggccacggctgcgcctacacccgctcccgctccctcttccgctcccattatcctctcggactcgcctcccgcggccgcggcgggggagcccgcgctgaccgccgcacagaaggcgctccgctccaagccggcgcgcgcccccgaggaccccgacaagaagaataagaagctcaaggatgtggagatcagttttccaattgtttatgggaccatttcgttttggcttggcaaaaaagcaagcgagtacaactctcacaaatggaccgtgtacatccgttctgcaacaaatgaggatctgagtgtcatagttaagcgtgtggtgtttcagcttcacccaagtttcactaatccaacaagagttgtagagcaaccgccttttgagttgtccgaatctggatggggggagtttgagattgcaataaccctttattttcacagtgatgtctgcgagaagcgcttggacttgtttcatcagcttaagttgtatccggaagaggacgctggacctcaatcaacaaaaaaaccagttgtagtggagacatacgatgaagttgtcttccctgagcccactgaagccttcttcttgcgagtgcaaaatcaccctgctgctactgtgcccaggctacctcctggtataacattgtcttctccaggtcctatggaacttatgccacatgataagaagcgttttgacaccaaggatcattctctgagccagtggttctcaaacttctctgaagcagatgaactattaaaactggctgctgctcgtcaacaggtgcaggctcacattgctaagctgagaaggcagctaagcatgatagagggaatgccccagcaatccagagttatctctggtcctggtcaacagtttgggcacggctaatggaacggtagctgctgtaaggaagatgctgaaacctgataacaactcgctaacagaatgtgatgaatgtgtcttcattgacgtcttaggctcgcaattgatgtttagtgctggccagtgtgcataaagcgcaacctatggattgtaccgcctttgtgcattttgaaatcaacgggagcatggtgtacctgcctc

SEQ ID NO: 63089 - protein, 309 aa, Triticum aestivum
  peptide (1)..(309): Ceres Seq. ID no. 13598421
  misc_feature (78)..(181): Pfam Name: YEATS family Pfam Description: YEATS family
  misc_feature (70)..(209): Homolog of NCBI NO: 40745868 NR Description: hypothetical protein AN1859.2 [Aspergillus
  misc_feature (69)..(221): Homolog of NCBI NO: 6324222 NR Description: Yeast homolog of the human leukemogenic protein
  misc_feature (71)..(206): Homolog of NCBI NO: 19920856 NR Description: CG9207-PA [Drosophila melanogaster]
  misc_feature (65)..(205): Homolog of NCBI NO: 18419436 NR Description: GAS41 [Gallus gallus]
  misc_feature (65)..(205): Homolog of NCBI NO: 34864887 NR Description: similar to glioma-amplified sequence-41 [Rattus
  misc_feature (65)..(205): Homolog of NCBI NO: 13386064 NR Description: glioma-amplified sequence-41 [Mus musculus]
  misc_feature (65)..(205): Homolog of NCBI NO: 9755857 NR Description: NuBI-1 protein [Homo sapiens]
  misc_feature (65)..(205): Homolog of NCBI NO: 5729838 NR Description: glioma-amplified sequence-41; NuMA binding
  misc_feature (47)..(233): Homolog of NCBI NO: 15227942 NR Description: hypothetical protein [Arabidopsis thaliana]
  misc_feature (34)..(294): Homolog of NCBI NO: 15242448 NR Description: expressed protein [Arabidopsis thaliana]
MEQPPSSPPPPAAATATAAPTPAPAPSSAPIILSDSPPAAAAGEPALTAAQKALRSKPARAPEDPDKKNKKLKDVEISFPIVYGTISFWLGKKASEYNSHKWTVYIRSATNEDLSVIVKRVVFQLHPSFTNPTRVVEQPPFELSESGWGEFEIAITLYFHSDVCEKRLDLFHQLKLYPEEDAGPQSTKKPVVVETYDEVVFPEPTEAFFLRVQNHPAATVPRLPPGITLSSPGPMELMPHDKKRFDTKDHSLSQWFSNFSEADELLKLAAARQQVQAHIAKLRRQLSMIEGMPQQSRVISGPGQQFGHG

SEQ ID NO: 63090 - DNA, 1083 bp, Triticum aestivum
  misc_feature (1)..(1083): Ceres Seq. ID no. 12593058
acaaagccagctcacctcacaccctatcacactcgacactcgtcagtggtcatagttcatcactgcacagctctcccactcggccactctcactcccacgccgacactcgccataatgcgccgcctccacctcgccgccgccgtcctcgccgtcttcctccccctcgccgtctccgcggccgggggcaaagcagcggcagctaaggcgcccgttgccccgccggccccgccgaacatcacggcggccatggcgaagggcgggtgcaaggcgttcgcggccctggtggcggcctcgccggacgcgcactccacgttccagtcggccggggacggcggcgtgacggccttctgccccagcgacgacgccgtgaggtccttcatgcccaggtacaagaacctcagcgccgacggcaaggcgtcgctgctgctgttccacgccgtgcccgtgtactacgcgccgcggagcctcaagtccaacaacggcgtcatgaacacgctcgccaccgacggctccgccaacaacttcaacttcacggtgcagaacgagggcgagcaggtgaccatcaagacggacgcctccgaccacgccgcgcgggtcaagtccaccgtctacgacaaggaccccatcgccatctacgccgtggacacggtgctcgagccggtggagctcttcgagccggcggagtccccggcgccggcgccggctcccgcccctgtcgccgacgcgcccaaggcccccaagaagcaggcgcgccaccggcctgtagcggacgcgcccggaccggccgccgaggacgcggcgcccgccgaccagaggaagaactctaagaagagcgcggcgtccgccgccccgtgtctgccatgggccgcagtcctgcctgtcgtcgtggccgtggccgccgctctggcttagccgcttgtcctccttcgcggtggacctgcacgggaggtagtggtgtgtcggtggattgcgttgcgtgtgtcctttgtgtctgtcggtcagtgcgtgtgctcgtgcagtgaaatttctatctttactctttcttgccacattaatgttgtttagtataataatttgatgtg

SEQ ID NO: 63091 - protein, 265 aa, Triticum aestivum
  peptide (1)..(265): Ceres Seq. ID no. 12593059
  misc_feature (41)..(182): Pfam Name: Fasciclin domain Pfam Description: Fasciclin domain
  misc_feature (26)..(205): Homolog of NCBI NO: 29836533 NR Description: putative pollen surface protein [Gossypioides
  misc_feature (26)..(205): Homolog of NCBI NO: 29836531 NR Description: putative pollen surface protein [Gossypium
  misc_feature (26)..(204): Homolog of NCBI NO: 29836525 NR Description: putative pollen surface protein [Gossypium
  misc_feature (26)..(205): Homolog of NCBI NO: 29836529 NR Description: putative pollen surface protein [Gossypium
  misc_feature (26)..(205): Homolog of NCBI NO: 29836527 NR Description: putative pollen surface protein [Gossypium
  misc_feature (29)..(244): Homolog of NCBI NO: 15235459 NR Description: fasciclin-like arabinogalactan-protein (FLA2)
  misc_feature (29)..(260): Homolog of NCBI NO: 21593810 NR Description: putative pollen surface protein [Arabidopsis
  misc_feature (29)..(260): Homolog of NCBI NO: 13377778 NR Description: fasciclin-like arabinogalactan-protein 2
  misc_feature (1)..(265): Homolog of NCBI NO: 38424037 NR Description: putative fasciclin-like arabinogalactan-protein
  misc_feature (29)..(265): Homolog of NCBI NO: 15240570 NR Description: fasciclin-like arabinogalactan-protein (FLA1)
MRRLHLAAAVLAVFLPLAVSAAGGKAAAAKAPVAPPAPPNITAAMAKGGCKAFAALVAASPDAHSTFQSAGDGGVTAFCPSDDAVRSFMPRYKNLSADGKASLLLFHAVPVYYAPRSLKSNNGVMNTLATDGSANNFNFTVQNEGEQVTIKTDASDHAARVKSTVYDKDPIAIYAVDTVLEPVELFEPAESPAPAPAPAPVADAPKAPKKQARHRPVADAPGPAAEDAAPADQRKNSKKSAASAAPCLPWAAVLPVVVAVAAALA

SEQ ID NO: 63092 - protein, 221 aa, Triticum aestivum
  peptide (1)..(221): Ceres Seq. ID no. 12593060
  misc_feature (1)..(138): Pfam Name: Fasciclin domain Pfam Description: Fasciclin domain
  misc_feature (1)..(161): Homolog of NCBI NO: 29836533 NR Description: putative pollen surface protein [Gossypioides
  misc_feature (1)..(161): Homolog of NCBI NO: 29836531 NR Description: putative pollen surface protein [Gossypium
  misc_feature (1)..(160): Homolog of NCBI NO: 29836525 NR Description: putative pollen surface protein [Gossypium
  misc_feature (1)..(161): Homolog of NCBI NO: 29836529 NR Description: putative pollen surface protein [Gossypium
  misc_feature (1)..(161): Homolog of NCBI NO: 29836527 NR Description: putative pollen surface protein [Gossypium
  misc_feature (1)..(200): Homolog of NCBI NO: 15235459 NR Description: fasciclin-like arabinogalactan-protein (FLA2)
  misc_feature (1)..(216): Homolog of NCBI NO: 21593810 NR Description: putative pollen surface protein [Arabidopsis
  misc_feature (1)..(216): Homolog of NCBI NO: 13377778 NR Description: fasciclin-like arabinogalactan-protein 2
  misc_feature (1)..(221): Homolog of NCBI NO: 38424037 NR Description: putative fasciclin-like arabinogalactan-protein
  misc_feature (1)..(221): Homolog of NCBI NO: 15240570 NR Description: fasciclin-like arabinogalactan-protein (FLA1)
MAKGGCKAFAALVAASPDAHSTFQSAGDGGVTAFCPSDDAVRSFMPRYKNLSADGKASLLLFHAVPVYYAPRSLKSNNGVMNTLATDGSANNFNFTVQNEGEQVTIKTDASDHAARVKSTVYDKDPIAIYAVDTVLEPVELFEPAESPAPAPAPAPVADAPKAPKKQARHRPVADAPGPAAEDAAPADQRKNSKKSAASAAPCLPWAAVLPVVVAVAAALA

SEQ ID NO: 63093 - protein, 177 aa, Triticum aestivum
  peptide (1)..(177): Ceres Seq. ID no. 12593061
  misc_feature (1)..(94): Pfam Name: Fasciclin domain Pfam Description: Fasciclin domain
  misc_feature (1)..(117): Homolog of NCBI NO: 29836533 NR Description: putative pollen surface protein [Gossypioides
  misc_feature (1)..(117): Homolog of NCBI NO: 29836531 NR Description: putative pollen surface protein [Gossypium
  misc_feature (1)..(116): Homolog of NCBI NO: 29836525 NR Description: putative pollen surface protein [Gossypium
  misc_feature (1)..(117): Homolog of NCBI NO: 29836529 NR Description: putative pollen surface protein [Gossypium
  misc_feature (1)..(117): Homolog of NCBI NO: 29836527 NR Description: putative pollen surface protein [Gossypium
  misc_feature (1)..(156): Homolog of NCBI NO: 15235459 NR Description: fasciclin-like arabinogalactan-protein (FLA2)
  misc_feature (1)..(172): Homolog of NCBI NO: 21593810 NR Description: putative pollen surface protein [Arabidopsis
  misc_feature (1)..(172): Homolog of NCBI NO: 13377778 NR Description: fasciclin-like arabinogalactan-protein 2
  misc_feature (1)..(177): Homolog of NCBI NO: 38424037 NR Description: putative fasciclin-like arabinogalactan-protein
  misc_feature (1)..(177): Homolog of NCBI NO: 15240570 NR Description: fasciclin-like arabinogalactan-protein (FLA1)
MPRYKNLSADGKASLLLFHAVPVYYAPRSLKSNNGVMNTLATDGSANNFNFTVQNEGEQVTIKTDASDHAARVKSTVYDKDPIAIYAVDTVLEPVELFEPAESPAPAPAPAPVADAPKAPKKQARHRPVADAPGPAAEDAAPADQRKNSKKSAASAAPCLPWAAVLPVVVAVAAALA

SEQ ID NO: 63094 - DNA, 1091 bp, Triticum aestivum
  misc_feature (1)..(1091): Ceres Seq. ID no. 13654980
ctgttgtaccgaaacggaggagggcgtctctctgctccgtcgccgatctcgcctccgccgcgaatcccccgaaaccgcgagcagattcgcgccggactcgcgacgatttttgatgagataagcccccggccacctcggggttcgcgatgctgcggaaggcggccgtcgggttcctcgcctgcctcgtgctctacctcgccttctcctcctacccccgtagccagagggctgcatatgttcagttaccagcagttactcacagggtatacctggacgtggaaattgatggccaaaatataggtagaattgtcattggtctttatggggaagttgtgccaaagacagttgaaaattttagagccctttgtacaggtgaaaagggtgatgggcccaagggtaaacctcttcactataaaggaacaccatttcatcgaatcatcccaggtttcatgattcagggtggtgacatagttagaggtgatgggaaagcacgcgaatctatatatggaggcaccttcccagatgagaatttcagtgtgaaacatacacatccaggtgttgttgctatggcaaattctggaactgattccaacggatcccagttctacataaccacaatcaagacaggctggttggatggggagcatgtggtctttggcagggtgattcagggaatggattatgtctacgccattgaagggggcgcaggcacttacaacggcaagccgaggaagaaggtgctgatcactgactctggtgagatacccaaggagaaatggggcgaggaagcagactgagtcatagcctagtgctagaaaggggttgatgcctttccacccacccaggttcaaggcatagtgattgcaatttgggttcgttgtaccaattataccgtaggggcctcccttatagtctttctgtcaaaatgaaaacggggcgactgaaattcagtaggctgcttggcctactctgttgcctacggattttgacaccgcgcgctttcgcgaccggttttcttcgcacaccagctgtgcttcgggcagagttctgaatattgtacattgtagccagcgtatcgcatgccaaaaccc

SEQ ID NO: 63095 - protein, 216 aa, Triticum aestivum
  peptide (1)..(216): Ceres Seq. ID no. 13654981
  misc_feature (39)..(206): Homolog of NCBI NO: 39582839 NR Description: Hypothetical protein CBG18577 [Caenorhabditis
  misc_feature (39)..(206): Homolog of NCBI NO: 17566266 NR Description: CYcloPhilin family CYP-7 (18.4 kD) (cyp-7)
  misc_feature (34)..(206): Homolog of NCBI NO: 5731960 NR Description: cyclophilin B [Dictyostelium discoideum]
  misc_feature (33)..(206): Homolog of NCBI NO: 18410386 NR Description: cyclophilin-related protein [Arabidopsis
  misc_feature (33)..(207): Homolog of NCBI NO: 15237739 NR Description: cyclophilin ROC7 [Arabidopsis thaliana]
  misc_feature (12)..(207): Homolog of NCBI NO: 32351008 NR Description: cyclophilin [Triticum aestivum]
  misc_feature (2)..(207): Homolog of NCBI NO: 21554007 NR Description: cyclophilin [Arabidopsis thaliana]
  misc_feature (2)..(207): Homolog of NCBI NO: 11270326 NR Description: peptidylprolyl isomerase (EC 5.2.1.8) CYP5
  misc_feature (2)..(207): Homolog of NCBI NO: 15227674 NR Description: cyclophilin [Arabidopsis thaliana]
  misc_feature (1)..(214): Homolog of NCBI NO: 15236227 NR Description: cyclophilin - like protein [Arabidopsis thaliana]
MLRKAAVGFLACLVLYLAFSSYPRSQRAAYVQLPAVTHRVYLDVEIDGQNIGRIVIGLYGEVVPKTVENFRALCTGEKGDGPKGKPLHYKGTPFHRIIPGFMIQGGDIVRGDGKARESIYGGTFPDENFSVKHTHPGVVAMANSGTDSNGSQFYITTIKTGWLDGEHVVFGRVIQGMDYVYAIEGGAGTYNGKPRKKVLITDSGEIPKEKWGEEAD

SEQ ID NO: 63096 - protein, 115 aa, Triticum aestivum
  peptide (1)..(115): Ceres Seq. ID no. 13654982
  misc_feature (1)..(105): Homolog of NCBI NO: 39582839 NR Description: Hypothetical protein CBG18577 [Caenorhabditis
  misc_feature (1)..(105): Homolog of NCBI NO: 17566266 NR Description: CYcloPhilin family CYP-7 (18.4 kD) (cyp-7)
  misc_feature (1)..(105): Homolog of NCBI NO: 5731960 NR Description: cyclophilin B [Dictyostelium discoideum]
  misc_feature (1)..(105): Homolog of NCBI NO: 18410386 NR Description: cyclophilin-related protein [Arabidopsis
  misc_feature (1)..(106): Homolog of NCBI NO: 15237739 NR Description: cyclophilin ROC7 [Arabidopsis thaliana]
  misc_feature (1)..(106): Homolog of NCBI NO: 32351008 NR Description: cyclophilin [Triticum aestivum]
  misc_feature (1)..(106): Homolog of NCBI NO: 21554007 NR Description: cyclophilin [Arabidopsis thaliana]
  misc_feature (1)..(106): Homolog of NCBI NO: 11270326 NR Description: peptidylprolyl isomerase (EC 5.2.1.8) CYP5
  misc_feature (1)..(106): Homolog of NCBI NO: 15227674 NR Description: cyclophilin [Arabidopsis thaliana]
  misc_feature (1)..(113): Homolog of NCBI NO: 15236227 NR Description: cyclophilin - like protein [Arabidopsis thaliana]
MIQGGDIVRGDGKARESIYGGTFPDENFSVKHTHPGVVAMANSGTDSNGSQFYITTIKTGWLDGEHVVFGRVIQGMDYVYAIEGGAGTYNGKPRKKVLITDSGEIPKEKWGEEAD

SEQ ID NO: 63097 - DNA, 855 bp, Triticum aestivum
  misc_feature (1)..(855): Ceres Seq. ID no. 13596975
cattacctagaacatcctaatccaaaactctctccccgctgccctctcgcaaaaaccctagctaaccccctcctccgtagtagcagcgccgatgggaggatcgcggcgcaagttcaagcgaacccgcaccaaggtgcgtgtcgggttgccgcgcaagaagccgcgcgagttcaagccggccttcgacctgcccgaggcgctcgccgccgccgccgccgcagaggccggcggccacgtgccgagctgggatgcggaaggcagcgtcgtgaagaactactccgctttcggggtcgtggccaaccccaacctgctcggcgcccactcccgcggcacgcgaggcctcgtccagagcgcctcgctgcaggcgcccgacgtcgacgccttgcgggcccccgtcgacgagttcggccccgtcgacaccggcagtgacctcgagtgcgacgatctaaaatctgcacttgggaagaaaaggagggatggcaaatctgcacctttggagccactgactaaaattcaacgactatgtattggcagattaatagagaagtatggtgacaactacaaggccatgttcatggataccaaactgaactcaatgcagcactcagtgggtacattgaaaaagctctgtgaaagatatcatgttggtggcaagaccatcctctatccgatgtagggtcgtatgaatctagatttcactttcagtctgtatcctgtttctcccactaaatgggacatgcaaattttgcctgtgaacaatgtaacttctgatgactacaatatgagaatgagtttgttttatgttggaagttccaactcaagaaaaaaaaaaaaaaaaaagcttatcgataccgt

SEQ ID NO: 63098 - protein, 194 aa, Triticum aestivum
  peptide (1)..(194): Ceres Seq. ID no. 15222009
  misc_feature (1)..(117): Homolog of NCBI NO: 25372996 NR Description: hypothetical protein F22D16.13 - Arabidopsis
  misc_feature (1)..(185): Homolog of NCBI NO: 18379024 NR Description: expressed protein [Arabidopsis thaliana]
MGGSRRKFKRTRTKVRVGLPRKKPREFKPAFDLPEALAAAAAAEAGGHVPSWDAEGSVVKNYSAFGVVANPNLLGAHSRGTRGLVQSASLQAPDVDALRAPVDEFGPVDTGSDLECDDLKSALGKKRRDGKSAPLEPLTKIQRLCIGRLIEKYGDNYKAMFMDTKLNSMQHSVGTLKKLCERYHVGGKTILYPM

SEQ ID NO: 63099 - protein, 142 aa, Triticum aestivum
  peptide (1)..(142): Ceres Seq. ID no. 15222010
  misc_feature (26)..(142): Pfam Name: Cupin Pfam Description: Cupin
HYLEHPNPKLSPRCPLAKTLANPLLRSSSADGRIAAQVQANPHQGACRVAAQEAARVQAGLRPARGARRRRRRRGRRPRAELGCGRQRREELLRFRGRGQPQPARRPLPRHARPRPERLAAGARRRRLAGPRRRVRPRRHRQ

SEQ ID NO: 63100 - DNA, 562 bp, Triticum aestivum
  misc_feature (1)..(562): Ceres Seq. ID no. 13583887
atcctaatcgaaaatatcttgtcagctttaacattttctggtgtattccttgccgagaaaataaacacgttcttaggacaaaactggaagagcttctcaagccagaattactttgatccccaaggcctcttcatctcggtcatgtggtccggtcccttgctcctgattacgatacttattctggtgaacacccttgtgacgctctgcatgctcatggtaaggtggaaaagggccgagctcaagcaccgtgctcgtgaggcccgtagcaagcaggagtgatgatgctgccctgctcttgaaccgtggatctattgtgcagtaggggattaagctgctgatttaacggagaagtttgattggaacagtaaagtggaaggttaattagcccttgattttgattgatggtcccacttatggtctctggtactgaagcacacggttttacacatgtattagctgctgttcgtcaaatttaagggatatgtttgtgtagggagctctgaatgttatttggatggctgcaggagtcaagtgccgtcgtatatgcattgctttgtcatct

SEQ ID NO: 63101 - protein, 92 aa, Triticum aestivum
  peptide (1)..(92): Ceres Seq. ID no. 13583888
  misc_feature (15)..(92): Homolog of NCBI NO: 34864175 NR Description: similar to cDNA sequence BC024093 [Rattus
  misc_feature (15)..(92): Homolog of NCBI NO: 25286705 NR Description: cDNA sequence BC024093 [Mus musculus]
  misc_feature (15)..(92): Homolog of NCBI NO: 21595411 NR Description: Hypothetical protein DKFZp434C1714 [Homo sapiens]
  misc_feature (15)..(92): Homolog of NCBI NO: 16359094 NR Description: Unknown (protein for IMAGE:4686355) [Homo sapiens]
  misc_feature (15)..(92): Homolog of NCBI NO: 11359939 NR Description: hypothetical protein DKFZp434C1714.1 - human
  misc_feature (15)..(88): Homolog of NCBI NO: 24653051 NR Description: CG30051-PB [Drosophila melanogaster]
  misc_feature (7)..(92): Homolog of NCBI NO: 21554376 NR Description: unknown [Arabidopsis thaliana]
  misc_feature (7)..(92): Homolog of NCBI NO: 18399227 NR Description: expressed protein [Arabidopsis thaliana]
  misc_feature (6)..(92): Homolog of NCBI NO: 38637052 NR Description: unknown protein [Oryza sativa (japonica
ILIENILSALTFSGVFLAEKINTFLGQNWKSFSSQNYFDPQGLFISVMWSGPLLLITILILVNTLVTLCMLMVRWKRAELKHRAREARSKQE

SEQ ID NO: 63102 - protein, 45 aa, Triticum aestivum
  peptide (1)..(45): Ceres Seq. ID no. 13583889
  misc_feature (1)..(45): Homolog of NCBI NO: 34864175 NR Description: similar to cDNA sequence BC024093 [Rattus
  misc_feature (1)..(45): Homolog of NCBI NO: 25286705 NR Description: cDNA sequence BC024093 [Mus musculus]
  misc_feature (1)..(45): Homolog of NCBI NO: 21595411 NR Description: Hypothetical protein DKFZp434C1714 [Homo sapiens]
  misc_feature (1)..(45): Homolog of NCBI NO: 16359094 NR Description: Unknown (protein for IMAGE:4686355) [Homo sapiens]
  misc_feature (1)..(45): Homolog of NCBI NO: 11359939 NR Description: hypothetical protein DKFZp434C1714.1 - human
  misc_feature (1)..(41): Homolog of NCBI NO: 24653051 NR Description: CG30051-PB [Drosophila melanogaster]
  misc_feature (1)..(45): Homolog of NCBI NO: 21554376 NR Description: unknown [Arabidopsis thaliana]
  misc_feature (1)..(45): Homolog of NCBI NO: 18399227 NR Description: expressed protein [Arabidopsis thaliana]
  misc_feature (1)..(45): Homolog of NCBI NO: 38637052 NR Description: unknown protein [Oryza sativa (japonica
MWSGPLLLITILILVNTLVTLCMLMVRWKRAELKHRAREARSKQE

SEQ ID NO: 63103 - DNA, 1227 bp, Triticum aestivum
  misc_feature (1)..(1227): Ceres Seq. ID no. 12625368
aacacgctcagactcagctagctaacatacaggcaggccatcaggaggagccacgaggaagaaacaaccagcgcatatatccccctcgccccctccctcccgccggcagagctgagctgagctgagccaccgttcgaccaactcgcctctagaacacagagccccccgccgcccggatcccttcttcatccccctctccgctctttgtatcgctcaccaccgccatggctaagcagcagaagaacgcgcacgtcccgaagttcggcaactgggacaacgacggcaacgtcccctacacgctctacttcgacaacgcgcgcaagggcaagggcggcaagcccatcaaccccaacgaccccgtcgagaaccccgaggccttctcctcctctgtcgtcgcgccgtcgccgaaccgctccttcgaccagggcaggccggctctccctcctgcctccccgcctcccgctcaccaccacgagcgccggcccagcgacgcgccggcggtcgccccgccgctgtccccgtaccaccgcaacgccggtggcgagccgccgagaagaggccctggcggcggacgggcaggcggaggcgggtatagcgtggagcagtcgccggggccgtccccgctgcacccgtacggacagtcgagggccgagtactccgatggcagcggctacggcctcgtggccaactccgtggaccggtcccgtgccaggggcgcctcgcggggcaacgaaacgccgacgagggggtcagcggtgcccaagttcggcgactgggactccaacccggcgtcggcggacggctacacgcacatcttcaacaaggtgagggaggagaagagcacccaggccaaggcaccggggttcggcaaggacaacgtcgcctatggcaacggccgcaggcagcacgacgacggctacgtctcctcgagtcgctggtgctttgggtggtgcaagtaggggtggttcgacagatgatgatggggaaaagtaagcgaggatctttgggaatgtaaattgtgtgaaattaagaaggtttttgccattgattcaacttcgaacttctgtaatcccattttttgggacattatttggcattgggcactcagcagagttcatattcttttgattgtgaaatatactcctactatttctttctgatgtggaatgtagagttcagccatggttgttgttaaaaaaaaaaaaaaaaaagcttatcgataccgtc

SEQ ID NO: 63104 - protein, 244 aa, Triticum aestivum
  peptide (1)..(244): Ceres Seq. ID no. 12625369
  misc_feature (169)..(241): Pfam Name: Nitrate-induced NOI protein Pfam Description: Nitrate-induced NOI protein
  misc_feature (1)..(64): Homolog of NCBI NO: 9294163 NR Description: contains similarity to nitrate-induced NOI
  misc_feature (8)..(64): Homolog of NCBI NO: 30687738 NR Description: expressed protein [Arabidopsis thaliana]
  misc_feature (65)..(213): Homolog of NCBI NO: 9294163 NR Description: contains similarity to nitrate-induced NOI
  misc_feature (8)..(213): Homolog of NCBI NO: 29839570 NR Description: NOI-like protein
  misc_feature (65)..(242): Homolog of NCBI NO: 30687738 NR Description: expressed protein [Arabidopsis thaliana]
  misc_feature (10)..(212): Homolog of NCBI NO: 32489059 NR Description: OSJNBb0089B03.3 [Oryza sativa (japonica
  misc_feature (8)..(244): Homolog of NCBI NO: 34897468 NR Description: putative nitrate-induced protein
MAKQQKNAHVPKFGNWDNDGNVPYTLYFDNARKGKGGKPINPNDPVENPEAFSSSVVAPSPNRSFDQGRPALPPASPPPAHHHERRPSDAPAVAPPLSPYHRNAGGEPPRRGPGGGRAGGGGYSVEQSPGPSPLHPYGQSRAEYSDGSGYGLVANSVDRSRARGASRGNETPTRGSAVPKFGDWDSNPASADGYTHIFNKVREEKSTQAKAPGFGKDNVAYGNGRRQHDDGYVSSSRWCFGWCK

SEQ ID NO: 63105 - DNA, 1315 bp, Triticum aestivum
  misc_feature (1)..(1315): Ceres Seq. ID no. 14314080
actgagacaaagacaacttcatcttgcttactgcatcctctttcttcaagagagcacaaccaccaaggagagcaagaccaggatcagcaaagaaacatccaagaaatccaacggctgacgagtcatggaggctgccgagttcagtgcagcaactggctgccagcatacaggagccaccaaggcagtacttgctcagagagcaagaaccgcttggtgggaacctggctggtaccgagatgccggagcccattccaacaatcgatctcggcttgctgtccgcatccaacgatgcggaggaggccgccaagctgcggtcagcgctgcagacctggggattcttcaaggtttctgaccatggaatggagacctctctcatggattctgtgatgaacgcatcaagggattttttccgcctgccgctcgaagagaagagaaagtacagtaacataataggcgggaaacatttccagatggaagggtatggaactgaccaggtgaaaactcaagatcaaaggctggactggtccgatcggctgcatcttaaagtggagccagaggatgagagaaaccttgcccattggcccatacatccaaaatctttcagggatgacctgcatgagtacacatcgaagagcaagagaatcaaagacgacatccttcgggcagtggccaagctattggagctcgatgaagattgcctagttaaccagtttagcaacagggctctcacttatgctagattcaattactatcctccatgtccaagacctgatcctgtcttgggcatcaaacctcattctgatgtctatgctcttacagttcttctaatggacaaggatgtcgctgggctgcagtttgtcagagatggaacgtggtacaatgttccatctgcgtctaactacaccttactgatcaacgttggtgttacaatggagataatgaccaacgggatcttcaagggaccagtacatagggttgtgactaattctgagaaagagaggatgtcagtggccgtgttctatggtctggatcctgaaagagagattggaccgatagctcagatgttgactgaggaccaaccggcgcgatacagggaaatgaaggtcaaggatttcctagtcgcgcaccttgagcatttctctcgaggagaaagagttgtcgattcgttaaggatatgatcaaggtgagtttggtttggtgccgcaatacccatggaataaagaatttgtgacttgccgattcgttaaggatataaaacaaggtgactttacttctataaggcgatgaatctggtgaaaataaagaatttgatccc

SEQ ID NO: 63106 - protein, 313 aa, Triticum aestivum
  peptide (1)..(313): Ceres Seq. ID no. 14314081
  misc_feature (163)..(264): Pfam Name: 2OG-Fe(II) oxygenase superfamily Pfam Description: 2OG-Fe(II) oxygenase superfamily
  misc_feature (1)..(81): Homolog of NCBI NO: 24413983 NR Description: ethylene-forming-enzyme-like dioxygenase-like
  misc_feature (106)..(313): Homolog of NCBI NO: 24413983 NR Description: ethylene-forming-enzyme-like dioxygenase-like
  misc_feature (1)..(313): Homolog of NCBI NO: 34898472 NR Description: Similar to Prunus armeniaca
  misc_feature (234)..(313): Homolog of NCBI NO: 24413981 NR Description: contains EST
  misc_feature (1)..(221): Homolog of NCBI NO: 24413981 NR Description: contains EST
  misc_feature (1)..(313): Homolog of NCBI NO: 34898468 NR Description: Similar to Prunus armeniaca
  misc_feature (1)..(287): Homolog of NCBI NO: 34898470 NR Description: ESTs D47168(S12332),D46350(S10967) correspond to region of the predicted gene.~Similar to Prunus armeniaca
  misc_feature (1)..(313): Homolog of NCBI NO: 33115140 NR Description: iron/ascorbate-dependent oxidoreductase [Hordeum
  misc_feature (1)..(313): Homolog of NCBI NO: 24413982 NR Description: ethylene-forming-enzyme-like dioxygenase-like
  misc_feature (1)..(313): Homolog of NCBI NO: 24413984 NR Description: ethylene-forming-enzyme-like dioxygenase-like
MPEPIPTIDLGLLSASNDAEEAAKLRSALQTWGFFKVSDHGMETSLMDSVMNASRDFFRLPLEEKRKYSNIIGGKHFQMEGYGTDQVKTQDQRLDWSDRLHLKVEPEDERNLAHWPIHPKSFRDDLHEYTSKSKRIKDDILRAVAKLLELDEDCLVNQFSNRALTYARFNYYPPCPRPDPVLGIKPHSDVYALTVLLMDKDVAGLQFVRDGTWYNVPSASNYTLLINVGVTMEIMTNGIFKGPVHRVVTNSEKERMSVAVFYGLDPEREIGPIAQMLTEDQPARYREMKVKDFLVAHLEHFSRGERVVDSLRI

SEQ ID NO: 63107 - protein, 272 aa, Triticum aestivum
  peptide (1)..(272): Ceres Seq. ID no. 14314082
  misc_feature (122)..(223): Pfam Name: 2OG-Fe(II) oxygenase superfamily Pfam Description: 2OG-Fe(II) oxygenase superfamily
  misc_feature (1)..(40): Homolog of NCBI NO: 24413983 NR Description: ethylene-forming-enzyme-like dioxygenase-like
  misc_feature (65)..(272): Homolog of NCBI NO: 24413983 NR Description: ethylene-forming-enzyme-like dioxygenase-like
  misc_feature (1)..(272): Homolog of NCBI NO: 34898472 NR Description: Similar to Prunus armeniaca
  misc_feature (193)..(272): Homolog of NCBI NO: 24413981 NR Description: contains EST
  misc_feature (1)..(180): Homolog of NCBI NO: 24413981 NR Description: contains EST
  misc_feature (1)..(272): Homolog of NCBI NO: 34898468 NR Description: Similar to Prunus armeniaca
  misc_feature (1)..(246): Homolog of NCBI NO: 34898470 NR Description: ESTs D47168(S12332),D46350(S10967) correspond to region of the predicted gene.~Similar to Prunus armeniaca
  misc_feature (1)..(272): Homolog of NCBI NO: 33115140 NR Description: iron/ascorbate-dependent oxidoreductase [Hordeum
  misc_feature (1)..(272): Homolog of NCBI NO: 24413982 NR Description: ethylene-forming-enzyme-like dioxygenase-like
  misc_feature (1)..(272): Homolog of NCBI NO: 24413984 NR Description: ethylene-forming-enzyme-like dioxygenase-like
METSLMDSVMNASRDFFRLPLEEKRKYSNIIGGKHFQMEGYGTDQVKTQDQRLDWSDRLHLKVEPEDERNLAHWPIHPKSFRDDLHEYTSKSKRIKDDILRAVAKLLELDEDCLVNQFSNRALTYARFNYYPPCPRPDPVLGIKPHSDVYALTVLLMDKDVAGLQFVRDGTWYNVPSASNYTLLINVGVTMEIMTNGIFKGPVHRVVTNSEKERMSVAVFYGLDPEREIGPIAQMLTEDQPARYREMKVKDFLVAHLEHFSRGERVVDSLRI

SEQ ID NO: 63108 - protein, 267 aa, Triticum aestivum
  peptide (1)..(267): Ceres Seq. ID no. 14314083
  misc_feature (117)..(218): Pfam Name: 2OG-Fe(II) oxygenase superfamily Pfam Description: 2OG-Fe(II) oxygenase superfamily
  misc_feature (1)..(35): Homolog of NCBI NO: 24413983 NR Description: ethylene-forming-enzyme-like dioxygenase-like
  misc_feature (60)..(267): Homolog of NCBI NO: 24413983 NR Description: ethylene-forming-enzyme-like dioxygenase-like
  misc_feature (1)..(267): Homolog of NCBI NO: 34898472 NR Description: Similar to Prunus armeniaca
  misc_feature (188)..(267): Homolog of NCBI NO: 24413981 NR Description: contains EST
  misc_feature (1)..(175): Homolog of NCBI NO: 24413981 NR Description: contains EST
  misc_feature (1)..(267): Homolog of NCBI NO: 34898468 NR Description: Similar to Prunus armeniaca
  misc_feature (1)..(241): Homolog of NCBI NO: 34898470 NR Description: ESTs D47168(S12332),D46350(S10967) correspond to region of the predicted gene.~Similar to Prunus armeniaca
  misc_feature (1)..(267): Homolog of NCBI NO: 33115140 NR Description: iron/ascorbate-dependent oxidoreductase [Hordeum
  misc_feature (1)..(267): Homolog of NCBI NO: 24413982 NR Description: ethylene-forming-enzyme-like dioxygenase-like
  misc_feature (1)..(267): Homolog of NCBI NO: 24413984 NR Description: ethylene-forming-enzyme-like dioxygenase-like
MDSVMNASRDFFRLPLEEKRKYSNIIGGKHFQMEGYGTDQVKTQDQRLDWSDRLHLKVEPEDERNLAHWPIHPKSFRDDLHEYTSKSKRIKDDILRAVAKLLELDEDCLVNQFSNRALTYARFNYYPPCPRPDPVLGIKPHSDVYALTVLLMDKDVAGLQFVRDGTWYNVPSASNYTLLINVGVTMEIMTNGIFKGPVHRVVTNSEKERMSVAVFYGLDPEREIGPIAQMLTEDQPARYREMKVKDFLVAHLEHFSRGERVVDSLRI

SEQ ID NO: 63109 - DNA, 1244 bp, Triticum aestivum
  misc_feature (1)..(1244): Ceres Seq. ID no. 14314104
acgttagcgagaggtaaaaatccgactgcccaggggacgaaccggaacaagggttccgggcccgtctcttcttcgtttcgtttccatccacagctcgtcctccccccaaaccttaccccatgtccgacggcggcggcgagcccggggccggcggctcggcgccggtgtgcaacttcgttcagaagccgccgaagaatattcggaagcgtcccgccgcctccgtcggctctgatgacgaagaaggtagcggcggcgacgattccggggccatcgcggcggcgcgatctaagaagccgccgcctactaccagcaagctcttcttctcctccgccgacaactcacacgagccccgccgtttccagttcgagtcgtcccggactattcagtcctctaccgacaaccgcgccactgcgacgcttgagacggagacggcgtacgaccgtgatgcgcgcgccatccgcgagcgacagctcaagcaggctgaggaatccctcaagaagaacccctctgcctcctcctcctccggggagctctacaaggggatccacggctacacggatcacaaggccggcttccggcgggagcacacggtttccggagagaaggccggcggcgctcacggccccctgcgggcgtcagcgcacatacgcctctccacgcggttcgactaccaacccgacatctgcaaggattataaggagaccggctattgtggctatggcgattcctgcaagttcatgcacgacagaggtgactacaagtccggatggcagctcgagagggagtgggacgaggccgagaaagcccgcaaacggcgcatagcgatgcgtgagttgggtggtagtgatggcgaggcagaggaggaagacagcgacgacgaggaggcactgccctttgcctgcttcatatgcagggagccctttgttgacccggtggtcacaaagtgtaagcattatttctgcgagcattgcgcattaaagcatcactcgaagaacaagaagtgctttgtctgcaataaaccgacgcttggcatcttcaatgcagcgcaggagatccggaagaagattgcccaggacaagaagcagcaggacctttgatgactgctgcacaatgtagcttgtatcatggaggattacttctcttctgtaattgtattgtttgaaaatgagggggaaatgtccaggaatcagttttgtttctttagctctgtactagctcctacttaccattagccattttgccgc

SEQ ID NO: 63110 - protein, 325 aa, Triticum aestivum; identical to SEQ ID NO: 56491
  peptide (1)..(325): Ceres Seq. ID no. 14314105
  misc_feature (261)..(298): Pfam Name: Zinc finger, C3HC4 type (RING finger) Pfam Description: Zinc finger, C3HC4 type (RING finger)
  misc_feature (11)..(323): Homolog of NCBI NO: 34935361 NR Description: similar to RIKEN cDNA 2310020H19 [Rattus
  misc_feature (16)..(323): Homolog of NCBI NO: 21313494 NR Description: RIKEN cDNA 2310020H19 [Mus musculus]
  misc_feature (93)..(316): Homolog of NCBI NO: 27374308 NR Description: CG4973-PA [Drosophila pseudoobscura]
  misc_feature (71)..(312): Homolog of NCBI NO: 27374394 NR Description: CG4973-PA [Drosophila willistoni]
  misc_feature (8)..(324): Homolog of NCBI NO: 27715515 NR Description: similar to RIKEN cDNA 2810428C21
  misc_feature (1)..(287): Homolog of NCBI NO: 25406720 NR Description: probable zinc finger protein [imported] -
  misc_feature (13)..(324): Homolog of NCBI NO: 22531136 NR Description: putative protein [Arabidopsis thaliana]
  misc_feature (13)..(324): Homolog of NCBI NO: 15240037 NR Description: expressed protein [Arabidopsis thaliana]
  misc_feature (1)..(324): Homolog of NCBI NO: 26451788 NR Description: unknown protein [Arabidopsis thaliana]
  misc_feature (1)..(324): Homolog of NCBI NO: 15223384 NR Description: expressed protein [Arabidopsis thaliana]

SEQ ID NO: 63111 - protein, 273 aa, Triticum aestivum; identical to SEQ ID NO: 56492
  peptide (1)..(273): Ceres Seq. ID no. 14314106
  misc_feature (35)..(229): Pfam Name: Formin Homology 2 Domain Pfam Description: Formin Homology 2 Domain
  misc_feature (6)..(273): Homolog of NCBI NO: 5420387 NR Description: proteophosphoglycan [Leishmania major]
  misc_feature (69)..(273): Homolog of NCBI NO: 2136504 NR Description: gastric mucin (clone PGM-2A) - pig (fragment)

SEQ ID NO: 63112 - protein, 196 aa, Triticum aestivum; identical to SEQ ID NO: 56493
  peptide (1)..(196): Ceres Seq. ID no. 14314107
  misc_feature (1)..(152): Pfam Name: Formin Homology 2 Domain Pfam Description: Formin Homology 2 Domain
  misc_feature (1)..(196): Homolog of NCBI NO: 5420387 NR Description: proteophosphoglycan [Leishmania major]
  misc_feature (1)..(196): Homolog of NCBI NO: 2136504 NR Description: gastric mucin (clone PGM-2A) - pig (fragment)

SEQ ID NO: 63113 - DNA, 938 bp, Triticum aestivum
  misc_feature (1)..(938): Ceres Seq. ID no. 12587429
agacaaatggagaaaaacagacggagaacgaaacaatggctgccgaaggaagtctgaagctgctcggcttgacggtgagcccgttcgtcatccgtgtacgcatggcgctgcagctgaaaggcatcggctacgagtacatagagcaggacctgttcaccaagggcgagctcctccgcaagtccaacccggtgtacatgaaggtcccggtgctcatccacgacggcaaacccatctgcgagtcgctggccatcgtgctgtacgtcgacgaggtctgggcggccacgggcccctcgatcctccccgccgacccctacgatcgcgccgccgctcgcatctgggccgcctacgccgacagcaagctcttgccggcctgggtaggcatcatgtgggcggcgacggaggaggagagagcggaaaaggtcgaggacacgctagcggctatcggccaattggaggaggcgttcggcaagtgctcgaagggaaaggccttcttcgccggcgattccgtcgggtacctcgacctcgtcgtcggctcgcagttgctctggttcgaagcgctgcagaagatgttcggcgtcgtggtcgttgaggtgggtagggctccgctcttggccgcgtgggtgaagcagtttggggagactgatacggccaaggaggtggtgccggacgttgacacggcggtggagtacctgacgaagcttcagtctcgtcgggctggttccacggttgcccagttgctgtcgtgacaaaagtagagtggaatttgtcgacccagctagcaagtacagcgaattttctctttaggccagctttatagtcatgtcttgtaaggatgcaaagaatggactggtttccctcctgacaccacgtagctacttctccaaagaggataacaaatcgtttgtaagaaatcataagtatattctttttttttgcgc

SEQ ID NO: 63114 - protein, 247 aa, Triticum aestivum
  peptide (1)..(247): Ceres Seq. ID no. 12587430
  misc_feature (99)..(214): Pfam Name: Glutathione S-transferase, C-terminal domain Pfam Description: Glutathione S-transferase, C-terminal domain
  misc_feature (10)..(236): Homolog of NCBI NO: 2982262 NR Description: probable glutathione S-transferase [Picea mariana]
  misc_feature (11)..(244): Homolog of NCBI NO: 11177837 NR Description: putative glutathione S-transferase OsGSTU2
  misc_feature (12)..(243): Homolog of NCBI NO: 37536280 NR Description: putative glutathione S-transferase
  misc_feature (12)..(243): Homolog of NCBI NO: 37536308 NR Description: putative glutathione S-transferase
  misc_feature (12)..(239): Homolog of NCBI NO: 20067421 NR Description: glutathione transferase [Triticum aestivum]
  misc_feature (15)..(244): Homolog of NCBI NO: 37536352 NR Description: putative glutathione S-transferase
  misc_feature (12)..(238): Homolog of NCBI NO: 11385517 NR Description: glutathione S-transferase GST 33 [Zea mays]
  misc_feature (14)..(235): Homolog of NCBI NO: 11385503 NR Description: glutathione S-transferase GST 26 [Zea mays]
  misc_feature (15)..(243): Homolog of NCBI NO: 37536354 NR Description: putative glutathione S-transferase
  misc_feature (12)..(244): Homolog of NCBI NO: 22022398 NR Description: glutathione-S-transferase Cla47 [Triticum
TNGEKQTENETMAAEGSLKLLGLTVSPFVIRVRMALQLKGIGYEYIEQDLFTKGELLRKSNPVYMKVPVLIHDGKPICESLAIVLYVDEVWAATGPSILPADPYDRAAARIWAAYADSKLLPAWVGIMWAATEEERAEKVEDTLAAIGQLEEAFGKCSKGKAFFAGDSVGYLDLVVGSQLLWFEALQKMFGVVVVEVGRAPLLAAWVKQFGETDTAKEVVPDVDTAVEYLTKLQSRRAGSTVAQLLS

SEQ ID NO: 63115 - protein, 236 aa, Triticum aestivum
  peptide (1)..(236): Ceres Seq. ID no. 12587431
  misc_feature (88)..(203): Pfam Name: Glutathione S-transferase, C-terminal domain Pfam Description: Glutathione S-transferase, C-terminal domain
  misc_feature (1)..(225): Homolog of NCBI NO: 2982262 NR Description: probable glutathione S-transferase [Picea mariana]
  misc_feature (1)..(233): Homolog of NCBI NO: 11177837 NR Description: putative glutathione S-transferase OsGSTU2
  misc_feature (1)..(232): Homolog of NCBI NO: 37536280 NR Description: putative glutathione S-transferase
  misc_feature (1)..(232): Homolog of NCBI NO: 37536308 NR Description: putative glutathione S-transferase
  misc_feature (1)..(228): Homolog of NCBI NO: 20067421 NR Description: glutathione transferase [Triticum aestivum]
  misc_feature (4)..(233): Homolog of NCBI NO: 37536352 NR Description: putative glutathione S-transferase
  misc_feature (1)..(227): Homolog of NCBI NO: 11385517 NR Description: glutathione S-transferase GST 33 [Zea mays]
  misc_feature (3)..(224): Homolog of NCBI NO: 11385503 NR Description: glutathione S-transferase GST 26 [Zea mays]
  misc_feature (4)..(232): Homolog of NCBI NO: 37536354 NR Description: putative glutathione S-transferase
  misc_feature (1)..(233): Homolog of NCBI NO: 22022398 NR Description: glutathione-S-transferase Cla47 [Triticum
MAAEGSLKLLGLTVSPFVIRVRMALQLKGIGYEYIEQDLFTKGELLRKSNPVYMKVPVLIHDGKPICESLAIVLYVDEVWAATGPSILPADPYDRAAARIWAAYADSKLLPAWVGIMWAATEEERAEKVEDTLAAIGQLEEAFGKCSKGKAFFAGDSVGYLDLVVGSQLLWFEALQKMFGVVVVEVGRAPLLAAWVKQFGETDTAKEVVPDVDTAVEYLTKLQSRRAGSTVAQLLS

SEQ ID NO: 63116 - protein, 214 aa, Triticum aestivum
  peptide (1)..(214): Ceres Seq. ID no. 12587432
  misc_feature (66)..(181): Pfam Name: Glutathione S-transferase, C-terminal domain Pfam Description: Glutathione S-transferase, C-terminal domain
  misc_feature (1)..(203): Homolog of NCBI NO: 2982262 NR Description: probable glutathione S-transferase [Picea mariana]
  misc_feature (1)..(211): Homolog of NCBI NO: 11177837 NR Description: putative glutathione S-transferase OsGSTU2
  misc_feature (1)..(210): Homolog of NCBI NO: 37536280 NR Description: putative glutathione S-transferase
  misc_feature (1)..(210): Homolog of NCBI NO: 37536308 NR Description: putative glutathione S-transferase
  misc_feature (1)..(206): Homolog of NCBI NO: 20067421 NR Description: glutathione transferase [Triticum aestivum]
  misc_feature (1)..(211): Homolog of NCBI NO: 37536352 NR Description: putative glutathione S-transferase
  misc_feature (1)..(205): Homolog of NCBI NO: 11385517 NR Description: glutathione S-transferase GST 33 [Zea mays]
  misc_feature (1)..(202): Homolog of NCBI NO: 11385503 NR Description: glutathione S-transferase GST 26 [Zea mays]
  misc_feature (1)..(210): Homolog of NCBI NO: 37536354 NR Description: putative glutathione S-transferase
  misc_feature (1)..(211): Homolog of NCBI NO: 22022398 NR Description: glutathione-S-transferase Cla47 [Triticum
MALQLKGIGYEYIEQDLFTKGELLRKSNPVYMKVPVLIHDGKPICESLAIVLYVDEVWAATGPSILPADPYDRAAARIWAAYADSKLLPAWVGIMWAATEEERAEKVEDTLAAIGQLEEAFGKCSKGKAFFAGDSVGYLDLVVGSQLLWFEALQKMFGVVVVEVGRAPLLAAWVKQFGETDTAKEVVPDVDTAVEYLTKLQSRRAGSTVAQLLS

SEQ ID NO: 63117 - DNA, 1550 bp, Triticum aestivum
  misc_feature (1)..(1550): Ceres Seq. ID no. 13654989
aagaagggaaagaatgacaccgctacccaaagcagccagccaagccaaagccaaccccagtcctagccactagccacaacgaacgaactcagacccagccagcctcgtggctccggttggactggccagtaccgttgccggacgctcctgatggggaactgcgccggcgtgcaggggaacgccgagatcaacccgaccttcagtgctcccaacacctcaggtaacaattccaagagcagcaacagcagcaatgcgactgatacaagcacttttggcaagagttcttcgtcgtcggtgccgccgactcctcggaccgagaaggagatcttgcagtcgtccaacctccgcaagttcaccttcagtgaactgagaagctccacaaggaacttccggactgacagcctgctcggggaggggggctttggctccgtcttcaaggggtggatcgacgagcgcacgtttacgccggtcaagcccggcaccgggatgatcgtcgccgtgaagaagctcaagctggacagtttccaggggcacaaagaatggctggctgaggtcaattacctggggcagctatcacaccccaatcttgtgaagctcatcgggtattgcttggaggacgagcagcggcttctcgtctacgaattcatgccgaagggtagcttggagcaccatcttttcaggagagctccacatttccagcccctctcatggagtttacggatgaaggttgctcttgaggctgccaggggacttgctttcctgcatagcgatgaagctaaagttatataccgtgatttcaagacctccaatgttcttcttgactcggaatataatgcaaaactctctgattttggcttggcaaaagatggcccgagtggcgataaaagtcatgtttctactagggtcatggggactcaaggatatgctgcccctgaatatctcgcaacaggccacttgaccacgaagagcgatgtctacacctatggtgttgttcttctagagttgctgaccgggcaacgagctctggacaagaaccgcccgcctggacagcataacctggtggagtgggcaagaccttacatcaacagcaagaggagggtcatccatgtcctggacccacgattggggtcgcaatattcgctccctgcggcgcagaaggcagcggcgcttgcgatgcagtgcctgtcaatggacgcccggtgcaggccggacatggatcaggtcgtgaccgcgctggaaaagcttccggaggtgaagaaaacatacaagtagggagggttgctgggttccatgtgtactcctttacctctctggagcatcgcctactccttgtaagcaacacttcagggagtagaaacagtgaagagaagccggacttgaggggaagactagcctttgaatctgtcaagagaatgtagaatatatatcgtcatgtgtacagctagctgttagactgttgttactttgctgtcagcctgacgcctgttttatatatttgcagtacaccggctttgtaaaacaagttgggaaacagttgtgtcttggtcttg

SEQ ID NO: 63118 - protein, 373 aa, Triticum aestivum
  peptide (1)..(373): Ceres Seq. ID no. 13654990
  misc_feature (1)..(369): Homolog of NCBI NO: 15227042 NR Description: protein kinase (APK2b) [Arabidopsis thaliana]
  misc_feature (44)..(373): Homolog of NCBI NO: 166809 NR Description: protein kinase
  misc_feature (44)..(373): Homolog of NCBI NO: 15241749 NR Description: protein kinase, putative [Arabidopsis thaliana]
  misc_feature (267)..(365): Homolog of NCBI NO: 8778537 NR Description: F22G5.5 [Arabidopsis thaliana]
  misc_feature (26)..(267): Homolog of NCBI NO: 8778537 NR Description: F22G5.5 [Arabidopsis thaliana]
  misc_feature (26)..(365): Homolog of NCBI NO: 15222437 NR Description: protein kinase (APK1a) [Arabidopsis thaliana]
  misc_feature (32)..(365): Homolog of NCBI NO: 15227001 NR Description: protein kinase (APK1b) [Arabidopsis thaliana]
  misc_feature (1)..(367): Homolog of NCBI NO: 34897424 NR Description: putative protein kinase [Oryza sativa (japonica
  misc_feature (1)..(371): Homolog of NCBI NO: 34906046 NR Description: putative serine/threonine-specific protein kinase
  misc_feature (1)..(371): Homolog of NCBI NO: 14719339 NR Description: putative protein kinase [Oryza sativa]
MGNCAGVQGNAEINPTFSAPNTSGNNSKSSNSSNATDTSTFGKSSSSSVPPTPRTEKEILQSSNLRKFTFSELRSSTRNFRTDSLLGEGGFGSVFKGWIDERTFTPVKPGTGMIVAVKKLKLDSFQGHKEWLAEVNYLGQLSHPNLVKLIGYCLEDEQRLLVYEFMPKGSLEHHLFRRAPHFQPLSWSLRMKVALEAARGLAFLHSDEAKVIYRDFKTSNVLLDSEYNAKLSDFGLAKDGPSGDKSHVSTRVMGTQGYAAPEYLATGHLTTKSDVYTYGVVLLELLTGQRALDKNRPPGQHNLVEWARPYINSKRRVIHVLDPRLGSQYSLPAAQKAAALAMQCLSMDARCRPDMDQVVTALEKLPEVKKTYK

SEQ ID NO: 63119 - protein, 261 aa, Triticum aestivum
  peptide (1)..(261): Ceres Seq. ID no. 13654991
  misc_feature (1)..(257): Homolog of NCBI NO: 15227042 NR Description: protein kinase (APK2b) [Arabidopsis thaliana]
  misc_feature (1)..(261): Homolog of NCBI NO: 166809 NR Description: protein kinase
  misc_feature (1)..(261): Homolog of NCBI NO: 15241749 NR Description: protein kinase, putative [Arabidopsis thaliana]
  misc_feature (155)..(253): Homolog of NCBI NO: 8778537 NR Description: F22G5.5 [Arabidopsis thaliana]
  misc_feature (1)..(155): Homolog of NCBI NO: 8778537 NR Description: F22G5.5 [Arabidopsis thaliana]
  misc_feature (1)..(253): Homolog of NCBI NO: 15222437 NR Description: protein kinase (APK1a) [Arabidopsis thaliana]
  misc_feature (1)..(253): Homolog of NCBI NO: 15227001 NR Description: protein kinase (APK1b) [Arabidopsis thaliana]
  misc_feature (1)..(255): Homolog of NCBI NO: 34897424 NR Description: putative protein kinase [Oryza sativa (japonica
  misc_feature (1)..(259): Homolog of NCBI NO: 34906046 NR Description: putative serine/threonine-specific protein kinase
  misc_feature (1)..(259): Homolog of NCBI NO: 14719339 NR Description: putative protein kinase [Oryza sativa]
MIVAVKKLKLDSFQGHKEWLAEVNYLGQLSHPNLVKLIGYCLEDEQRLLVYEFMPKGSLEHHLFRRAPHFQPLSWSLRMKVALEAARGLAFLHSDEAKVIYRDFKTSNVLLDSEYNAKLSDFGLAKDGPSGDKSHVSTRVMGTQGYAAPEYLATGHLTTKSDVYTYGVVLLELLTGQRALDKNRPPGQHNLVEWARPYINSKRRVIHVLDPRLGSQYSLPAAQKAAALAMQCLSMDARCRPDMDQVVTALEKLPEVKKTYK

SEQ ID NO: 63120 - protein, 208 aa, Triticum aestivum
  peptide (1)..(208): Ceres Seq. ID no. 13654992
  misc_feature (1)..(204): Homolog of NCBI NO: 15227042 NR Description: protein kinase (APK2b) [Arabidopsis thaliana]
  misc_feature (1)..(208): Homolog of NCBI NO: 166809 NR Description: protein kinase
  misc_feature (1)..(208): Homolog of NCBI NO: 15241749 NR Description: protein kinase, putative [Arabidopsis thaliana]
  misc_feature (102)..(200): Homolog of NCBI NO: 8778537 NR Description: F22G5.5 [Arabidopsis thaliana]
  misc_feature (1)..(102): Homolog of NCBI NO: 8778537 NR Description: F22G5.5 [Arabidopsis thaliana]
  misc_feature (1)..(200): Homolog of NCBI NO: 15222437 NR Description: protein kinase (APK1a) [Arabidopsis thaliana]
  misc_feature (1)..(200): Homolog of NCBI NO: 15227001 NR Description: protein kinase (APK1b) [Arabidopsis thaliana]
  misc_feature (1)..(202): Homolog of NCBI NO: 34897424 NR Description: putative protein kinase [Oryza sativa (japonica
  misc_feature (1)..(206): Homolog of NCBI NO: 34906046 NR Description: putative serine/threonine-specific protein kinase
  misc_feature (1)..(206): Homolog of NCBI NO: 14719339 NR Description: putative protein kinase [Oryza sativa]
MPKGSLEHHLFRRAPHFQPLSWSLRMKVALEAARGLAFLHSDEAKVIYRDFKTSNVLLDSEYNAKLSDFGLAKDGPSGDKSHVSTRVMGTQGYAAPEYLATGHLTTKSDVYTYGVVLLELLTGQRALDKNRPPGQHNLVEWARPYINSKRRVIHVLDPRLGSQYSLPAAQKAAALAMQCLSMDARCRPDMDQVVTALEKLPEVKKTYK

SEQ ID NO: 63121 - DNA, 1342 bp, Triticum aestivum
  misc_feature (1)..(1342): Ceres Seq. ID no. 14302333
gacccccaacaacctccctcccccctcgtgcgcctctactaaaccgagtagtcggcaaggaggggcagcaggggagggagatctgactgacgaggcagggatgatggagagccagccgctgcaggccccgacggccgagccccacggcgccggagccgcggacgaccaggccggagccggagctccccccgccgtcgttcccgggaaggagttcacgcggacctgcaagggcctcgtcgtcgtgctcatcggcggctacgtgctgctgcaactcctcccatcctccctcaactacctcgccatcatccccgccaagacaattccctttgtatggaccgtcttcaccgccggttacatcgagcaagtcctcccaggggctattggcagttcccttggtcttctcttctgcgggaaggatattgagccagtctggggccgcaaggagttcttgaagttcattatcttgatcaactccatctgcggcatccttgcgttctgcattgctgttgcactgtactatgtcaccgggaaagagagcttccttgtaacgccactttctggcttccatggcgcccttgctggctttctggttggcctgaagcagctcttgccaaaccttgagctccccatgtgctttttctggaaaataaaggctaagtggatgccattctttgtcatgtgcttctcaactatcatggccttcattgtgccggattccatcaacttcctgccgactttgttgtctgggatgtacgtcagctggctttacctgagatacttccagaagaacccactgacaggacttaagggcgacccaagtgatgacttctccttccccagcttgttcccagatgccatgcggccagtcacagacccagttgctaatctgttcgaccggatgttgtgtgcgaggtctaagccttcagaaattgccctcccagttaccgatcctaccaaggcatcgagaagaagggagcgtggcgagagggttctcgaggaaaggatggccgcggatcatgcggctgacgccgaagccccagctcactctgcggaagattaagaattttcccctgtgctacgtcgtcatagtggccacggtcgccttgtaactcctcggatttgtgttctggggagcatattcatttttacagtggaccgatgatatgataatactttactgcccctcttttgtttccttgttttgagaatattggttggttaaattgtgttgtagttcctgattacagtgaggaaagaagaaaaagggtggcatccccttgcccccgatgttgtaatgtagaaaaagaatgacttgtcagtaacaatgtgaagtattttttcc

SEQ ID NO: 63122 - protein, 352 aa, Triticum aestivum
  peptide (1)..(352): Ceres Seq. ID no. 14302334
  misc_feature (98)..(304): Homolog of NCBI NO: 32413290 NR Description: hypothetical protein [Neurospora crassa]
  misc_feature (64)..(295): Homolog of NCBI NO: 31197821 NR Description: ENSANGP00000018642 [Anopheles gambiae]
  misc_feature (76)..(335): Homolog of NCBI NO: 34865897 NR Description: similar to PL6 protein [Rattus norvegicus]
  misc_feature (76)..(335): Homolog of NCBI NO: 9790165 NR Description: PL6 protein; PL-6; placental protein 6 [Mus
  misc_feature (78)..(352): Homolog of NCBI NO: 19920824 NR Description: CG9536-PA [Drosophila melanogaster]
  misc_feature (78)..(335): Homolog of NCBI NO: 5902022 NR Description: PL6 protein [Homo sapiens]
  misc_feature (71)..(343): Homolog of NCBI NO: 18398108 NR Description: expressed protein [Arabidopsis thaliana]
  misc_feature (71)..(343): Homolog of NCBI NO: 6648207 NR Description: unknown protein [Arabidopsis thaliana]
  misc_feature (62)..(352): Homolog of NCBI NO: 34395257 NR Description: putative placental protein 6
  misc_feature (35)..(352): Homolog of NCBI NO: 21741573 NR Description: OSJNBa0094O15.3 [Oryza sativa (japonica
TPNNLPPPSCASTKPSSRQGGAAGEGDLTDEAGMMESQPLQAPTAEPHGAGAADDQAGAGAPPAVVPGKEFTRTCKGLVVVLIGGYVLLQLLPSSLNYLAIIPAKTIPFVWTVFTAGYIEQVLPGAIGSSLGLLFCGKDIEPVWGRKEFLKFIILINSICGILAFCIAVALYYVTGKESFLVTPLSGFHGALAGFLVGLKQLLPNLELPMCFFWKIKAKWMPFFVMCFSTIMAFIVPDSINFLPTLLSGMYVSWLYLRYFQKNPLTGLKGDPSDDFSFPSLFPDAMRPVTDPVANLFDRMLCARSKPSEIALPVTDPTKASRRRERGERVLEERMAADHAADAEAPAHSAED

SEQ ID NO: 63123 - protein, 319 aa, Triticum aestivum
  peptide (1)..(319): Ceres Seq. ID no. 14302335
  misc_feature (65)..(271): Homolog of NCBI NO: 32413290 NR Description: hypothetical protein [Neurospora crassa]
  misc_feature (31)..(262): Homolog of NCBI NO: 31197821 NR Description: ENSANGP00000018642 [Anopheles gambiae]
  misc_feature (43)..(302): Homolog of NCBI NO: 34865897 NR Description: similar to PL6 protein [Rattus norvegicus]
  misc_feature (43)..(302): Homolog of NCBI NO: 9790165 NR Description: PL6 protein; PL-6; placental protein 6 [Mus
  misc_feature (45)..(319): Homolog of NCBI NO: 19920824 NR Description: CG9536-PA [Drosophila melanogaster]
  misc_feature (45)..(302): Homolog of NCBI NO: 5902022 NR Description: PL6 protein [Homo sapiens]
  misc_feature (38)..(310): Homolog of NCBI NO: 18398108 NR Description: expressed protein [Arabidopsis thaliana]
  misc_feature (38)..(310): Homolog of NCBI NO: 6648207 NR Description: unknown protein [Arabidopsis thaliana]
  misc_feature (29)..(319): Homolog of NCBI NO: 34395257 NR Description: putative placental protein 6
  misc_feature (2)..(319): Homolog of NCBI NO: 21741573 NR Description: OSJNBa0094O15.3 [Oryza sativa (japonica
MMESQPLQAPTAEPHGAGAADDQAGAGAPPAVVPGKEFTRTCKGLVVVLIGGYVLLQLLPSSLNYLAIIPAKTIPFVWTVFTAGYIEQVLPGAIGSSLGLLFCGKDIEPVWGRKEFLKFIILINSICGILAFCIAVALYYVTGKESFLVTPLSGFHGALAGFLVGLKQLLPNLELPMCFFWKIKAKWMPFFVMCFSTIMAFIVPDSINFLPTLLSGMYVSWLYLRYFQKNPLTGLKGDPSDDFSFPSLFPDAMRPVTDPVANLFDRMLCARSKPSEIALPVTDPTKASRRRERGERVLEERMAADHAADAEAPAHSAED

SEQ ID NO: 63124 - protein, 318 aa, Triticum aestivum
  peptide (1)..(318): Ceres Seq. ID no. 14302336
  misc_feature (64)..(270): Homolog of NCBI NO: 32413290 NR Description: hypothetical protein [Neurospora crassa]
  misc_feature (30)..(261): Homolog of NCBI NO: 31197821 NR Description: ENSANGP00000018642 [Anopheles gambiae]
  misc_feature (42)..(301): Homolog of NCBI NO: 34865897 NR Description: similar to PL6 protein [Rattus norvegicus]
  misc_feature (42)..(301): Homolog of NCBI NO: 9790165 NR Description: PL6 protein; PL-6; placental protein 6 [Mus
  misc_feature (44)..(318): Homolog of NCBI NO: 19920824 NR Description: CG9536-PA [Drosophila melanogaster]
  misc_feature (44)..(301): Homolog of NCBI NO: 5902022 NR Description: PL6 protein [Homo sapiens]
  misc_feature (37)..(309): Homolog of NCBI NO: 18398108 NR Description: expressed protein [Arabidopsis thaliana]
  misc_feature (37)..(309): Homolog of NCBI NO: 6648207 NR Description: unknown protein [Arabidopsis thaliana]
  misc_feature (28)..(318): Homolog of NCBI NO: 34395257 NR Description: putative placental protein 6
  misc_feature (1)..(318): Homolog of NCBI NO: 21741573 NR Description: OSJNBa0094O15.3 [Oryza sativa (japonica
MESQPLQAPTAEPHGAGAADDQAGAGAPPAVVPGKEFTRTCKGLVVVLIGGYVLLQLLPSSLNYLAIIPAKTIPFVWTVFTAGYIEQVLPGAIGSSLGLLFCGKDIEPVWGRKEFLKFIILINSICGILAFCIAVALYYVTGKESFLVTPLSGFHGALAGFLVGLKQLLPNLELPMCFFWKIKAKWMPFFVMCFSTIMAFIVPDSINFLPTLLSGMYVSWLYLRYFQKNPLTGLKGDPSDDFSFPSLFPDAMRPVTDPVANLFDRMLCARSKPSEIALPVTDPTKASRRRERGERVLEERMAADHAADAEAPAHSAED

SEQ ID NO: 63125 - DNA, 1382 bp, Triticum aestivum
  misc_feature (1)..(1382): Ceres Seq. ID no. 13596976
aaagatccccaaacccatcaaacctttgcgtgccccccgctccactcccctctcccctcccctcactgcgtgcgcactgcggccacagcgcgctccggatcggcggatctcgtcgggcggcggccgccacgatgatgagcagcgtctcccctccggcgccgtcgctcccctccgggggtggaagcttcttcagagggtacacgaagctctgcaagggcctcgccgtcatattgcttctcgtgcacctcttggtccagctgttcccatcggccgtcaactatctcgcgcttatccctgcaaggacaatccctttcgcctggaacttgataactgctggctatgtcgagcaaaccattccaggggtgattatcagcatcattggtcttcttttatttgggaaattattagagcctttatggggcacaaaggagttatcaaagttcgtttttattgtcaacttctcaacttcaatgtgtgtcttcgtaactgctattgctgtgtactacgtaacacaacaagagagctacctctacactcctctttctggtttctatggggttctgtcaggattgctggtgggcatcaagcaacttatgccagagttggagcttaatcttttcgtgctgaagattaagggaaagtggatcccatcacttattgcactgatctccgttgttgtaagcttcttcatgaaggacttggtatcttacctcccagttatactgtttggcatttatatgagttggatttacctgcgttacttccaaaagaggctagagacaggcctgaaaggggatccaagcgaggagttctctttctcaagtttcttccctgcaattctgagaccagttctggatccaatagccacaatattccataggcttctttgtggaagatctgatagggcagaccggggtcagacattggaaacgtcatcattgccgggttcagattctactgaggcaaacaggaggagggaaaggggtcaaagggcactggagcaaagattggctgagaagctggccgcggtcaagagtacagagagcacgtctctcgacgcatccgacaaagtttgagccttctacaaagacgacctgccaaatgttgtgaattcccggtgctgcgttacccaagtgacgttgtctggaggacaagggagcatcgttggttcggccgcgagcttctaggggaggtggtgatgcgagaatgtgtgattttactgatttagggaaccatatgccgaactgtgcaatgatagcatcatgtttgttagcacaatttagccgcgcactgactgctgagagtttttcgcttttcatttttgaggcccagccagaggctttccttgagcatgaatgagttgccgcattggtttgtttgtc

SEQ ID NO: 63126 - protein, 357 aa, Triticum aestivum
  peptide (1)..(357): Ceres Seq. ID no. 13596977
  misc_feature (263)..(336): Homolog of NCBI NO: 2340093 NR Description: PL6 protein, unknown function but deleted in
  misc_feature (106)..(198): Homolog of NCBI NO: 2340093 NR Description: PL6 protein, unknown function but deleted in
  misc_feature (83)..(336): Homolog of NCBI NO: 19920824 NR Description: CG9536-PA [Drosophila melanogaster]
  misc_feature (60)..(336): Homolog of NCBI NO: 5902022 NR Description: PL6 protein [Homo sapiens]
  misc_feature (60)..(356): Homolog of NCBI NO: 34865897 NR Description: similar to PL6 protein [Rattus norvegicus]
  misc_feature (60)..(356): Homolog of NCBI NO: 9790165 NR Description: PL6 protein; PL-6; placental protein 6 [Mus
  misc_feature (66)..(354): Homolog of NCBI NO: 21741573 NR Description: OSJNBa0094O15.3 [Oryza sativa (japonica
  misc_feature (59)..(357): Homolog of NCBI NO: 6648207 NR Description: unknown protein [Arabidopsis thaliana]
  misc_feature (55)..(357): Homolog of NCBI NO: 18398108 NR Description: expressed protein [Arabidopsis thaliana]
  misc_feature (44)..(357): Homolog of NCBI NO: 34395257 NR Description: putative placental protein 6
RSPNPSNLCVPPAPLPSPLPSLRAHCGHSALRIGGSRRAAAATMMSSVSPPAPSLPSGGGSFFRGYTKLCKGLAVILLLVHLLVQLFPSAVNYLALIPARTIPFAWNLITAGYVEQTIPGVIISIIGLLLFGKLLEPLWGTKELSKFVFIVNFSTSMCVFVTAIAVYYVTQQESYLYTPLSGFYGVLSGLLVGIKQLMPELELNLFVLKIKGKWIPSLIALISVVVSFFMKDLVSYLPVILFGIYMSWIYLRYFQKRLETGLKGDPSEEFSFSSFFPAILRPVLDPIATIFHRLLCGRSDRADRGQTLETSSLPGSDSTEANRRRERGQRALEQRLAEKLAAVKSTESTSLDASDKV

SEQ ID NO: 63127 - protein, 314 aa, Triticum aestivum
  peptide (1)..(314): Ceres Seq. ID no. 13596978
  misc_feature (220)..(293): Homolog of NCBI NO: 2340093 NR Description: PL6 protein, unknown function but deleted in
  misc_feature (63)..(155): Homolog of NCBI NO: 2340093 NR Description: PL6 protein, unknown function but deleted in
  misc_feature (40)..(293): Homolog of NCBI NO: 19920824 NR Description: CG9536-PA [Drosophila melanogaster]
  misc_feature (17)..(293): Homolog of NCBI NO: 5902022 NR Description: PL6 protein [Homo sapiens]
  misc_feature (17)..(313): Homolog of NCBI NO: 34865897 NR Description: similar to PL6 protein [Rattus norvegicus]
  misc_feature (17)..(313): Homolog of NCBI NO: 9790165 NR Description: PL6 protein; PL-6; placental protein 6 [Mus
  misc_feature (23)..(311): Homolog of NCBI NO: 21741573 NR Description: OSJNBa0094O15.3 [Oryza sativa (japonica
  misc_feature (16)..(314): Homolog of NCBI NO: 6648207 NR Description: unknown protein [Arabidopsis thaliana]
  misc_feature (12)..(314): Homolog of NCBI NO: 18398108 NR Description: expressed protein [Arabidopsis thaliana]
  misc_feature (1)..(314): Homolog of NCBI NO: 34395257 NR Description: putative placental protein 6
MMSSVSPPAPSLPSGGGSFFRGYTKLCKGLAVILLLVHLLVQLFPSAVNYLALIPARTIPFAWNLITAGYVEQTIPGVIISIIGLLLFGKLLEPLWGTKELSKFVFIVNFSTSMCVFVTAIAVYYVTQQESYLYTPLSGFYGVLSGLLVGIKQLMPELELNLFVLKIKGKWIPSLIALISVVVSFFMKDLVSYLPVILFGIYMSWIYLRYFQKRLETGLKGDPSEEFSFSSFFPAILRPVLDPIATIFHRLLCGRSDRADRGQTLETSSLPGSDSTEANRRRERGQRALEQRLAEKLAAVKSTESTSLDASDKV

SEQ ID NO: 63128 - protein, 313 aa, Triticum aestivum
  peptide (1)..(313): Ceres Seq. ID no. 13596979
  misc_feature (219)..(292): Homolog of NCBI NO: 2340093 NR Description: PL6 protein, unknown function but deleted in
  misc_feature (62)..(154): Homolog of NCBI NO: 2340093 NR Description: PL6 protein, unknown function but deleted in
  misc_feature (39)..(292): Homolog of NCBI NO: 19920824 NR Description: CG9536-PA [Drosophila melanogaster]
  misc_feature (16)..(292): Homolog of NCBI NO: 5902022 NR Description: PL6 protein [Homo sapiens]
  misc_feature (16)..(312): Homolog of NCBI NO: 34865897 NR Description: similar to PL6 protein [Rattus norvegicus]
  misc_feature (16)..(312): Homolog of NCBI NO: 9790165 NR Description: PL6 protein; PL-6; placental protein 6 [Mus
  misc_feature (22)..(310): Homolog of NCBI NO: 21741573 NR Description: OSJNBa0094O15.3 [Oryza sativa (japonica
  misc_feature (15)..(313): Homolog of NCBI NO: 6648207 NR Description: unknown protein [Arabidopsis thaliana]
  misc_feature (11)..(313): Homolog of NCBI NO: 18398108 NR Description: expressed protein [Arabidopsis thaliana]
  misc_feature (1)..(313): Homolog of NCBI NO: 34395257 NR Description: putative placental protein 6
MSSVSPPAPSLPSGGGSFFRGYTKLCKGLAVILLLVHLLVQLFPSAVNYLALIPARTIPFAWNLITAGYVEQTIPGVIISIIGLLLFGKLLEPLWGTKELSKFVFIVNFSTSMCVFVTAIAVYYVTQQESYLYTPLSGFYGVLSGLLVGIKQLMPELELNLFVLKIKGKWIPSLIALISVVVSFFMKDLVSYLPVILFGIYMSWIYLRYFQKRLETGLKGDPSEEFSFSSFFPAILRPVLDPIATIFHRLLCGRSDRADRGQTLETSSLPGSDSTEANRRRERGQRALEQRLAEKLAAVKSTESTSLDASDKV

SEQ ID NO: 63129 - DNA, 1137 bp, Triticum aestivum
  misc_feature (1)..(1137): Ceres Seq. ID no. 13662219
aaccatcaccaccgagctacctccagcctccagccatcactcagctcaaagacacaatcaggcaatcagcggcggcgagaacacacacagagtcacagatgaccttcagcgtctcgccggcgacgggggcgagccaggagtacatgatccggttcgacggccacttcgaggacccgagctccgcggccgcgagcgccgagccacccctgccgttcgccggcagggctttctcgccacagcaggagcagagcgccatggtcgccgcgctgctgcacgtcgtctccgggtacaccacgccggcgcctgacctcttcttcccggcgcgcaaggaggcgtgcacggcgtgcgggatggacgggtgcctcgggtgcgagttcttcggcgcggaggccgggcgcgcggtcgcggcatcggacgcgccgagagcgccggcggccggcgggccgcagaggaggcggaggaacaagaagaaccagtaccgcggcgtcaggcagcggccgtggggcaagtgggcggcggagatccgcgacccgcgccgcgccgtgcgggtgtggctcgggaccttcgacacggccgaggacgccgccagggcctacgaccgcgccgccgtcgagttccgcggcccgcgcgccaagctcaacttctccttccccgagcagcagcagcagcagctaggcggcagcggcaatgccgcggccaagtcagacgcgtgctcgccctcgccttcgccccgcagcgcggacgaggacgaaacaggggacctgctctgggacggcttggtggacttgatgaagctggacgagagcgacctctgcttactgctcccggtcgacaacacggataaatttcacatagaggggaagagacgatcaggatcaggggtacccctctgctactagtgttagactattagcgagtaccagatagacaatcagcagtcctaatcctgctcactacgtggttagcacacgtcctagcttcggttgtaattctgcataaataggcacccgatcaatggaaaagttgtgttcaaccatactcatctgccatgttgtatgtagacaaatccaatttggggcttatttgttggaactataatggtttctattaatagaaaccaggggaaaccccttttgc

SEQ ID NO: 63130 - protein, 298 aa, Triticum aestivum
  peptide (1)..(298): Ceres Seq. ID no. 13662220
  misc_feature (156)..(216): Pfam Name: AP2 domain Pfam Description: AP2 domain
  misc_feature (81)..(214): Homolog of NCBI NO: 33519168 NR Description: AP2 domain-containing protein AP29
  misc_feature (126)..(235): Homolog of NCBI NO: 30683059 NR Description: AP2 domain protein RAP2.2 [Arabidopsis thaliana]
  misc_feature (83)..(218): Homolog of NCBI NO: 34221731 NR Description: putative AP2 domain transcription factor
  misc_feature (136)..(242): Homolog of NCBI NO: 34894554 NR Description: B1011A07.25 [Oryza sativa (japonica
  misc_feature (114)..(246): Homolog of NCBI NO: 34908616 NR Description: P0677H08.8 [Oryza sativa (japonica
  misc_feature (143)..(214): Homolog of NCBI NO: 40557189 NR Description: ethylene-binding protein [Lycopersicon esculentum]
  misc_feature (143)..(214): Homolog of NCBI NO: 28274830 NR Description: ethylene response factor 2 [Lycopersicon
  misc_feature (83)..(218): Homolog of NCBI NO: 15240610 NR Description: putative protein; protein id: At5g50080.1
  misc_feature (85)..(243): Homolog of NCBI NO: 38347164 NR Description: OSJNBa0039C07.10 [Oryza sativa (japonica
  misc_feature (128)..(280): Homolog of NCBI NO: 15235365 NR Description: AP2 domain transcription factor, putative
PSPPSYLQPPAITQLKDTIRQSAAARTHTESQMTFSVSPATGASQEYMIRFDGHFEDPSSAAASAEPPLPFAGRAFSPQQEQSAMVAALLHVVSGYTTPAPDLFFPARKEACTACGMDGCLGCEFFGAEAGRAVAASDAPRAPAAGGPQRRRRNKKNQYRGVRQRPWGKWAAEIRDPRRAVRVWLGTFDTAEDAARAYDRAAVEFRGPRAKLNFSFPEQQQQQLGGSGNAAAKSDACSPSPSPRSADEDETGDLLWDGLVDLMKLDESDLCLLLPVDNTDKFHIEGKRRSGSGVPLCY

SEQ ID NO: 63131 - protein, 266 aa, Triticum aestivum
  peptide (1)..(266): Ceres Seq. ID no. 13662221
  misc_feature (124)..(184): Pfam Name: AP2 domain Pfam Description: AP2 domain
  misc_feature (49)..(182): Homolog of NCBI NO: 33519168 NR Description: AP2 domain-containing protein AP29
  misc_feature (94)..(203): Homolog of NCBI NO: 30683059 NR Description: AP2 domain protein RAP2.2 [Arabidopsis thaliana]
  misc_feature (51)..(186): Homolog of NCBI NO: 34221731 NR Description: putative AP2 domain transcription factor
  misc_feature (104)..(210): Homolog of NCBI NO: 34894554 NR Description: B1011A07.25 [Oryza sativa (japonica
  misc_feature (82)..(214): Homolog of NCBI NO: 34908616 NR Description: P0677H08.8 [Oryza sativa (japonica
  misc_feature (111)..(182): Homolog of NCBI NO: 40557189 NR Description: ethylene-binding protein [Lycopersicon esculentum]
  misc_feature (111)..(182): Homolog of NCBI NO: 28274830 NR Description: ethylene response factor 2 [Lycopersicon
  misc_feature (51)..(186): Homolog of NCBI NO: 15240610 NR Description: putative protein; protein id: At5g50080.1
  misc_feature (53)..(211): Homolog of NCBI NO: 38347164 NR Description: OSJNBa0039C07.10 [Oryza sativa (japonica
  misc_feature (96)..(248): Homolog of NCBI NO: 15235365 NR Description: AP2 domain transcription factor, putative
MTFSVSPATGASQEYMIRFDGHFEDPSSAAASAEPPLPFAGRAFSPQQEQSAMVAALLHVVSGYTTPAPDLFFPARKEACTACGMDGCLGCEFFGAEAGRAVAASDAPRAPAAGGPQRRRRNKKNQYRGVRQRPWGKWAAEIRDPRRAVRVWLGTFDTAEDAARAYDRAAVEFRGPRAKLNFSFPEQQQQQLGGSGNAAAKSDACSPSPSPRSADEDETGDLLWDGLVDLMKLDESDLCLLLPVDNTDKFHIEGKRRSGSGVPLCY

SEQ ID NO: 63132 - protein, 251 aa, Triticum aestivum
  peptide (1)..(251): Ceres Seq. ID no. 13662222
  misc_feature (109)..(169): Pfam Name: AP2 domain Pfam Description: AP2 domain
  misc_feature (34)..(167): Homolog of NCBI NO: 33519168 NR Description: AP2 domain-containing protein AP29
  misc_feature (79)..(188): Homolog of NCBI NO: 30683059 NR Description: AP2 domain protein RAP2.2 [Arabidopsis thaliana]
  misc_feature (36)..(171): Homolog of NCBI NO: 34221731 NR Description: putative AP2 domain transcription factor
  misc_feature (89)..(195): Homolog of NCBI NO: 34894554 NR Description: B1011A07.25 [Oryza sativa (japonica
  misc_feature (67)..(199): Homolog of NCBI NO: 34908616 NR Description: P0677H08.8 [Oryza sativa (japonica
  misc_feature (96)..(167): Homolog of NCBI NO: 40557189 NR Description: ethylene-binding protein [Lycopersicon esculentum]
  misc_feature (96)..(167): Homolog of NCBI NO: 28274830 NR Description: ethylene response factor 2 [Lycopersicon
  misc_feature (36)..(171): Homolog of NCBI NO: 15240610 NR Description: putative protein; protein id: At5g50080.1
  misc_feature (38)..(196): Homolog of NCBI NO: 38347164 NR Description: OSJNBa0039C07.10 [Oryza sativa (japonica
  misc_feature (81)..(233): Homolog of NCBI NO: 15235365 NR Description: AP2 domain transcription factor, putative
MIRFDGHFEDPSSAAASAEPPLPFAGRAFSPQQEQSAMVAALLHVVSGYTTPAPDLFFPARKEACTACGMDGCLGCEFFGAEAGRAVAASDAPRAPAAGGPQRRRRNKKNQYRGVRQRPWGKWAAEIRDPRRAVRVWLGTFDTAEDAARAYDRAAVEFRGPRAKLNFSFPEQQQQQLGGSGNAAAKSDACSPSPSPRSADEDETGDLLWDGLVDLMKLDESDLCLLLPVDNTDKFHIEGKRRSGSGVPLCY

SEQ ID NO: 63133 - DNA, 989 bp, Triticum aestivum
  misc_feature (1)..(989): Ceres Seq. ID no. 12615635
acacttgcaaattgagtaaaacttaagagcacatacgtacacagcagagcaatagtatacgagcaacaaatagcaaggaagagatagatccaagacgaagatcggaaacgatggccggccaaggaaatgatgatgtcaaggtactgggcacggcggcgagcatgttcgcgatccgcgtgcgcatggcgctgcacgtcaagggcgtgagctacgagtacctggagcaggacctgttccacaagggcgacctcctcctcgcctccaacccggtgcgcaaggccgtccccgtgctcatccacgccggcaggcccgtctgcgagtcgctcgccatcgtcgagtacgtcgacgaggtctgggccgatgcctcgctcctccctgccgacccctacgaccgcgccgtcgcccgcttctgggccgcctatgtcgacgacaaggctgtccccacgtggataggcatcatgagggcggccacggaggaggacagggcggagagcctggcagctgcgctcgaggcggtcgcgcccttggaggacgccttcgcccaatgctctggcgggaaggccttcttcgccggagactctatcgggtacctcgatctcgcgctcgggtgcaacctcttctggatcgaggcgctgcgccacatgttcggtgtcacggtcatcgacgccggcaggactccgcgcctggccgcctgggctgagaggttcgtggagacggaggctgcaaagaaggcggcaccgcccatggaaagcatgttggaggaggccgggaaactgcgggctatgtgggctgctgcggctgctgcaaagtaattagtggctactcctacctcgcaggagcttcttattttttcggtcgtcacttttgtttggaggttttgcagtcgtcagtcgtcacctttttttttacatcagcgtcagtggtcactgttacctaaaggattataaatttcatttgttctaagtttttttttttgagcattagtacag

SEQ ID NO: 63134 - protein, 233 aa, Triticum aestivum
  peptide (1)..(233): Ceres Seq. ID no. 12615636
  misc_feature (88)..(203): Pfam Name: Glutathione S-transferase, C-terminal domain Pfam Description: Glutathione S-transferase, C-terminal domain
  misc_feature (1)..(230): Homolog of NCBI NO: 37536250 NR Description: putative glutathione S-transferase
  misc_feature (1)..(232): Homolog of NCBI NO: 37536308 NR Description: putative glutathione S-transferase
  misc_feature (1)..(232): Homolog of NCBI NO: 37536310 NR Description: putative glutathione S-transferase
  misc_feature (1)..(232): Homolog of NCBI NO: 33304610 NR Description: tau class GST protein 4 [Oryza sativa (indica
  misc_feature (1)..(232): Homolog of NCBI NO: 37536280 NR Description: putative glutathione S-transferase
  misc_feature (5)..(231): Homolog of NCBI NO: 11385517 NR Description: glutathione S-transferase GST 33 [Zea mays]
  misc_feature (1)..(229): Homolog of NCBI NO: 11385503 NR Description: glutathione S-transferase GST 26 [Zea mays]
  misc_feature (1)..(232): Homolog of NCBI NO: 37536352 NR Description: putative glutathione S-transferase
  misc_feature (1)..(232): Homolog of NCBI NO: 37536354 NR Description: putative glutathione S-transferase
  misc_feature (1)..(233): Homolog of NCBI NO: 22022398 NR Description: glutathione-S-transferase Cla47 [Triticum
MAGQGNDDVKVLGTAASMFAIRVRMALHVKGVSYEYLEQDLFHKGDLLLASNPVRKAVPVLIHAGRPVCESLAIVEYVDEVWADASLLPADPYDRAVARFWAAYVDDKAVPTWIGIMRAATEEDRAESLAAALEAVAPLEDAFAQCSGGKAFFAGDSIGYLDLALGCNLFWIEALRHMFGVTVIDAGRTPRLAAWAERFVETEAAKKAAPPMESMLEEAGKLRAMWAAAAAAK

SEQ ID NO: 63135 - protein, 216 aa, Triticum aestivum
  peptide (1)..(216): Ceres Seq. ID no. 12615637
  misc_feature (71)..(186): Pfam Name: Glutathione S-transferase, C-terminal domain Pfam Description: Glutathione S-transferase, C-terminal domain
  misc_feature (1)..(213): Homolog of NCBI NO: 37536250 NR Description: putative glutathione S-transferase
  misc_feature (1)..(215): Homolog of NCBI NO: 37536308 NR Description: putative glutathione S-transferase
  misc_feature (1)..(215): Homolog of NCBI NO: 37536310 NR Description: putative glutathione S-transferase
  misc_feature (1)..(215): Homolog of NCBI NO: 33304610 NR Description: tau class GST protein 4 [Oryza sativa (indica
  misc_feature (1)..(215): Homolog of NCBI NO: 37536280 NR Description: putative glutathione S-transferase
  misc_feature (1)..(214): Homolog of NCBI NO: 11385517 NR Description: glutathione S-transferase GST 33 [Zea mays]
  misc_feature (1)..(212): Homolog of NCBI NO: 11385503 NR Description: glutathione S-transferase GST 26 [Zea mays]
  misc_feature (1)..(215): Homolog of NCBI NO: 37536352 NR Description: putative glutathione S-transferase
  misc_feature (1)..(215): Homolog of NCBI NO: 37536354 NR Description: putative glutathione S-transferase
  misc_feature (1)..(216): Homolog of NCBI NO: 22022398 NR Description: glutathione-S-transferase Cla47 [Triticum
MFAIRVRMALHVKGVSYEYLEQDLFHKGDLLLASNPVRKAVPVLIHAGRPVCESLAIVEYVDEVWADASLLPADPYDRAVARFWAAYVDDKAVPTWIGIMRAATEEDRAESLAAALEAVAPLEDAFAQCSGGKAFFAGDSIGYLDLALGCNLFWIEALRHMFGVTVIDAGRTPRLAAWAERFVETEAAKKAAPPMESMLEEAGKLRAMWAAAAAAK

SEQ ID NO: 63136 - protein, 209 aa, Triticum aestivum
  peptide (1)..(209): Ceres Seq. ID no. 12615638
  misc_feature (64)..(179): Pfam Name: Glutathione S-transferase, C-terminal domain Pfam Description: Glutathione S-transferase, C-terminal domain
  misc_feature (1)..(206): Homolog of NCBI NO: 37536250 NR Description: putative glutathione S-transferase
  misc_feature (1)..(208): Homolog of NCBI NO: 37536308 NR Description: putative glutathione S-transferase
  misc_feature (1)..(208): Homolog of NCBI NO: 37536310 NR Description: putative glutathione S-transferase
  misc_feature (1)..(208): Homolog of NCBI NO: 33304610 NR Description: tau class GST protein 4 [Oryza sativa (indica
  misc_feature (1)..(208): Homolog of NCBI NO: 37536280 NR Description: putative glutathione S-transferase
  misc_feature (1)..(207): Homolog of NCBI NO: 11385517 NR Description: glutathione S-transferase GST 33 [Zea mays]
  misc_feature (1)..(205): Homolog of NCBI NO: 11385503 NR Description: glutathione S-transferase GST 26 [Zea mays]
  misc_feature (1)..(208): Homolog of NCBI NO: 37536352 NR Description: putative glutathione S-transferase
  misc_feature (1)..(208): Homolog of NCBI NO: 37536354 NR Description: putative glutathione S-transferase
  misc_feature (1)..(209): Homolog of NCBI NO: 22022398 NR Description: glutathione-S-transferase Cla47 [Triticum
MALHVKGVSYEYLEQDLFHKGDLLLASNPVRKAVPVLIHAGRPVCESLAIVEYVDEVWADASLLPADPYDRAVARFWAAYVDDKAVPTWIGIMRAATEEDRAESLAAALEAVAPLEDAFAQCSGGKAFFAGDSIGYLDLALGCNLFWIEALRHMFGVTVIDAGRTPRLAAWAERFVETEAAKKAAPPMESMLEEAGKLRAMWAAAAAAK

SEQ ID NO: 63137 - DNA, 735 bp, Triticum aestivum
  misc_feature (1)..(735): Ceres Seq. ID no. 12585079
gatacacagagcgagaggccgaggaagcgatagctctagcgataaggcactgacagatcaatggctgccacggcgtactccgtggccctcctcggcggagcgcgcctccccgccgccaccggcaacgccgccccccgctcctccgccttcctcccgcggcgcaacctccacccgctccgcctccaagatgcgcccaggccgtccctgctccgcgtgaaggccgcctccgacgacacgtcggcgagcggcgacgagatcatcgaggacctcaaggggaagtgggaggcgattgaggacaagccgaccttcctcctctacagcggcggcgccgtcgtcgcgctctggctcaccaccgtcgtcgtcggcgccatcaactccgtgccgttgctccccaagctcctggagctggttgggctcggctacaccgggtggttcgtgtaccgctacctcctcttcaaggaaagcaggaaagagttggccaccgacatcgaaagcttgaagaagaagattgccggaacagaataaactcaagttctctggaacgttttcgatggctcttttgtctgtccatgtaatggaagaacacctacttgcttagagtaccatccactgcatttgtgcgttacatacatatctgtatgaaaaaagaaatgcgctttggttggtgtgcggtgacaatagtgaaattgtatcagtttctggaagtcttctattgttttatatatcaatgtgttc

SEQ ID NO: 63138 - protein, 154 aa, Triticum aestivum
  peptide (1)..(154): Ceres Seq. ID no. 12585080
  misc_feature (35)..(151): Homolog of NCBI NO: 18403896 NR Description: expressed protein
  misc_feature (1)..(153): Homolog of NCBI NO: 21555057 NR Description: unknown [Arabidopsis thaliana]
  misc_feature (16)..(150): Homolog of NCBI NO: 37536446 NR Description: hypothetical protein [Oryza sativa (japonica
  misc_feature (55)..(153): Homolog of NCBI NO: 34393236 NR Description: unknown protein [Oryza sativa (japonica
  misc_feature (1)..(153): Homolog of NCBI NO: 18407178 NR Description: expressed protein
  misc_feature (56)..(154): Homolog of NCBI NO: 18420175 NR Description: expressed protein
  misc_feature (56)..(154): Homolog of NCBI NO: 7485852 NR Description: hypothetical protein F20D10.220 - Arabidopsis
  misc_feature (17)..(154): Homolog of NCBI NO: 38175474 NR Description: unknown protein [Oryza sativa (japonica
  misc_feature (1)..(154): Homolog of NCBI NO: 687677 NR Description: unknown
  misc_feature (1)..(154): Homolog of NCBI NO: 18411555 NR Description: expressed protein
MAATAYSVALLGGARLPAATGNAAPRSSAFLPRRNLHPLRLQDAPRPSLLRVKAASDDTSASGDEIIEDLKGKWEAIEDKPTFLLYSGGAVVALWLTTVVVGAINSVPLLPKLLELVGLGYTGWFVYRYLLFKESRKELATDIESLKKKIAGTE

SEQ ID NO: 63139 - DNA, 936 bp, Triticum aestivum
  misc_feature (1)..(936): Ceres Seq. ID no. 13654993
tgtttacctgttgcaatgcattacaacacaatgatgattgggcacatttcatttgttgttcaatgtgatctaatacctgcttgggcaacaaaagggtggttgcgtactctattgagggactatcccaccctaccgttccatgcaagcatcaacaagtcatttggaaaagtaaatgaaaaaagctggacgctttggcgttgggttcattgacccaaataccgttaatgaaaagatatgggaacgtcatggaaaagaaacatagtaaaacttgctaaagtttttggtggatcaaaataccgaaccagaaatactgttttcttacatctacgggtgagtgttactatatatattgtaatacaaattctatttatgcttactagatgttagtaagtgtagttgatgagttatatatgcacatgcctgcttaattatacaaacgtgtgcgcatgcatgcagttgtcattggatcttgctagtcattgaacttgacgagggaaaagctacattattggactcaataaaggaaacaaaataaatatactacttgaacgttattgggatgctcgacagtgcatgaggcaggcgcaggggactaatttatgtggctacgtagtttgcgagaacattcgcatgaagacgtccgaaaggaagctagcggacaaaaactttcagttgctccagatgcgcgatcagctcctagaagatgaccgcatgaaagcacttcaagaggaaatagtggaatttttcctcgagcaggtcatagatcccaatggagaatactattacccgctgtaatgcctgcattgtaatggtctgcaaattgtaggagaaattttatgtaccaagttgcatgtgaatgcatgcatggtcgaattcgatgatgtgatatatatatatatatatttgatcggttctatgagaaattttttttttttt

SEQ ID NO: 63140 - protein, 73 aa, Triticum aestivum
  peptide (1)..(73): Ceres Seq. ID no. 13654994
  misc_feature (1)..(73): Homolog of NCBI NO: 38346424 NR Description: OSJNBa0019J05.9 [Oryza sativa (japonica
  misc_feature (1)..(71): Homolog of NCBI NO: 22093654 NR Description: similar to hydroxyproline-rich glycoprotein
  misc_feature (1)..(71): Homolog of NCBI NO: 34914712 NR Description: P0560B06.20 [Oryza sativa (japonica
  misc_feature (1)..(71): Homolog of NCBI NO: 14091828 NR Description: Unknown protein [Oryza sativa]
  misc_feature (1)..(71): Homolog of NCBI NO: 29150412 NR Description: hypothetical protein [Oryza sativa (japonica
  misc_feature (1)..(71): Homolog of NCBI NO: 34910244 NR Description: OSJNBa0089K24.8 [Oryza sativa (japonica
  misc_feature (1)..(71): Homolog of NCBI NO: 37531346 NR Description: hypothetical protein [Oryza sativa (japonica
  misc_feature (1)..(71): Homolog of NCBI NO: 29824486 NR Description: hypothetical protein [Oryza sativa (japonica
  misc_feature (1)..(71): Homolog of NCBI NO: 34902530 NR Description: P0581F09.24 [Oryza sativa (japonica
  misc_feature (1)..(69): Homolog of NCBI NO: 20513853 NR Description: HV711N16.8 [Hordeum vulgare]
MRQAQGTNLCGYVVCENIRMKTSERKLADKNFQLLQMRDQLLEDDRMKALQEEIVEFFLEQVIDPNGEYYYPL

SEQ ID NO: 63141 - protein, 69 aa, Triticum aestivum
  peptide (1)..(69): Ceres Seq. ID no. 13654995
  misc_feature (21)..(56): Homolog of NCBI NO: 15219138 NR Description: GTP-binding protein -related [Arabidopsis
CLPVAMHYNTMMIGHISFVVQCDLIPAWATKGWLRTLLRDYPTLPFHASINKSFGKVNEKSWTLWRWVH

SEQ ID NO: 63142 - protein, 64 aa, Triticum aestivum
  peptide (1)..(64): Ceres Seq. ID no. 13654996
  misc_feature (16)..(51): Homolog of NCBI NO: 15219138 NR Description: GTP-binding protein -related [Arabidopsis
MHYNTMMIGHISFVVQCDLIPAWATKGWLRTLLRDYPTLPFHASINKSFGKVNEKSWTLWRWVH

SEQ ID NO: 63143 - DNA, 932 bp, Triticum aestivum
  misc_feature (1)..(932): Ceres Seq. ID no. 14303722
gcaaccctagctgtagtgcagcgtatcccacttcccacctaacccctacccctatccctccgaaccccgcaccaagatggcggcgccgacgaccttctccggcgaggtgtgggcggagctgcgcctggcggacgcgcgcgacgtgccgcacatccacagcctcatccaccagatggcggagttcgagctcctcaccgacctcttcgccgccacccacgagctcctggcctccacgctcttccccacgccccagccggcccccttcacctccttcaccgccctcatcctcgacctctctccgtcccccgccccggcctccgccgacaccgtcggctcccgccgcctcgacctctcggcgtccccgctcgccgacccggaggcggccgccttcccgtccccgcgcggcggcgggcgcgtcacggccgggttcgtcatctgctttcccaactactccaccttcctcgccaagcccgggctgtacgtggaggacatcttcgtgcgcgcgccctggcgccgccgcgggctcggccggatgatgctgtccgccgtcgccggcagggccgcggagatcggaatgggccgcgtggagtggtgcgtgctcgactggaaccagaacgccatcgacttctacgaggggatgggcgccgaggtgttcaagcagtggcgcatctgccggctcaccggtcccgccctcgacaagtacaagggcaccggcagccaggaggaggaggacgccggcgggaaggcccagtaggcctgtaggagaggagagatcggggctccggtgactggtaataataaaggtggtagattttgcctccacttggtgatgtattcttccttgctagtactgatagtgatttagtgcattggtatgttcttcatggagatgcattatggacctgttcttgccttccttggaaggagtattg

SEQ ID NO: 63144 - protein, 225 aa, Triticum aestivum
  peptide (1)..(225): Ceres Seq. ID no. 14303723
  misc_feature (114)..(191): Pfam Name: Acetyltransferase (GNAT) family Pfam Description: Acetyltransferase (GNAT) family
  misc_feature (6)..(209): Homolog of NCBI NO: 17380562 NR Description: Tyramine N-feruloyltransferase 10/30
  misc_feature (6)..(209): Homolog of NCBI NO: 17369608 NR Description: Tyramine N-feruloyltransferase 4/11
  misc_feature (6)..(209): Homolog of NCBI NO: 5852154 NR Description: tyramine hydroxycinnamoyltransferase [Nicotiana
  misc_feature (1)..(218): Homolog of NCBI NO: 19908259 NR Description: N-hydroxycinnamoyl-CoA:tyramine
  misc_feature (13)..(55): Homolog of NCBI NO: 22982569 NR Description: hypothetical protein [Burkholderia fungorum]
  misc_feature (117)..(208): Homolog of NCBI NO: 22982569 NR Description: hypothetical protein [Burkholderia fungorum]
  misc_feature (112)..(208): Homolog of NCBI NO: 22976703 NR Description: hypothetical protein [Ralstonia metallidurans]
  misc_feature (11)..(206): Homolog of NCBI NO: 15451162 NR Description: Unknown protein [Arabidopsis thaliana]
  misc_feature (1)..(206): Homolog of NCBI NO: 18404927 NR Description: GCN5-related N-acetyltransferase (GNAT) family
  misc_feature (1)..(209): Homolog of NCBI NO: 15225009 NR Description: GCN5-related N-acetyltransferase (GNAT) family
MAAPTTFSGEVWAELRLADARDVPHIHSLIHQMAEFELLTDLFAATHELLASTLFPTPQPAPFTSFTALILDLSPSPAPASADTVGSRRLDLSASPLADPEAAAFPSPRGGGRVTAGFVICFPNYSTFLAKPGLYVEDIFVRAPWRRRGLGRMMLSAVAGRAAEIGMGRVEWCVLDWNQNAIDFYEGMGAEVFKQWRICRLTGPALDKYKGTGSQEEEDAGGKAQ

SEQ ID NO: 63145 - protein, 193 aa, Triticum aestivum
  peptide (1)..(193): Ceres Seq. ID no. 14303724
  misc_feature (82)..(159): Pfam Name: Acetyltransferase (GNAT) family Pfam Description: Acetyltransferase (GNAT) family
  misc_feature (1)..(177): Homolog of NCBI NO: 17380562 NR Description: Tyramine N-feruloyltransferase 10/30
  misc_feature (1)..(177): Homolog of NCBI NO: 17369608 NR Description: Tyramine N-feruloyltransferase 4/11
  misc_feature (1)..(177): Homolog of NCBI NO: 5852154 NR Description: tyramine hydroxycinnamoyltransferase [Nicotiana
  misc_feature (1)..(186): Homolog of NCBI NO: 19908259 NR Description: N-hydroxycinnamoyl-CoA:tyramine
  misc_feature (1)..(23): Homolog of NCBI NO: 22982569 NR Description: hypothetical protein [Burkholderia fungorum]
  misc_feature (85)..(176): Homolog of NCBI NO: 22982569 NR Description: hypothetical protein [Burkholderia fungorum]
  misc_feature (80)..(176): Homolog of NCBI NO: 22976703 NR Description: hypothetical protein [Ralstonia metallidurans]
  misc_feature (1)..(174): Homolog of NCBI NO: 15451162 NR Description: Unknown protein [Arabidopsis thaliana]
  misc_feature (1)..(174): Homolog of NCBI NO: 18404927 NR Description: GCN5-related N-acetyltransferase (GNAT) family
  misc_feature (1)..(177): Homolog of NCBI NO: 15225009 NR Description: GCN5-related N-acetyltransferase (GNAT) family
MAEFELLTDLFAATHELLASTLFPTPQPAPFTSFTALILDLSPSPAPASADTVGSRRLDLSASPLADPEAAAFPSPRGGGRVTAGFVICFPNYSTFLAKPGLYVEDIFVRAPWRRRGLGRMMLSAVAGRAAEIGMGRVEWCVLDWNQNAIDFYEGMGAEVFKQWRICRLTGPALDKYKGTGSQEEEDAGGKAQ

SEQ ID NO: 63146 - protein, 177 aa, Triticum aestivum
  peptide (1)..(177): Ceres Seq. ID no. 14303725
  misc_feature (1)..(177): Pfam Name: Extensin-like region Pfam Description: Extensin-like region
  misc_feature (2)..(177): Homolog of NCBI NO: 13592175 NR Description: ppg3 [Leishmania major]
  misc_feature (2)..(177): Homolog of NCBI NO: 13592175 NR Description: ppg3 [Leishmania major]
  misc_feature (2)..(177): Homolog of NCBI NO: 13592175 NR Description: ppg3 [Leishmania major]
  misc_feature (3)..(177): Homolog of NCBI NO: 32414973 NR Description: predicted protein [Neurospora crassa]
  misc_feature (3)..(177): Homolog of NCBI NO: 18376167 NR Description: hypothetical protein [Neurospora crassa]
  misc_feature (2)..(177): Homolog of NCBI NO: 23017082 NR Description: hypothetical protein [Thermobifida fusca]
  misc_feature (3)..(177): Homolog of NCBI NO: 13592175 NR Description: ppg3 [Leishmania major]
  misc_feature (15)..(177): Homolog of NCBI NO: 20138131 NR Description: Vegetative cell wall protein gp1 precursor
  misc_feature (2)..(177): Homolog of NCBI NO: 13592175 NR Description: ppg3 [Leishmania major]
  misc_feature (1)..(177): Homolog of NCBI NO: 23017082 NR Description: hypothetical protein [Thermobifida fusca]
NPSCSAAYPTSHLTPTPIPPNPAPRWRRRRPSPARCGRSCAWRTRATCRTSTASSTRWRSSSSSPTSSPPPTSSWPPRSSPRPSRPPSPPSPPSSSTSLRPPPRPPPTPSAPAASTSRRPRSPTRRRPPSRPRAAAGASRPGSSSAFPTTPPSSPSPGCTWRTSSCARPGAAAGSAG

SEQ ID NO: 63147 - DNA, 925 bp, Triticum aestivum
  misc_feature (1)..(925): Ceres Seq. ID no. 13583898
caccatcccaaattcgtccgtccattcgtcgaaaggggattacggctccacgccagcgcgccccggcaccgccgatccagccgcgccgctgccgccggccccctcgatcggaggcctcggaaggagagcaggcgcgccaggaggggggagatccgggacgccccggcgtaatcctgccgtgcaaggctcttcctgccgagacgaatcgtacgtgcctgccgccgcgccggcgaaccatgtcgtcgtccgcgttgagggccgcggggcagagggcgggggccgcggcccgtaagcaggcgctcaccctgacggaggccgcggcggccagggtgcgccacctcctcgacctcaggcagcggccctacctgcgccttggcgtcaaggcgcgcggctgcaacggcctgtcctacacgctcaattacgccgaaaaagggaagttcgatgagcttgttgaagagaagggtgtgaaagtgctgattgaccccaaggccctgatgcatgtgatcggcaccaagatggacttcgtcgacgatccactgaggtcagagtttgtgttcataaacccgaactcgaaaggggagtgtggatgcggtgaatctttcatgactacgggcagcaaaggatctacgtcatgatgcgtcatgcgatgatgtaaatagagcgaagcatgtgcagtggtggctctagttactgatataattttgtcttggaaagcaacggccattgtaagcttgttgcgcttgcatccaggtagtgaacactgcagtggatttaatcacgtgatggatgaaccagcttgttaccggtactcttacattcatcttggccccgtgttgttgatacgttcactaattcttgtttgggaacataccgagtgcatgataatcaaaataaacacagcaacatttcttcttttgctgttttg

SEQ ID NO: 63148 - protein, 210 aa, Triticum aestivum
  peptide (1)..(210): Ceres Seq. ID no. 13583899
  misc_feature (100)..(201): Pfam Name: HesB-like domain Pfam Description: HesB-like domain
  misc_feature (77)..(200): Homolog of NCBI NO: 24642263 NR Description: CG8198-PA [Drosophila melanogaster]
  misc_feature (4)..(201): Homolog of NCBI NO: 11359495 NR Description: hypothetical protein B24M22.180 [imported] -
  misc_feature (100)..(200): Homolog of NCBI NO: 23013039 NR Description: hypothetical protein [Magnetospirillum
  misc_feature (96)..(202): Homolog of NCBI NO: 16798390 NR Description: iron-sulfur cluster assembly protein IscA
  misc_feature (96)..(203): Homolog of NCBI NO: 21805702 NR Description: hypothetical protein [Arabidopsis thaliana]
  misc_feature (96)..(203): Homolog of NCBI NO: 15227614 NR Description: expressed protein [Arabidopsis thaliana]
  misc_feature (180)..(210): Homolog of NCBI NO: 34894088 NR Description: P0005A05.9 [Oryza sativa (japonica
  misc_feature (142)..(180): Homolog of NCBI NO: 34894088 NR Description: P0005A05.9 [Oryza sativa (japonica
  misc_feature (80)..(208): Homolog of NCBI NO: 15227287 NR Description: HesB protein -related [Arabidopsis thaliana]
  misc_feature (80)..(208): Homolog of NCBI NO: 21592728 NR Description: putative HesB-like protein [Arabidopsis thaliana]
PSQIRPSIRRKGITAPRQRAPAPPIQPRRCRRPPRSEASEGEQARQEGGDPGRPGVILPCKALPAETNRTCLPPRRRTMSSSALRAAGQRAGAAARKQALTLTEAAAARVRHLLDLRQRPYLRLGVKARGCNGLSYTLNYAEKGKFDELVEEKGVKVLIDPKALMHVIGTKMDFVDDPLRSEFVFINPNSKGECGCGESFMTTGSKGSTS

SEQ ID NO: 63149 - protein, 132 aa, Triticum aestivum
  peptide (1)..(132): Ceres Seq. ID no. 13583900
  misc_feature (22)..(123): Pfam Name: HesB-like domain Pfam Description: HesB-like domain
  misc_feature (1)..(122): Homolog of NCBI NO: 24642263 NR Description: CG8198-PA [Drosophila melanogaster]
  misc_feature (1)..(123): Homolog of NCBI NO: 11359495 NR Description: hypothetical protein B24M22.180 [imported] -
  misc_feature (22)..(122): Homolog of NCBI NO: 23013039 NR Description: hypothetical protein [Magnetospirillum
  misc_feature (18)..(124): Homolog of NCBI NO: 16798390 NR Description: iron-sulfur cluster assembly protein IscA
  misc_feature (18)..(125): Homolog of NCBI NO: 21805702 NR Description: hypothetical protein [Arabidopsis thaliana]
  misc_feature (18)..(125): Homolog of NCBI NO: 15227614 NR Description: expressed protein [Arabidopsis thaliana]
  misc_feature (102)..(132): Homolog of NCBI NO: 34894088 NR Description: P0005A05.9 [Oryza sativa (japonica
  misc_feature (64)..(102): Homolog of NCBI NO: 34894088 NR Description: P0005A05.9 [Oryza sativa (japonica
  misc_feature (2)..(130): Homolog of NCBI NO: 15227287 NR Description: HesB protein -related [Arabidopsis thaliana]
  misc_feature (2)..(130): Homolog of NCBI NO: 21592728 NR Description: putative HesB-like protein [Arabidopsis thaliana]
MSSSALRAAGQRAGAAARKQALTLTEAAAARVRHLLDLRQRPYLRLGVKARGCNGLSYTLNYAEKGKFDELVEEKGVKVLIDPKALMHVIGTKMDFVDDPLRSEFVFINPNSKGECGCGESFMTTGSKGSTS

SEQ ID NO: 63150 - DNA, 1134 bp, Triticum aestivum
  misc_feature (1)..(1134): Ceres Seq. ID no. 14302204
accccaaacaccaaccaaaatccacccccaaactaggtcatccatgtctggcggcgggcaagcagcggtctcgttcctgacgaagctcgcaaaggtggctgccgggttgggcttgacggcatctgccgtctccacgtccctctacacggtggacggcggccaacgcgcggtcatcttcgaccgcttccagggcgttctcccggcggtcgtctcggagggcacccacttcctcgtcccctggctccagaagcccttcctcttcgacatccgcacgcgcccgcacagcttctcctccacctccggaaccaaggatctccagatggtcagcctcacgctccgcgtcctcgcccgccccgacgtggaacgccttcctgaaatcttcaccaacctcggcctcgactacgacgacaaggtgctcccctccatcggcaacgaggtgctcaaggccgtcgtcgcccagttcaacgcagaccagctcctcaccgaccgtccccacgtctctgccctcgtccgtgaagccctcgtccgccgcgccggcgagttcaacatcgtgctcgatgacgtcgccatcacccacctcgcctacgggcacgacttcgcccaggccgttgagaagaagcaggtcgcgcagcaggaggctgagcgctccaggttcctcgttgcgcgtgcagagcaggagaggcgtgctgctatcgttcgcgcggagggagagagcgagtccgcacggctcatctcagatgccaccgctcttgtaggcaatggcctgatcgagctcaggaggatcgaggctgccaaggagatagctggggtgattgcgcgctcacccaatgtttcctacatcccttctggcaacaacggccagatgctgcttgggctcagcactgcccggtgaatgaattgccacttatcttccagttggtcacagtactttcgtcacttcagatgcccaattatccttcacttgattacaatacttgaataacttcagatgcttcgacatagtagttatgattttatcgtagaatggagacttctattatggaggagtcattgaacaaatgttgtattttggttgccaacctatgctatatttgtgcttatgatgcgttcttgaattacatgaacctttttatc

SEQ ID NO: 63151 - protein, 296 aa, Triticum aestivum
  peptide (1)..(296): Ceres Seq. ID no. 14302205
  misc_feature (47)..(238): Pfam Name: SPFH domain / Band 7 family Pfam Description: SPFH domain / Band 7 family
  misc_feature (23)..(290): Homolog of NCBI NO: 32421789 NR Description: hypothetical protein [Neurospora crassa]
  misc_feature (22)..(292): Homolog of NCBI NO: 40746306 NR Description: conserved hypothetical protein [Aspergillus
  misc_feature (17)..(296): Homolog of NCBI NO: 27765032 NR Description: At3g27280 [Arabidopsis thaliana]
  misc_feature (17)..(296): Homolog of NCBI NO: 15232129 NR Description: prohibitin -related [Arabidopsis thaliana]
  misc_feature (17)..(296): Homolog of NCBI NO: 21592895 NR Description: prohibitin, putative [Arabidopsis thaliana]
  misc_feature (17)..(293): Homolog of NCBI NO: 15237488 NR Description: prohibitin (gb|AAC49691.1) [Arabidopsis thaliana]
  misc_feature (18)..(295): Homolog of NCBI NO: 38567717 NR Description: B1358B12.15 [Oryza sativa (japonica
  misc_feature (17)..(296): Homolog of NCBI NO: 7489185 NR Description: prohibitin - common tobacco
  misc_feature (18)..(293): Homolog of NCBI NO: 7716458 NR Description: prohibitin [Zea mays]
  misc_feature (15)..(296): Homolog of NCBI NO: 7716460 NR Description: prohibitin [Zea mays]
PQTPTKIHPQTRSSMSGGGQAAVSFLTKLAKVAAGLGLTASAVSTSLYTVDGGQRAVIFDRFQGVLPAVVSEGTHFLVPWLQKPFLFDIRTRPHSFSSTSGTKDLQMVSLTLRVLARPDVERLPEIFTNLGLDYDDKVLPSIGNEVLKAVVAQFNADQLLTDRPHVSALVREALVRRAGEFNIVLDDVAITHLAYGHDFAQAVEKKQVAQQEAERSRFLVARAEQERRAAIVRAEGESESARLISDATALVGNGLIELRRIEAAKEIAGVIARSPNVSYIPSGNNGQMLLGLSTAR

SEQ ID NO: 63152 - protein, 282 aa, Triticum aestivum
  peptide (1)..(282): Ceres Seq. ID no. 14302206
  misc_feature (33)..(224): Pfam Name: SPFH domain / Band 7 family Pfam Description: SPFH domain / Band 7 family
  misc_feature (9)..(276): Homolog of NCBI NO: 32421789 NR Description: hypothetical protein [Neurospora crassa]
  misc_feature (8)..(278): Homolog of NCBI NO: 40746306 NR Description: conserved hypothetical protein [Aspergillus
  misc_feature (3)..(282): Homolog of NCBI NO: 27765032 NR Description: At3g27280 [Arabidopsis thaliana]
  misc_feature (3)..(282): Homolog of NCBI NO: 15232129 NR Description: prohibitin -related [Arabidopsis thaliana]
  misc_feature (3)..(282): Homolog of NCBI NO: 21592895 NR Description: prohibitin, putative [Arabidopsis thaliana]
  misc_feature (3)..(279): Homolog of NCBI NO: 15237488 NR Description: prohibitin (gb|AAC49691.1) [Arabidopsis thaliana]
  misc_feature (4)..(281): Homolog of NCBI NO: 38567717 NR Description: B1358B12.15 [Oryza sativa (japonica
  misc_feature (3)..(282): Homolog of NCBI NO: 7489185 NR Description: prohibitin - common tobacco
  misc_feature (4)..(279): Homolog of NCBI NO: 7716458 NR Description: prohibitin [Zea mays]
  misc_feature (1)..(282): Homolog of NCBI NO: 7716460 NR Description: prohibitin [Zea mays]
MSGGGQAAVSFLTKLAKVAAGLGLTASAVSTSLYTVDGGQRAVIFDRFQGVLPAVVSEGTHFLVPWLQKPFLFDIRTRPHSFSSTSGTKDLQMVSLTLRVLARPDVERLPEIFTNLGLDYDDKVLPSIGNEVLKAVVAQFNADQLLTDRPHVSALVREALVRRAGEFNIVLDDVAITHLAYGHDFAQAVEKKQVAQQEAERSRFLVARAEQERRAAIVRAEGESESARLISDATALVGNGLIELRRIEAAKEIAGVIARSPNVSYIPSGNNGQMLLGLSTAR

SEQ ID NO: 63153 - protein, 190 aa, Triticum aestivum
  peptide (1)..(190): Ceres Seq. ID no. 14302207
  misc_feature (1)..(132): Pfam Name: SPFH domain / Band 7 family Pfam Description: SPFH domain / Band 7 family
  misc_feature (1)..(184): Homolog of NCBI NO: 32421789 NR Description: hypothetical protein [Neurospora crassa]
  misc_feature (1)..(186): Homolog of NCBI NO: 40746306 NR Description: conserved hypothetical protein [Aspergillus
  misc_feature (1)..(190): Homolog of NCBI NO: 27765032 NR Description: At3g27280 [Arabidopsis thaliana]
  misc_feature (1)..(190): Homolog of NCBI NO: 15232129 NR Description: prohibitin -related [Arabidopsis thaliana]
  misc_feature (1)..(190): Homolog of NCBI NO: 21592895 NR Description: prohibitin, putative [Arabidopsis thaliana]
  misc_feature (1)..(187): Homolog of NCBI NO: 15237488 NR Description: prohibitin (gb|AAC49691.1) [Arabidopsis thaliana]
  misc_feature (1)..(189): Homolog of NCBI NO: 38567717 NR Description: B1358B12.15 [Oryza sativa (japonica
  misc_feature (1)..(190): Homolog of NCBI NO: 7489185 NR Description: prohibitin - common tobacco
  misc_feature (1)..(187): Homolog of NCBI NO: 7716458 NR Description: prohibitin [Zea mays]
  misc_feature (1)..(190): Homolog of NCBI NO: 7716460 NR Description: prohibitin [Zea mays]
MVSLTLRVLARPDVERLPEIFTNLGLDYDDKVLPSIGNEVLKAVVAQFNADQLLTDRPHVSALVREALVRRAGEFNIVLDDVAITHLAYGHDFAQAVEKKQVAQQEAERSRFLVARAEQERRAAIVRAEGESESARLISDATALVGNGLIELRRIEAAKEIAGVIARSPNVSYIPSGNNGQMLLGLSTAR

SEQ ID NO: 63154 - DNA, 854 bp, Triticum aestivum
  misc_feature (1)..(854): Ceres Seq. ID no. 12625545
accaaaaagtaggaacccctaagaaaaaaggttaccaaaacataggaaagcaagaacacactgagcaaaggaaaacaatagggttctctcactcacgaacagaaaggaggaggcggcggcggcggcggcggctgggagatctcgcatcggcggcggcgcgcgtgaaggtttctttccttgctgttagggcatcacaaggaaaatggcaagcagagcaggtggcgatggcaaagaacccataaatgagcaagtagttgcaaatacctatgccaacatgcgcactgaaatgaaccagctctacaccaagatcacggagctggaaatggaagtcagtgagcacgcccttgtgattggcgcaatagagcccctggaccccacaaggcgttgctacaggatgattggcggagtcttggttgagaggaccatcagggaagtcttgcccgccgtgcaccgcaacaaggagggccttgaagaggtcgtcgctcgcatgaaggaggctctggagaggaagaagcaagagatcaccgagtttgagctcaagtacaagatcaggatcaggaagggcgacaacagcgccaacgaagaaggcagcatgaaggaagcctctgcccagggtgttcttgttggccttgcgggccagtagagcagaatggcagggcaaggagacttgcacagttctttatcgaagccagattgcttgttaccggatgccaacctgacagtgattgtgtgtttctgggtgcagtttatcatgctacacctatgcagtactgttgaatcctcgcgtgtaaaactagagattatggtagatcaggactctgttcgtaaactgcagattttgcgctggttgtgcc

SEQ ID NO: 63155 - protein, 146 aa, Triticum aestivum
  peptide (1)..(146): Ceres Seq. ID no. 12625546
  misc_feature (15)..(120): Pfam Name: KE2 family protein Pfam Description: KE2 family protein
  misc_feature (11)..(138): Homolog of NCBI NO: 39595088 NR Description: Hypothetical protein CBG03668 [Caenorhabditis
  misc_feature (10)..(141): Homolog of NCBI NO: 24662461 NR Description: CG6302-PA [Drosophila melanogaster]
  misc_feature (41)..(141): Homolog of NCBI NO: 7106852 NR Description: HSPC231 [Homo sapiens]
  misc_feature (7)..(141): Homolog of NCBI NO: 5690431 NR Description: prefoldin subunit 2 [Homo sapiens]
  misc_feature (3)..(141): Homolog of NCBI NO: 12408675 NR Description: prefoldin 2 [Homo sapiens]
  misc_feature (3)..(141): Homolog of NCBI NO: 28189659 NR Description: similar to prefoldin subunit 2 [Bos taurus]
  misc_feature (1)..(144): Homolog of NCBI NO: 15228766 NR Description: prefoldin-like protein
MASRAGGDGKEPINEQVVANTYANMRTEMNQLYTKITELEMEVSEHALVIGAIEPLDPTRRCYRMIGGVLVERTIREVLPAVHRNKEGLEEVVARMKEALERKKQEITEFELKYKIRIRKGDNSANEEGSMKEASAQGVLVGLAGQ

SEQ ID NO: 63156 - protein, 122 aa, Triticum aestivum
  peptide (1)..(122): Ceres Seq. ID no. 12625547
  misc_feature (1)..(96): Pfam Name: KE2 family protein Pfam Description: KE2 family protein
  misc_feature (1)..(114): Homolog of NCBI NO: 39595088 NR Description: Hypothetical protein CBG03668 [Caenorhabditis
  misc_feature (1)..(117): Homolog of NCBI NO: 24662461 NR Description: CG6302-PA [Drosophila melanogaster]
  misc_feature (17)..(117): Homolog of NCBI NO: 7106852 NR Description: HSPC231 [Homo sapiens]
  misc_feature (1)..(117): Homolog of NCBI NO: 5690431 NR Description: prefoldin subunit 2 [Homo sapiens]
  misc_feature (1)..(117): Homolog of NCBI NO: 12408675 NR Description: prefoldin 2 [Homo sapiens]
  misc_feature (1)..(117): Homolog of NCBI NO: 28189659 NR Description: similar to prefoldin subunit 2 [Bos taurus]
  misc_feature (1)..(120): Homolog of NCBI NO: 15228766 NR Description: prefoldin-like protein
MRTEMNQLYTKITELEMEVSEHALVIGAIEPLDPTRRCYRMIGGVLVERTIREVLPAVHRNKEGLEEVVARMKEALERKKQEITEFELKYKIRIRKGDNSANEEGSMKEASAQGVLVGLAGQ

SEQ ID NO: 63157 - protein, 118 aa, Triticum aestivum
  peptide (1)..(118): Ceres Seq. ID no. 12625548
  misc_feature (1)..(92): Pfam Name: KE2 family protein Pfam Description: KE2 family protein
  misc_feature (1)..(110): Homolog of NCBI NO: 39595088 NR Description: Hypothetical protein CBG03668 [Caenorhabditis
  misc_feature (1)..(113): Homolog of NCBI NO: 24662461 NR Description: CG6302-PA [Drosophila melanogaster]
  misc_feature (13)..(113): Homolog of NCBI NO: 7106852 NR Description: HSPC231 [Homo sapiens]
  misc_feature (1)..(113): Homolog of NCBI NO: 5690431 NR Description: prefoldin subunit 2 [Homo sapiens]
  misc_feature (1)..(113): Homolog of NCBI NO: 12408675 NR Description: prefoldin 2 [Homo sapiens]
  misc_feature (1)..(113): Homolog of NCBI NO: 28189659 NR Description: similar to prefoldin subunit 2 [Bos taurus]
  misc_feature (1)..(116): Homolog of NCBI NO: 15228766 NR Description: prefoldin-like protein
MNQLYTKITELEMEVSEHALVIGAIEPLDPTRRCYRMIGGVLVERTIREVLPAVHRNKEGLEEVVARMKEALERKKQEITEFELKYKIRIRKGDNSANEEGSMKEASAQGVLVGLAGQ

SEQ ID NO: 63158 - DNA, 807 bp, Triticum aestivum
  misc_feature (1)..(807): Ceres Seq. ID no. 12585638
attaacaccgccaagaacacgaacgccaacacgacgaggatcgatcgacacggcaacgcgagggcgcacgccgatcggtcgagctgattacgatcgattcgagcttcggccatgcggaggtcggactgggaggaccggtgccggcggcacccggagcaccggctgtccaagggcgtgtgcccgagctgcctccgcgaccgcctcgcccgcctctccgccaactcctcggccaccaccaccctgacgcgcgcctcaaactcggccagcacctccccctactcctccaccgactcccctccgctccaccgcgccgccctctccgccgacgccacctccgtccacgtcgtcggcgccggggcgggctcctccttcgtcaacgtctccgccttctcgcagccgctcatgccgacggcctcgaagaaaccagcagaatccaagggaaaggagggcgaggcgaagaagaagaagagcagcagcaagaagaagatcgggaggttcttgtcgaggctggtcgggacggagaagcggcggaaaacaggggaagcaggcgatggcggcgagctcttccattccagcaccatgaaggagaagtcgtcgaccaagtgggttttcttttgatcagaccggccggcaccggccaccaaccatacgaacaaaccatgcttggcctttctcggttctcgatcgatcgggtattgtttttctttattttctctgttattttttacaagtactcttcttgagcttgatttgatatttttctcaagcgccgtgtatatacacgagatcaagtagctgaccgtaagg

SEQ ID NO: 63159 - protein, 168 aa, Triticum aestivum
  peptide (1)..(168): Ceres Seq. ID no. 12585639
  misc_feature (1)..(168): Homolog of NCBI NO: 34902434 NR Description: Unknown protein [Oryza sativa (japonica
MRRSDWEDRCRRHPEHRLSKGVCPSCLRDRLARLSANSSATTTLTRASNSASTSPYSSTDSPPLHRAALSADATSVHVVGAGAGSSFVNVSAFSQPLMPTASKKPAESKGKEGEAKKKKSSSKKKIGRFLSRLVGTEKRRKTGEAGDGGELFHSSTMKEKSSTKWVFF

SEQ ID NO: 63160 - DNA, 741 bp, Triticum aestivum
  misc_feature (1)..(741): Ceres Seq. ID no. 13596897
cttcctccgcttccgcctcgtcccgtctccctccctcccctccctcggcggccgccgccgcccccatcgcggcgagtcccctcgcccgcagccgacctaagctgctgccgccgcgtgcgcccggggtcaccgaggaggcggcgccatgaggttggagaagtgctggttctgctcctccaccgtctaccccggccacggcatccagttcgtccgcaacgacgccaagatctttcggttctgccgatcaaaatgccacaagaacttcaagatgaagaggaaccctcgcaaggttaagtggaccaaggcgtacaggcgcctgcgtggaaaggacatgacacaggatgccacgtttgagttcgagaggaagaggaacaggccggagcgctacgaccgtaacgtcactgagcagactctgaaggccatcccgcttatcacgaagatcagacatgaacggcagaagaaacacattacagagagacagaaggctggtaagagcatggtgcgaaagagcgacgccaaggagctggatcaggatattggcatggttcccaagaaggagaccgagaactatgtagccaagcagaaggttctagtttctcagctgaagaccgaagagaatcttatggaagagtaatggaaccaaacagttttgtgtgtgcgcgcatktvatcmttttcwatawagtggagtactttgtgtttcatcagattgtagacgacagtgaacatttgttttgtactt

SEQ ID NO: 63161 - protein, 162 aa, Triticum aestivum
  peptide (1)..(162): Ceres Seq. ID no. 15221997
  misc_feature (1)..(75): Pfam Name: Ribosomal protein L24e Pfam Description: Ribosomal protein L24e
  misc_feature (1)..(162): Homolog of NCBI NO: 30354249 NR Description: Similar to chromosome 15 open reading frame 15
  misc_feature (1)..(162): Homolog of NCBI NO: 34864348 NR Description: similar to ribosomal protein L24-like
  misc_feature (1)..(162): Homolog of NCBI NO: 10047102 NR Description: ribosomal protein L24-like
  misc_feature (1)..(162): Homolog of NCBI NO: 16740902 NR Description: 60S ribosomal protein L30 isolog [Homo sapiens]
  misc_feature (1)..(162): Homolog of NCBI NO: 27769143 NR Description: Similar to chromosome 15 open reading frame 15
  misc_feature (1)..(162): Homolog of NCBI NO: 38083793 NR Description: similar to ribosomal protein L24-like
  misc_feature (1)..(134): Homolog of NCBI NO: 28828084 NR Description: similar to Mus musculus (Mouse). Similar to 60S
  misc_feature (1)..(65): Homolog of NCBI NO: 34914662 NR Description: putative ribosomal protein
  misc_feature (1)..(162): Homolog of NCBI NO: 15225363 NR Description: 60S ribosomal protein L24, putative [Arabidopsis
  misc_feature (1)..(162): Homolog of NCBI NO: 27817966 NR Description: putative 60S ribosomal protein L30
MRLEKCWFCSSTVYPGHGIQFVRNDAKIFRFCRSKCHKNFKMKRNPRKVKWTKAYRRLRGKDMTQDATFEFERKRNRPERYDRNVTEQTLKAIPLITKIRHERQKKHITERQKAGKSMVRKSDAKELDQDIGMVPKKETENYVAKQKVLVSQLKTEENLMEE

SEQ ID NO: 63162 - protein, 121 aa, Triticum aestivum
  peptide (1)..(121): Ceres Seq. ID no. 15221998
  misc_feature (1)..(121): Homolog of NCBI NO: 30354249 NR Description: Similar to chromosome 15 open reading frame 15
  misc_feature (1)..(121): Homolog of NCBI NO: 34864348 NR Description: similar to ribosomal protein L24-like
  misc_feature (1)..(121): Homolog of NCBI NO: 10047102 NR Description: ribosomal protein L24-like
  misc_feature (1)..(121): Homolog of NCBI NO: 16740902 NR Description: 60S ribosomal protein L30 isolog [Homo sapiens]
  misc_feature (1)..(121): Homolog of NCBI NO: 27769143 NR Description: Similar to chromosome 15 open reading frame 15
  misc_feature (1)..(121): Homolog of NCBI NO: 38083793 NR Description: similar to ribosomal protein L24-like
  misc_feature (1)..(93): Homolog of NCBI NO: 28828084 NR Description: similar to Mus musculus (Mouse). Similar to 60S
  misc_feature (1)..(24): Homolog of NCBI NO: 34914662 NR Description: putative ribosomal protein
  misc_feature (1)..(121): Homolog of NCBI NO: 15225363 NR Description: 60S ribosomal protein L24, putative [Arabidopsis
  misc_feature (1)..(121): Homolog of NCBI NO: 27817966 NR Description: putative 60S ribosomal protein L30
MKRNPRKVKWTKAYRRLRGKDMTQDATFEFERKRNRPERYDRNVTEQTLKAIPLITKIRHERQKKHITERQKAGKSMVRKSDAKELDQDIGMVPKKETENYVAKQKVLVSQLKTEENLMEE

SEQ ID NO: 63163 - protein, 100 aa, Triticum aestivum
  peptide (1)..(100): Ceres Seq. ID no. 15221999
  misc_feature (1)..(72): Homolog of NCBI NO: 13529146 NR Description: 60S ribosomal protein L30 isolog [Homo sapiens]
  misc_feature (1)..(100): Homolog of NCBI NO: 30354249 NR Description: Similar to chromosome 15 open reading frame 15
  misc_feature (1)..(100): Homolog of NCBI NO: 34864348 NR Description: similar to ribosomal protein L24-like
  misc_feature (1)..(100): Homolog of NCBI NO: 10047102 NR Description: ribosomal protein L24-like
  misc_feature (1)..(100): Homolog of NCBI NO: 16740902 NR Description: 60S ribosomal protein L30 isolog [Homo sapiens]
  misc_feature (1)..(100): Homolog of NCBI NO: 27769143 NR Description: Similar to chromosome 15 open reading frame 15
  misc_feature (1)..(100): Homolog of NCBI NO: 38083793 NR Description: similar to ribosomal protein L24-like
  misc_feature (1)..(72): Homolog of NCBI NO: 28828084 NR Description: similar to Mus musculus (Mouse). Similar to 60S
  misc_feature (1)..(100): Homolog of NCBI NO: 15225363 NR Description: 60S ribosomal protein L24, putative [Arabidopsis
  misc_feature (1)..(100): Homolog of NCBI NO: 27817966 NR Description: putative 60S ribosomal protein L30
MTQDATFEFERKRNRPERYDRNVTEQTLKAIPLITKIRHERQKKHITERQKAGKSMVRKSDAKELDQDIGMVPKKETENYVAKQKVLVSQLKTEENLMEE

SEQ ID NO: 63164 - DNA, 883 bp, Triticum aestivum
  misc_feature (1)..(883): Ceres Seq. ID no. 12585640
cctttcccagtcaccgatccaaaccatcgcgagaaaaaaaaaagatccccgatccagcaacgagcgcgcaccggtgaagatcgtggtgggaggatgtcgtcggactactcgtcgtcgtgggcgcgcgcgctcgtgcatatctcgccctacaccttctccgccatcggcatcgccgtctccatcggtgtctctgtcctcggcgcagcatgggggatcttcatcacggggagcagcctcatcggggccgccatcaaggcgcccaggatcacctccaagaacctcatcagtgtcatcttctgtgaggccgttgcaatttatggtgtaatcgtggcgatcatcctccaaacaaagcttgaaagtgtgccaacatcccgaatgcatgatccagagtctatgcgagctggttatgcaatctttgcctcaggtcttattgtcggctttgctaatcttgtttgcggggtatgcgtgggaataatcggaagcagctgtgcactgtctgatgcccagaattcaacactctttgtaaagatcctggtgattgagatctttggcagtgctttgggcctctttggagtgatcgtgggcataatcatgtcagctcaagcaacatggccaacaaaagtctaattccatccatctgggaatctctgtaaattattttgggtgaagccctttggaatgtcaacatgtgttcaactgtttcttatctattcttttttcttttgcacgtttttggtaaatcacgtattttggtgcttgatgcatctgatcgtagagatactgttcctactgtaaagactccatatgcctgccaggtatcatcttgtaggtgctattgcttttgcagaacgtggactgcctgttgaataaaagtattgaactt

SEQ ID NO: 63165 - protein, 208 aa, Triticum aestivum
  peptide (1)..(208): Ceres Seq. ID no. 12585641
  misc_feature (136)..(201): Pfam Name: ATP synthase subunit C Pfam Description: ATP synthase subunit C
  misc_feature (44)..(201): Homolog of NCBI NO: 37589073 NR Description: Unknown (protein for MGC:63832) [Danio rerio]
  misc_feature (44)..(203): Homolog of NCBI NO: 40742993 NR Description: hypothetical protein AN7603.2 [Aspergillus
  misc_feature (44)..(202): Homolog of NCBI NO: 32419907 NR Description: hypothetical protein [Neurospora crassa]
  misc_feature (39)..(203): Homolog of NCBI NO: 6321815 NR Description: vacuolar ATPase V0 domain subunit c''; Ppa1p
  misc_feature (36)..(197): Homolog of NCBI NO: 29840984 NR Description: similar to NM_033617 ATPase, H+ transporting,
  misc_feature (32)..(207): Homolog of NCBI NO: 38640797 NR Description: V-ATPase subunit c'' proteolipid [Xerophyta
  misc_feature (37)..(207): Homolog of NCBI NO: 29423617 NR Description: vacuolar membrane ATPase subunit c'' [Citrus
  misc_feature (36)..(207): Homolog of NCBI NO: 15224764 NR Description: putative vacuolar ATP synthase proteolipid subunit
  misc_feature (30)..(207): Homolog of NCBI NO: 15236838 NR Description: H+-transporting ATPase - like protein
  misc_feature (32)..(207): Homolog of NCBI NO: 34912550 NR Description: putative H+-transporting ATPase
PFPVTDPNHREKKKRSPIQQRARTGEDRGGRMSSDYSSSWARALVHISPYTFSAIGIAVSIGVSVLGAAWGIFITGSSLIGAAIKAPRITSKNLISVIFCEAVAIYGVIVAIILQTKLESVPTSRMHDPESMRAGYAIFASGLIVGFANLVCGVCVGIIGSSCALSDAQNSTLFVKILVIEIFGSALGLFGVIVGIIMSAQATWPTKV

SEQ ID NO: 63166 - protein, 177 aa, Triticum aestivum
  peptide (1)..(177): Ceres Seq. ID no. 12585642
  misc_feature (105)..(170): Pfam Name: ATP synthase subunit C Pfam Description: ATP synthase subunit C
  misc_feature (13)..(170): Homolog of NCBI NO: 37589073 NR Description: Unknown (protein for MGC:63832) [Danio rerio]
  misc_feature (13)..(172): Homolog of NCBI NO: 40742993 NR Description: hypothetical protein AN7603.2 [Aspergillus
  misc_feature (13)..(171): Homolog of NCBI NO: 32419907 NR Description: hypothetical protein [Neurospora crassa]
  misc_feature (8)..(172): Homolog of NCBI NO: 6321815 NR Description: vacuolar ATPase V0 domain subunit c''; Ppa1p
  misc_feature (5)..(166): Homolog of NCBI NO: 29840984 NR Description: similar to NM_033617 ATPase, H+ transporting,
  misc_feature (1)..(176): Homolog of NCBI NO: 38640797 NR Description: V-ATPase subunit c'' proteolipid [Xerophyta
  misc_feature (6)..(176): Homolog of NCBI NO: 29423617 NR Description: vacuolar membrane ATPase subunit c'' [Citrus
  misc_feature (5)..(176): Homolog of NCBI NO: 15224764 NR Description: putative vacuolar ATP synthase proteolipid subunit
  misc_feature (1)..(176): Homolog of NCBI NO: 15236838 NR Description: H+-transporting ATPase - like protein
  misc_feature (1)..(176): Homolog of NCBI NO: 34912550 NR Description: putative H+-transporting ATPase
MSSDYSSSWARALVHISPYTFSAIGIAVSIGVSVLGAAWGIFITGSSLIGAAIKAPRITSKNLISVIFCEAVAIYGVIVAIILQTKLESVPTSRMHDPESMRAGYAIFASGLIVGFANLVCGVCVGIIGSSCALSDAQNSTLFVKILVIEIFGSALGLFGVIVGIIMSAQATWPTKV

SEQ ID NO: 63167 - protein, 107 aa, Triticum aestivum
  peptide (1)..(107): Ceres Seq. ID no. 12585643
LSQSPIQTIARKKKDPRSSNERAPVKIVVGGCRRTTRRRGRARSCISRPTPSPPSASPSPSVSLSSAQHGGSSSRGAASSGPPSRRPGSPPRTSSVSSSVRPLQFMV

SEQ ID NO: 63168 - DNA, 854 bp, Triticum aestivum
  misc_feature (1)..(854): Ceres Seq. ID no. 12593564
gctcatccccacagtcctgtccccgtccactccgccgccgccgccgcgaattccgccggcgtccgcccccgcgcgcgtgctctgcgcccacgcggactccagcgcctccggatcggagcccctgaacatggcggccgccgcgctcagggttcagctcgaggcgctcctcgagaacatgttcgccacgggtatggtggacgagcagttccggcagctgcagtcgctgcaggaggggggcagcgcgtcgggcttcgtcgccgaggtcgccaccctcttcatcgacgacgccgaccggatcatcgccgacatcgggagcctgctggaccagcccgtggtggatttcgacaaggtggacgcccacgtgcaccagctcaaggggagcagctcgagtgttggtgctcagaaagtgaagctcgcctgcatgcacttccgccagttctatgaggcaaaaagcaaagaagggtgcctcatggcgttggctcttgttaggagtgagttctgtgatgtgcgcaacaagttccagaccatgatgcagctggagcagcagatcgaggcctgcagtcccaagtagagtagcagtcactgaagcaaaaggagcttagctccatgtgacccccgtgtatgtatctcttatgcttgtaggcagtgtaacgggtgtcgggggctctggaaggcgtgtgtgcggaaccggaccgaccgattcccacgtcggagctccggactcgtgaccctttgaaacgcaacttgcttgccctgcgtcaatgtacgtgtcaacgctatgcttgtttgtgtcgtgtccgcccccaggctgcgtgtaaactcttaccttgttgttgtatgttgttggggtcccg

SEQ ID NO: 63169 - protein, 189 aa, Triticum aestivum
  peptide (1)..(189): Ceres Seq. ID no. 12593565
  misc_feature (43)..(183): Homolog of NCBI NO: 21593802 NR Description: putative AHP2 [Arabidopsis thaliana]
  misc_feature (46)..(183): Homolog of NCBI NO: 15228686 NR Description: ATHP2, putative
  misc_feature (43)..(183): Homolog of NCBI NO: 18379097 NR Description: putative AHP2
  misc_feature (43)..(185): Homolog of NCBI NO: 13774348 NR Description: histidine-containing phosphotransfer protein
  misc_feature (52)..(185): Homolog of NCBI NO: 15233079 NR Description: two-component phosphorelay mediator, putative
  misc_feature (51)..(188): Homolog of NCBI NO: 6009622 NR Description: histidine-containing phosphotransfer protein [Zea
  misc_feature (51)..(188): Homolog of NCBI NO: 22036126 NR Description: his-containing phosphotransfer protein [Zea mays]
  misc_feature (43)..(189): Homolog of NCBI NO: 33637786 NR Description: two-component phosphorelay mediator HP2
  misc_feature (43)..(189): Homolog of NCBI NO: 33637784 NR Description: two-component phosphorelay mediator HP1
  misc_feature (43)..(185): Homolog of NCBI NO: 5689238 NR Description: histidine-containing phosphotransfer protein [Zea
LIPTVLSPSTPPPPPRIPPASAPARVLCAHADSSASGSEPLNMAAAALRVQLEALLENMFATGMVDEQFRQLQSLQEGGSASGFVAEVATLFIDDADRIIADIGSLLDQPVVDFDKVDAHVHQLKGSSSSVGAQKVKLACMHFRQFYEAKSKEGCLMALALVRSEFCDVRNKFQTMMQLEQQIEACSPK

SEQ ID NO: 63170 - protein, 147 aa, Triticum aestivum
  peptide (1)..(147): Ceres Seq. ID no. 12593566
AHPHSPVPVHSAAAAANSAGVRPRARALRPRGLQRLRIGAPEHGGRRAQGSARGAPREHVRHGYGGRAVPAAAVAAGGGQRVGLRRRGRHPLHRRRRPDHRRHREPAGPARGGFRQGGRPRAPAQGEQLECWCSESEARLHALPPVL

SEQ ID NO: 63171 - protein, 147 aa, Triticum aestivum
  peptide (1)..(147): Ceres Seq. ID no. 12593567
  misc_feature (1)..(141): Homolog of NCBI NO: 21593802 NR Description: putative AHP2 [Arabidopsis thaliana]
  misc_feature (4)..(141): Homolog of NCBI NO: 15228686 NR Description: ATHP2, putative
  misc_feature (1)..(141): Homolog of NCBI NO: 18379097 NR Description: putative AHP2
  misc_feature (1)..(143): Homolog of NCBI NO: 13774348 NR Description: histidine-containing phosphotransfer protein
  misc_feature (10)..(143): Homolog of NCBI NO: 15233079 NR Description: two-component phosphorelay mediator, putative
  misc_feature (9)..(146): Homolog of NCBI NO: 6009622 NR Description: histidine-containing phosphotransfer protein [Zea
  misc_feature (9)..(146): Homolog of NCBI NO: 22036126 NR Description: his-containing phosphotransfer protein [Zea mays]
  misc_feature (1)..(147): Homolog of NCBI NO: 33637786 NR Description: two-component phosphorelay mediator HP2
  misc_feature (1)..(147): Homolog of NCBI NO: 33637784 NR Description: two-component phosphorelay mediator HP1
  misc_feature (1)..(143): Homolog of NCBI NO: 5689238 NR Description: histidine-containing phosphotransfer protein [Zea
MAAAALRVQLEALLENMFATGMVDEQFRQLQSLQEGGSASGFVAEVATLFIDDADRIIADIGSLLDQPVVDFDKVDAHVHQLKGSSSSVGAQKVKLACMHFRQFYEAKSKEGCLMALALVRSEFCDVRNKFQTMMQLEQQIEACSPK

SEQ ID NO: 63172 - DNA, 724 bp, Triticum aestivum
  misc_feature (1)..(724): Ceres Seq. ID no. 12625405
caccgcgcatttggctatcgcatttctcaggtgaggctcaggttccggagtagcgaagcttcaagtgcgcatctgggtaccggcatggctggagagcaggcgttccaccggggaggcgtgcacggaggcggcagcgccatcgggccggactacatgcgggccatccgcggcgacgacgactactacggcgggcacggccagggccacagccagccggcggccgtcaccctcgcgaagggggtggccgcggcggcggcggcggggtcgatgctgctcctgtcggccctgacgctgacgggcacggtgctggcgctgatcgtggcgacgccgctgctggtgctcttcagccccgtgctggtgcccgcggccatcgccgccacgatgctgacgaccgggttcgtctcgtcgggggcgttcggcgcggcggcggtgggggtgctggcgtggatgtacaagtacctgtcgcacggggcgtcctcgccgccgggggccgacacggtggaccacgcgggcgcgaagctggactccaaggcgcacgaggtgaagaactgggcgcagcatcgcctcgaccaggcacgaacgccgtagacgtgtcgtcatttgccctcctatgcgtcaccagtgtgtgtggatcgacgcctctatatgtacggacgtgcccgcgagcggtgctacttaccaccgatgaataataagctgcatatctcctctggaagagggagtt

SEQ ID NO: 63173 - protein, 195 aa, Triticum aestivum
  peptide (1)..(195): Ceres Seq. ID no. 12625406
  misc_feature (75)..(185): Pfam Name: Oleosin Pfam Description: Oleosin
  misc_feature (61)..(195): Homolog of NCBI NO: 2119749 NR Description: oleosin - almond
  misc_feature (45)..(187): Homolog of NCBI NO: 129082 NR Description: Oleosin Bn-III (BnIII)
  misc_feature (71)..(194): Homolog of NCBI NO: 8515912 NR Description: oleosin [Elaeis guineensis]
  misc_feature (50)..(193): Homolog of NCBI NO: 7442012 NR Description: oleosin isoform R16 - rice
  misc_feature (57)..(193): Homolog of NCBI NO: 82705 NR Description: lipid body-associated major protein L3 - maize
  misc_feature (34)..(193): Homolog of NCBI NO: 3334474 NR Description: OLEOSIN ZM-I (OLEOSIN 16 KD) (LIPID
  misc_feature (50)..(193): Homolog of NCBI NO: 38346165 NR Description: OSJNBa0079A21.12 [Oryza sativa (japonica
  misc_feature (36)..(193): Homolog of NCBI NO: 3334281 NR Description: Oleosin 16 kDa
  misc_feature (29)..(193): Homolog of NCBI NO: 1362168 NR Description: oleosin 2 - barley
  misc_feature (50)..(193): Homolog of NCBI NO: 3334280 NR Description: OLEOSIN 16 KD (OSE701)
HRAFGYRISQVRLRFRSSEASSAHLGTGMAGEQAFHRGGVHGGGSAIGPDYMRAIRGDDDYYGGHGQGHSQPAAVTLAKGVAAAAAAGSMLLLSALTLTGTVLALIVATPLLVLFSPVLVPAAIAATMLTTGFVSSGAFGAAAVGVLAWMYKYLSHGASSPPGADTVDHAGAKLDSKAHEVKNWAQHRLDQARTP

SEQ ID NO: 63174 - protein, 167 aa, Triticum aestivum
  peptide (1)..(167): Ceres Seq. ID no. 12625407
  misc_feature (47)..(157): Pfam Name: Oleosin Pfam Description: Oleosin
  misc_feature (33)..(167): Homolog of NCBI NO: 2119749 NR Description: oleosin - almond
  misc_feature (17)..(159): Homolog of NCBI NO: 129082 NR Description: Oleosin Bn-III (BnIII)
  misc_feature (43)..(166): Homolog of NCBI NO: 8515912 NR Description: oleosin [Elaeis guineensis]
  misc_feature (22)..(165): Homolog of NCBI NO: 7442012 NR Description: oleosin isoform R16 - rice
  misc_feature (29)..(165): Homolog of NCBI NO: 82705 NR Description: lipid body-associated major protein L3 - maize
  misc_feature (6)..(165): Homolog of NCBI NO: 3334474 NR Description: OLEOSIN ZM-I (OLEOSIN 16 KD) (LIPID
  misc_feature (22)..(165): Homolog of NCBI NO: 38346165 NR Description: OSJNBa0079A21.12 [Oryza sativa (japonica
  misc_feature (8)..(165): Homolog of NCBI NO: 3334281 NR Description: Oleosin 16 kDa
  misc_feature (1)..(165): Homolog of NCBI NO: 1362168 NR Description: oleosin 2 - barley
  misc_feature (22)..(165): Homolog of NCBI NO: 3334280 NR Description: OLEOSIN 16 KD (OSE701)
MAGEQAFHRGGVHGGGSAIGPDYMRAIRGDDDYYGGHGQGHSQPAAVTLAKGVAAAAAAGSMLLLSALTLTGTVLALIVATPLLVLFSPVLVPAAIAATMLTTGFVSSGAFGAAAVGVLAWMYKYLSHGASSPPGADTVDHAGAKLDSKAHEVKNWAQHRLDQARTP

SEQ ID NO: 63175 - protein, 144 aa, Triticum aestivum
  peptide (1)..(144): Ceres Seq. ID no. 12625408
  misc_feature (24)..(134): Pfam Name: Oleosin Pfam Description: Oleosin
  misc_feature (10)..(144): Homolog of NCBI NO: 2119749 NR Description: oleosin - almond
  misc_feature (1)..(136): Homolog of NCBI NO: 129082 NR Description: Oleosin Bn-III (BnIII)
  misc_feature (20)..(143): Homolog of NCBI NO: 8515912 NR Description: oleosin [Elaeis guineensis]
  misc_feature (1)..(142): Homolog of NCBI NO: 7442012 NR Description: oleosin isoform R16 - rice
  misc_feature (6)..(142): Homolog of NCBI NO: 82705 NR Description: lipid body-associated major protein L3 - maize
  misc_feature (1)..(142): Homolog of NCBI NO: 3334474 NR Description: OLEOSIN ZM-I (OLEOSIN 16 KD) (LIPID
  misc_feature (1)..(142): Homolog of NCBI NO: 38346165 NR Description: OSJNBa0079A21.12 [Oryza sativa (japonica
  misc_feature (1)..(142): Homolog of NCBI NO: 3334281 NR Description: Oleosin 16 kDa
  misc_feature (1)..(142): Homolog of NCBI NO: 1362168 NR Description: oleosin 2 - barley
  misc_feature (1)..(142): Homolog of NCBI NO: 3334280 NR Description: OLEOSIN 16 KD (OSE701)
MRAIRGDDDYYGGHGQGHSQPAAVTLAKGVAAAAAAGSMLLLSALTLTGTVLALIVATPLLVLFSPVLVPAAIAATMLTTGFVSSGAFGAAAVGVLAWMYKYLSHGASSPPGADTVDHAGAKLDSKAHEVKNWAQHRLDQARTP

SEQ ID NO: 63176 - DNA, 1084 bp, Triticum aestivum
  misc_feature (1)..(1084): Ceres Seq. ID no. 13654964
ctaatcgaaaaacgattacgaagcgtgcccaactccatctgcttccttttcctcttccccccgtccccgacgacccccggccgaaaccctagcgaggcgcgatgttcgggtaccggaaggcgccggacctcgacctcgaggcgggcggctcggcggcgctctacccggggatgacggaggacgtggagctgcgctgggccttcatccgcaagatctacgtcatcctctcggtccagctcgccatgaccgccgccgtcgcggggttcgtcgtcaaggtccccgccgtctccgagttcttcgtctcctccaacgctggcctgggcctctacatcttcctcctcgtcctgcccctcatcgtgctctgccccctgcgctactaccaccagaagcaccccgtcaacctcatcctgctcggcgtcttcaccgtctccatcagcttcgccgtcggcatgacgtgcgccttcaccagcggaaaaatcatcttggaagctgcaattctgacagcagtggtggtgatcagcttgactgcctacactttctgggctgcaaagagaggccatgatttcaacttcctgggcccgttcctgtttggagctcttatggtgctgctggtgttctcacttatccagatctttttcccactgggcaagatctccaccatgatatatggggccgtggcgtcgatcatcttctgtggctacatcatcttcgacacggacaacatcatcaagcgccacacgtatgacgagtacatctgggctgccgtgtccctctacctcgacatcatcaacctgttcctgaatctgatgcaaattctgcgggcagctgatagctgagcgcaccttgcccaacatcgcatgatttaagtccactagcttgtgcatatcagaaaattcatgaatgcccgcagatacctgtaggcatgtacaatcgttatcagtaaattctgccgtcctagactccatcacatgtcttgtttcctagcttcctggagtatgcaatgtgtgattgaaccaagctgcacgatgaaaatatactcactggtgctttgtgattgcaaggcacgtgaatttaattccctgcc

SEQ ID NO: 63177 - protein, 244 aa, Triticum aestivum
  peptide (1)..(244): Ceres Seq. ID no. 15219707
  misc_feature (29)..(243): Pfam Name: Uncharacterised protein family UPF0005 Pfam Description: Uncharacterised protein family UPF0005
  misc_feature (124)..(195): Homolog of NCBI NO: 7485070 NR Description: hypothetical protein - Arabidopsis thaliana
  misc_feature (9)..(87): Homolog of NCBI NO: 7485070 NR Description: hypothetical protein - Arabidopsis thaliana
  misc_feature (9)..(204): Homolog of NCBI NO: 15810201 NR Description: AT4g15470/dl3775w [Arabidopsis thaliana]
  misc_feature (24)..(244): Homolog of NCBI NO: 34393840 NR Description: putative z-protein [Oryza sativa (japonica
  misc_feature (9)..(244): Homolog of NCBI NO: 18414455 NR Description: expressed protein [Arabidopsis thaliana]
  misc_feature (4)..(241): Homolog of NCBI NO: 15235466 NR Description: hypothetical protein [Arabidopsis thaliana]
  misc_feature (20)..(244): Homolog of NCBI NO: 14626300 NR Description: putative receptor-associated protein
  misc_feature (4)..(243): Homolog of NCBI NO: 15218701 NR Description: hypothetical protein [Arabidopsis thaliana]
  misc_feature (11)..(244): Homolog of NCBI NO: 15229411 NR Description: hypothetical protein [Arabidopsis thaliana]
  misc_feature (1)..(243): Homolog of NCBI NO: 34393841 NR Description: putative z-protein [Oryza sativa (japonica
MFGYRKAPDLDLEAGGSAALYPGMTEDVELRWAFIRKIYVILSVQLAMTAAVAGFVVKVPAVSEFFVSSNAGLGLYIFLLVLPLIVLCPLRYYHQKHPVNLILLGVFTVSISFAVGMTCAFTSGKIILEAAILTAVVVISLTAYTFWAAKRGHDFNFLGPFLFGALMVLLVFSLIQIFFPLGKISTMIYGAVASIIFCGYIIFDTDNIIKRHTYDEYIWAAVSLYLDIINLFLNLMQILRAADS

SEQ ID NO: 63178 - protein, 221 aa, Triticum aestivum
  peptide (1)..(221): Ceres Seq. ID no. 15219708
  misc_feature (6)..(220): Pfam Name: Uncharacterised protein family UPF0005 Pfam Description: Uncharacterised protein family UPF0005
  misc_feature (101)..(172): Homolog of NCBI NO: 7485070 NR Description: hypothetical protein - Arabidopsis thaliana
  misc_feature (1)..(64): Homolog of NCBI NO: 7485070 NR Description: hypothetical protein - Arabidopsis thaliana
  misc_feature (1)..(181): Homolog of NCBI NO: 15810201 NR Description: AT4g15470/dl3775w [Arabidopsis thaliana]
  misc_feature (1)..(221): Homolog of NCBI NO: 34393840 NR Description: putative z-protein [Oryza sativa (japonica
  misc_feature (1)..(221): Homolog of NCBI NO: 18414455 NR Description: expressed protein [Arabidopsis thaliana]
  misc_feature (1)..(218): Homolog of NCBI NO: 15235466 NR Description: hypothetical protein [Arabidopsis thaliana]
  misc_feature (1)..(221): Homolog of NCBI NO: 14626300 NR Description: putative receptor-associated protein
  misc_feature (1)..(220): Homolog of NCBI NO: 15218701 NR Description: hypothetical protein [Arabidopsis thaliana]
  misc_feature (1)..(221): Homolog of NCBI NO: 15229411 NR Description: hypothetical protein [Arabidopsis thaliana]
  misc_feature (1)..(220): Homolog of NCBI NO: 34393841 NR Description: putative z-protein [Oryza sativa (japonica
MTEDVELRWAFIRKIYVILSVQLAMTAAVAGFVVKVPAVSEFFVSSNAGLGLYIFLLVLPLIVLCPLRYYHQKHPVNLILLGVFTVSISFAVGMTCAFTSGKIILEAAILTAVVVISLTAYTFWAAKRGHDFNFLGPFLFGALMVLLVFSLIQIFFPLGKISTMIYGAVASIIFCGYIIFDTDNIIKRHTYDEYIWAAVSLYLDIINLFLNLMQILRAADS

SEQ ID NO: 63179 - protein, 197 aa, Triticum aestivum
  peptide (1)..(197): Ceres Seq. ID no. 15219709
  misc_feature (1)..(196): Pfam Name: Uncharacterised protein family UPF0005 Pfam Description: Uncharacterised protein family UPF0005
  misc_feature (77)..(148): Homolog of NCBI NO: 7485070 NR Description: hypothetical protein - Arabidopsis thaliana
  misc_feature (1)..(40): Homolog of NCBI NO: 7485070 NR Description: hypothetical protein - Arabidopsis thaliana
  misc_feature (1)..(157): Homolog of NCBI NO: 15810201 NR Description: AT4g15470/dl3775w [Arabidopsis thaliana]
  misc_feature (1)..(197): Homolog of NCBI NO: 34393840 NR Description: putative z-protein [Oryza sativa (japonica
  misc_feature (1)..(197): Homolog of NCBI NO: 18414455 NR Description: expressed protein [Arabidopsis thaliana]
  misc_feature (1)..(194): Homolog of NCBI NO: 15235466 NR Description: hypothetical protein [Arabidopsis thaliana]
  misc_feature (1)..(197): Homolog of NCBI NO: 14626300 NR Description: putative receptor-associated protein
  misc_feature (1)..(196): Homolog of NCBI NO: 15218701 NR Description: hypothetical protein [Arabidopsis thaliana]
  misc_feature (1)..(197): Homolog of NCBI NO: 15229411 NR Description: hypothetical protein [Arabidopsis thaliana]
  misc_feature (1)..(196): Homolog of NCBI NO: 34393841 NR Description: putative z-protein [Oryza sativa (japonica
MTAAVAGFVVKVPAVSEFFVSSNAGLGLYIFLLVLPLIVLCPLRYYHQKHPVNLILLGVFTVSISFAVGMTCAFTSGKIILEAAILTAVVVISLTAYTFWAAKRGHDFNFLGPFLFGALMVLLVFSLIQIFFPLGKISTMIYGAVASIIFCGYIIFDTDNIIKRHTYDEYIWAAVSLYLDIINLFLNLMQILRAADS

SEQ ID NO: 63180 - DNA, 1216 bp, Triticum aestivum
  misc_feature (1)..(1216): Ceres Seq. ID no. 13596660
ctctgcctccctatcccgcctcgggccgctgcctctgcctcatcgtcctcctcgcgctcgcactccttcgccgctgccggacgggtttccctccgccgtcgccgccgccgcgcttccttcaccgactgccgctgctcctcctcctcctccccagaaatggaggccggcgctggcacggctctgtaccccgcgcaccgatgcaaaaccatatacctggtgaggcatgcccagggtattcacaatgtggaaggcgagaaggattttgcagcatacaagtcacatgcgctgcttgatgctcaacttacccctttgggctggagccaagttgataccctgcgagatcatgtgacaaaatgtggactagcaaaaaagattgagttggttattgtttcccctctactcaggactatacaaactgcagtgggggtctttggtggtgggaactatattgatggagcaagtgcatcaccattgatggtagagggtgctggaaacagtgaacgtcagccgatttcaagtttgaactgcccaccgtttctcgcagttgaggcttgcagagagcacctgggtgttcatccctgtgacaagaggagcagcataacaaaataccgtactctctttcctgccattgatttttccttgatcgagaatgatgaagatgttctctgggaacccgatgtcagagaaacaaatgagtctgttgctctcaggggcatgaagttctttgactggttatggacgagagaagagaaagagatagctattgtcagccatagtggtttcttgtatcacaccttgaacatgtatggtaaagagtgtcatccaacaatagcagaggaactgggaaagcacttcgccaactgtgagctccggtcgatggtcttggtcgacagaagtaaccttggatcggatgcctctaaatacaacttcgctgggaagataccgaccgggcttgatatgcccagcgatgtcgcagacgagaagcaggctgaagaagctagcaagaactgaggctgtcgagcatgtggatgtctttgattcttttgtcaaaccttggttctggctgacaatgaactgagaatagatactaagcgacatctaaggataggacttgccgtctgttgttccggtgtatgatgggcacgattggttatgtttatctgatttgttgtttgaacagatacccaaattcatgggaaataaggacttatacact

SEQ ID NO: 63181 - protein, 336 aa, Triticum aestivum
  peptide (1)..(336): Ceres Seq. ID no. 15221943
  misc_feature (68)..(307): Pfam Name: Phosphoglycerate mutase family Pfam Description: Phosphoglycerate mutase family
  misc_feature (59)..(325): Homolog of NCBI NO: 38344765 NR Description: OSJNBa0068L06.8 [Oryza sativa (japonica
LCLPIPPRAAASASSSSSRSHSFAAAGRVSLRRRRRRASFTDCRCSSSSSPEMEAGAGTALYPAHRCKTIYLVRHAQGIHNVEGEKDFAAYKSHALLDAQLTPLGWSQVDTLRDHVTKCGLAKKIELVIVSPLLRTIQTAVGVFGGGNYIDGASASPLMVEGAGNSERQPISSLNCPPFLAVEACREHLGVHPCDKRSSITKYRTLFPAIDFSLIENDEDVLWEPDVRETNESVALRGMKFFDWLWTREEKEIAIVSHSGFLYHTLNMYGKECHPTIAEELGKHFANCELRSMVLVDRSNLGSDASKYNFAGKIPTGLDMPSDVADEKQAEEASKN

SEQ ID NO: 63182 - protein, 284 aa, Triticum aestivum
  peptide (1)..(284): Ceres Seq. ID no. 15221944
  misc_feature (16)..(255): Pfam Name: Phosphoglycerate mutase family Pfam Description: Phosphoglycerate mutase family
  misc_feature (7)..(273): Homolog of NCBI NO: 38344765 NR Description: OSJNBa0068L06.8 [Oryza sativa (japonica
MEAGAGTALYPAHRCKTIYLVRHAQGIHNVEGEKDFAAYKSHALLDAQLTPLGWSQVDTLRDHVTKCGLAKKIELVIVSPLLRTIQTAVGVFGGGNYIDGASASPLMVEGAGNSERQPISSLNCPPFLAVEACREHLGVHPCDKRSSITKYRTLFPAIDFSLIENDEDVLWEPDVRETNESVALRGMKFFDWLWTREEKEIAIVSHSGFLYHTLNMYGKECHPTIAEELGKHFANCELRSMVLVDRSNLGSDASKYNFAGKIPTGLDMPSDVADEKQAEEASKN

SEQ ID NO: 63183 - protein, 178 aa, Triticum aestivum
  peptide (1)..(178): Ceres Seq. ID no. 15221945
  misc_feature (1)..(149): Pfam Name: Phosphoglycerate mutase family Pfam Description: Phosphoglycerate mutase family
  misc_feature (1)..(167): Homolog of NCBI NO: 38344765 NR Description: OSJNBa0068L06.8 [Oryza sativa (japonica
MVEGAGNSERQPISSLNCPPFLAVEACREHLGVHPCDKRSSITKYRTLFPAIDFSLIENDEDVLWEPDVRETNESVALRGMKFFDWLWTREEKEIAIVSHSGFLYHTLNMYGKECHPTIAEELGKHFANCELRSMVLVDRSNLGSDASKYNFAGKIPTGLDMPSDVADEKQAEEASKN

SEQ ID NO: 63184 - DNA, 1602 bp, Triticum aestivum
  misc_feature (1)..(1602): Ceres Seq. ID no. 14314108
accaaacaatggcggcgtgcaacggcctgttcgtgtaccacatcctcggcctggcctccctggtggccgtcttctacttctccctcctcggcgaggtggacctccgcttccccggcctcctcccgtcctccggcgcgtcccagcactcccacgacgcgtccctgccgttcgtggagcggcgcggcgcgcagctcttcctggagggccgcccgttctacatcaacgggtggaactcgtactggctcatggaccaggcggtggagccggccagccgccaccgtgtgtccgacatgttccgcgccgccaccgggatggggctcacggtgtgccgcacctgggccttcaacgacggcgcctacaacgcgctccagctctccccgggacacttcgacgagcgcgtcttcagggcgctggacctggtggtcgtggaggcccggcggcacggcgtgcggctcgtcctcagcctggccaacaacctggaggcgtacggcgggaagacgcagtacgtgcggtgggcgtgggacgaaggcgtcggcctcaccgcctccaacgactccttcttcttcgaccccgccatccgtgactacttcaaagtctacctcaaggcattgttgacgaggacgaaccacttgacgggggtgcagtacaaggacgaccctaccatcttggcgtgggagctgatgaacgagcccagatgcatctccgatccgtctggtaacactctgcagcgctggatcgaggagatggcggggtacgtgaaatcgatcgaccgtcggcatctgctgaccgtcggcacggaggggttctacggccccacgagccctccggagaagctgagcgtgaatccggggcactggttcaacaactacggcctcgacttcatccgcaactccaagatctccgacatcgacttcgcctccgtccacctttacccggacacctggctgctgcacgcggatctggaagagaagctcaagttcgtgacgcagtgggtgagctcccacttcgaggacggcgacacggagctcggcggcaagcccgtggtgctgacggagttcgggctgtcgcatttggtcaagggcttcgagcagtcgcagcgcgacgccttctacaagtcggtgtacgacatcgtccacgcgtcggccaagaggggcggcgccggcgccggcgcgatagtgtggcagctcgccgccgaggacatggaggagtaccacgacggcttcgccatcgtgcccagcgagacgccgtcgatgcagaagctgctgacggagcagtcgtgccggctggccgcgctgaggcacggggaggaggaggccaagaggatcctcaaggcggtgtgcggctgacccgtgatctgtcttgcgaggtgtggcttttttgcgtgctcatgtcatgtactgttactgtgtgtccgtaggaaatcgacacgaaatggaccgaagggatccatgaaaggtggcgtgctcggcgccgacgtcggcagatctgcctctgtattttccttgctgtgttgttgtactcgtacgtgcccttgacctttggtgtttaagtcattgtcgagtggcagcggaggctagttatattctatagtcctcgaatagc

SEQ ID NO: 63185 - protein, 447 aa, Triticum aestivum
  peptide (1)..(447): Ceres Seq. ID no. 14314109
  misc_feature (61)..(398): Pfam Name: Cellulase (glycosyl hydrolase family 5) Pfam Description: Cellulase (glycosyl hydrolase family 5)
  misc_feature (56)..(432): Homolog of NCBI NO: 15239973 NR Description: glycosyl hydrolase family 5/cellulase
  misc_feature (56)..(440): Homolog of NCBI NO: 34912090 NR Description: putative mannan endo-1,4-beta-mannosidase
  misc_feature (57)..(429): Homolog of NCBI NO: 15241093 NR Description: glycosyl hydrolase family 5/cellulase
  misc_feature (56)..(433): Homolog of NCBI NO: 10129675 NR Description: (1-4)-beta-mannan endohydrolase [Coffea arabica]
  misc_feature (45)..(431): Homolog of NCBI NO: 10178872 NR Description: (1-4)-beta-mannan endohydrolase [Coffea arabica]
  misc_feature (3)..(149): Homolog of NCBI NO: 25354515 NR Description: (1-4)-beta-mannan endohydrolase [imported] -
  misc_feature (178)..(433): Homolog of NCBI NO: 25354515 NR Description: (1-4)-beta-mannan endohydrolase [imported] -
  misc_feature (48)..(446): Homolog of NCBI NO: 15235255 NR Description: glycosyl hydrolase family 5/cellulase
  misc_feature (3)..(433): Homolog of NCBI NO: 30681096 NR Description: glycosyl hydrolase family 5/cellulase
  misc_feature (3)..(446): Homolog of NCBI NO: 34909462 NR Description: putative (1-4)-beta-mannan endohydrolase
QTMAACNGLFVYHILGLASLVAVFYFSLLGEVDLRFPGLLPSSGASQHSHDASLPFVERRGAQLFLEGRPFYINGWNSYWLMDQAVEPASRHRVSDMFRAATGMGLTVCRTWAFNDGAYNALQLSPGHFDERVFRALDLVVVEARRHGVRLVLSLANNLEAYGGKTQYVRWAWDEGVGLTASNDSFFFDPAIRDYFKVYLKALLTRTNHLTGVQYKDDPTILAWELMNEPRCISDPSGNTLQRWIEEMAGYVKSIDRRHLLTVGTEGFYGPTSPPEKLSVNPGHWFNNYGLDFIRNSKISDIDFASVHLYPDTWLLHADLEEKLKFVTQWVSSHFEDGDTELGGKPVVLTEFGLSHLVKGFEQSQRDAFYKSVYDIVHASAKRGGAGAGAIVWQLAAEDMEEYHDGFAIVPSETPSMQKLLTEQSCRLAALRHGEEEAKRILKAVCG

SEQ ID NO: 63186 - protein, 445 aa, Triticum aestivum
  peptide (1)..(445): Ceres Seq. ID no. 14314110
  misc_feature (59)..(396): Pfam Name: Cellulase (glycosyl hydrolase family 5) Pfam Description: Cellulase (glycosyl hydrolase family 5)
  misc_feature (54)..(430): Homolog of NCBI NO: 15239973 NR Description: glycosyl hydrolase family 5/cellulase
  misc_feature (54)..(438): Homolog of NCBI NO: 34912090 NR Description: putative mannan endo-1,4-beta-mannosidase
  misc_feature (55)..(427): Homolog of NCBI NO: 15241093 NR Description: glycosyl hydrolase family 5/cellulase
  misc_feature (54)..(431): Homolog of NCBI NO: 10129675 NR Description: (1-4)-beta-mannan endohydrolase [Coffea arabica]
  misc_feature (43)..(429): Homolog of NCBI NO: 10178872 NR Description: (1-4)-beta-mannan endohydrolase [Coffea arabica]
  misc_feature (1)..(147): Homolog of NCBI NO: 25354515 NR Description: (1-4)-beta-mannan endohydrolase [imported] -
  misc_feature (176)..(431): Homolog of NCBI NO: 25354515 NR Description: (1-4)-beta-mannan endohydrolase [imported] -
  misc_feature (46)..(444): Homolog of NCBI NO: 15235255 NR Description: glycosyl hydrolase family 5/cellulase
  misc_feature (1)..(431): Homolog of NCBI NO: 30681096 NR Description: glycosyl hydrolase family 5/cellulase
  misc_feature (1)..(444): Homolog of NCBI NO: 34909462 NR Description: putative (1-4)-beta-mannan endohydrolase
MAACNGLFVYHILGLASLVAVFYFSLLGEVDLRFPGLLPSSGASQHSHDASLPFVERRGAQLFLEGRPFYINGWNSYWLMDQAVEPASRHRVSDMFRAATGMGLTVCRTWAFNDGAYNALQLSPGHFDERVFRALDLVVVEARRHGVRLVLSLANNLEAYGGKTQYVRWAWDEGVGLTASNDSFFFDPAIRDYFKVYLKALLTRTNHLTGVQYKDDPTILAWELMNEPRCISDPSGNTLQRWIEEMAGYVKSIDRRHLLTVGTEGFYGPTSPPEKLSVNPGHWFNNYGLDFIRNSKISDIDFASVHLYPDTWLLHADLEEKLKFVTQWVSSHFEDGDTELGGKPVVLTEFGLSHLVKGFEQSQRDAFYKSVYDIVHASAKRGGAGAGAIVWQLAAEDMEEYHDGFAIVPSETPSMQKLLTEQSCRLAALRHGEEEAKRILKAVCG

SEQ ID NO: 63187 - protein, 366 aa, Triticum aestivum
  peptide (1)..(366): Ceres Seq. ID no. 14314111
  misc_feature (1)..(317): Pfam Name: Cellulase (glycosyl hydrolase family 5) Pfam Description: Cellulase (glycosyl hydrolase family 5)
  misc_feature (1)..(351): Homolog of NCBI NO: 15239973 NR Description: glycosyl hydrolase family 5/cellulase
  misc_feature (1)..(359): Homolog of NCBI NO: 34912090 NR Description: putative mannan endo-1,4-beta-mannosidase
  misc_feature (1)..(348): Homolog of NCBI NO: 15241093 NR Description: glycosyl hydrolase family 5/cellulase
  misc_feature (1)..(352): Homolog of NCBI NO: 10129675 NR Description: (1-4)-beta-mannan endohydrolase [Coffea arabica]
  misc_feature (1)..(350): Homolog of NCBI NO: 10178872 NR Description: (1-4)-beta-mannan endohydrolase [Coffea arabica]
  misc_feature (1)..(68): Homolog of NCBI NO: 25354515 NR Description: (1-4)-beta-mannan endohydrolase [imported] -
  misc_feature (97)..(352): Homolog of NCBI NO: 25354515 NR Description: (1-4)-beta-mannan endohydrolase [imported] -
  misc_feature (1)..(365): Homolog of NCBI NO: 15235255 NR Description: glycosyl hydrolase family 5/cellulase
  misc_feature (1)..(352): Homolog of NCBI NO: 30681096 NR Description: glycosyl hydrolase family 5/cellulase
  misc_feature (1)..(365): Homolog of NCBI NO: 34909462 NR Description: putative (1-4)-beta-mannan endohydrolase
MDQAVEPASRHRVSDMFRAATGMGLTVCRTWAFNDGAYNALQLSPGHFDERVFRALDLVVVEARRHGVRLVLSLANNLEAYGGKTQYVRWAWDEGVGLTASNDSFFFDPAIRDYFKVYLKALLTRTNHLTGVQYKDDPTILAWELMNEPRCISDPSGNTLQRWIEEMAGYVKSIDRRHLLTVGTEGFYGPTSPPEKLSVNPGHWFNNYGLDFIRNSKISDIDFASVHLYPDTWLLHADLEEKLKFVTQWVSSHFEDGDTELGGKPVVLTEFGLSHLVKGFEQSQRDAFYKSVYDIVHASAKRGGAGAGAIVWQLAAEDMEEYHDGFAIVPSETPSMQKLLTEQSCRLAALRHGEEEAKRILKAVCG

SEQ ID NO: 63188 - DNA, 1318 bp, Triticum aestivum
  misc_feature (1)..(1318): Ceres Seq. ID no. 14314112
aaggacagagaagccaggcggcagcaacccctttcctccaatctccgtccattcgagacgtctgcggggccgggcaaggcatggtcgccatgctgcccgccgcgaggggggacgccgccccagccgccagcgccggcgccgccgacaagctcgtccacgggcctgtcaccgacggcaagtgcaagaagaaggccccgaggatgatccacaaggccgagagggagaagcacaagcgcgacctgctcaacgatctcttcagcgagcttgacgaaatgctagaagcagacaggcagaccaatgggaaggcatgtatattgactgacaccactcgaatccttcgagacctgctttcgcaattagaatctctccgaaaggagaatagcaccctgcagaatgaatcccattatgttacgatggagaggaatgagctgcaggatgagaacggtgtgctccgcaatgaaattctggagctacaaaatgagctggcgacgcttcccgcaggcaacccaggttggggccatgctactgctggatcgcctcaccctgcgggcacagttttcccgtcacagcaaccaatgcagccgaccaccatcgcaagcgcagtattccccttgcagcagcctctgcaacagacaacaatcctggagcacccttatgcaccaccaccaccaccacgggaacttaagctcttcccagatgctgcgtctgatatcgaaggccttgaaccatcagaagatcaggaggccgccaaccatattgcgcgaccgctggcgaggtacccaacacagtcagcgttgtggcctgtaagcctgggtctcccgaggatggaagacgaacagtgtagcagtggcacaaccggcagtagcaaggaaggtagtagctctgcctctagtagagattgagtagatcagctccaaccagtcaggaagtttctctttgagcgtagcgaatatacacagatgagcatgtggcatgtaaataccagactccatcttggatctgggaatgttatgttagatgagaagatgacactccaatgggaatcagaatagcagcatttctcatcctttgtgttgcaccgtatcatatatatgaactgatctagatttgatatttgcaaagaaaaactacagcaataagcaatggattatatttatcggtgggggtaaccagaagcggaactgaagaggaaattgcaggcgactctcttcaaccatgtagagggttgcgtagagggtttcctttccttgcattggggccaatctcttcaaccgtgtacttccctgatccaaacccaaagagaaaatatatgagtttc

SEQ ID NO: 63189 - protein, 299 aa, Triticum aestivum
  peptide (1)..(299): Ceres Seq. ID no. 14314113
  misc_feature (66)..(116): Pfam Name: Helix-loop-helix DNA-binding domain Pfam Description: Helix-loop-helix DNA-binding domain
  misc_feature (33)..(221): Homolog of NCBI NO: 21592325 NR Description: bHLH transcription factor, putative [Arabidopsis
  misc_feature (33)..(221): Homolog of NCBI NO: 15239706 NR Description: bHLH protein [Arabidopsis thaliana]
  misc_feature (66)..(263): Homolog of NCBI NO: 11994197 NR Description: emb|CAA18500.1~gene_id:MPN9.10~similar to unknown
  misc_feature (66)..(263): Homolog of NCBI NO: 15230975 NR Description: bHLH protein family [Arabidopsis thaliana]
  misc_feature (57)..(266): Homolog of NCBI NO: 15228207 NR Description: bHLH protein family [Arabidopsis thaliana]
  misc_feature (22)..(135): Homolog of NCBI NO: 34913194 NR Description: contains EST C74688(E50368)~similar to amelogenin
  misc_feature (136)..(290): Homolog of NCBI NO: 34913194 NR Description: contains EST C74688(E50368)~similar to amelogenin
  misc_feature (22)..(290): Homolog of NCBI NO: 33146544 NR Description: amelogenin precursor-like protein
  misc_feature (30)..(290): Homolog of NCBI NO: 34391901 NR Description: putative transcription factor bHLH
  misc_feature (30)..(279): Homolog of NCBI NO: 18071393 NR Description: putative amelogenin precursor [Oryza sativa]
GQRSQAAATPFLQSPSIRDVCGAGQGMVAMLPAARGDAAPAASAGAADKLVHGPVTDGKCKKKAPRMIHKAEREKHKRDLLNDLFSELDEMLEADRQTNGKACILTDTTRILRDLLSQLESLRKENSTLQNESHYVTMERNELQDENGVLRNEILELQNELATLPAGNPGWGHATAGSPHPAGTVFPSQQPMQPTTIASAVFPLQQPLQQTTILEHPYAPPPPPRELKLFPDAASDIEGLEPSEDQEAANHIARPLARYPTQSALWPVSLGLPRMEDEQCSSGTTGSSKEGSSSASSRD

SEQ ID NO: 63190 - protein, 273 aa, Triticum aestivum
  peptide (1)..(273): Ceres Seq. ID no. 14314114
  misc_feature (40)..(90): Pfam Name: Helix-loop-helix DNA-binding domain Pfam Description: Helix-loop-helix DNA-binding domain
  misc_feature (7)..(195): Homolog of NCBI NO: 21592325 NR Description: bHLH transcription factor, putative [Arabidopsis
  misc_feature (7)..(195): Homolog of NCBI NO: 15239706 NR Description: bHLH protein [Arabidopsis thaliana]
  misc_feature (40)..(237): Homolog of NCBI NO: 11994197 NR Description: emb|CAA18500.1~gene_id:MPN9.10~similar to unknown
  misc_feature (40)..(237): Homolog of NCBI NO: 15230975 NR Description: bHLH protein family [Arabidopsis thaliana]
  misc_feature (31)..(240): Homolog of NCBI NO: 15228207 NR Description: bHLH protein family [Arabidopsis thaliana]
  misc_feature (1)..(109): Homolog of NCBI NO: 34913194 NR Description: contains EST C74688(E50368)~similar to amelogenin
  misc_feature (110)..(264): Homolog of NCBI NO: 34913194 NR Description: contains EST C74688(E50368)~similar to amelogenin
  misc_feature (1)..(264): Homolog of NCBI NO: 33146544 NR Description: amelogenin precursor-like protein
  misc_feature (4)..(264): Homolog of NCBI NO: 34391901 NR Description: putative transcription factor bHLH
  misc_feature (4)..(253): Homolog of NCBI NO: 18071393 NR Description: putative amelogenin precursor [Oryza sativa]
MVAMLPAARGDAAPAASAGAADKLVHGPVTDGKCKKKAPRMIHKAEREKHKRDLLNDLFSELDEMLEADRQTNGKACILTDTTRILRDLLSQLESLRKENSTLQNESHYVTMERNELQDENGVLRNEILELQNELATLPAGNPGWGHATAGSPHPAGTVFPSQQPMQPTTIASAVFPLQQPLQQTTILEHPYAPPPPPRELKLFPDAASDIEGLEPSEDQEAANHIARPLARYPTQSALWPVSLGLPRMEDEQCSSGTTGSSKEGSSSASSRD

SEQ ID NO: 63191 - protein, 270 aa, Triticum aestivum
  peptide (1)..(270): Ceres Seq. ID no. 14314115
  misc_feature (37)..(87): Pfam Name: Helix-loop-helix DNA-binding domain Pfam Description: Helix-loop-helix DNA-binding domain
  misc_feature (4)..(192): Homolog of NCBI NO: 21592325 NR Description: bHLH transcription factor, putative [Arabidopsis
  misc_feature (4)..(192): Homolog of NCBI NO: 15239706 NR Description: bHLH protein [Arabidopsis thaliana]
  misc_feature (37)..(234): Homolog of NCBI NO: 11994197 NR Description: emb|CAA18500.1~gene_id:MPN9.10~similar to unknown
  misc_feature (37)..(234): Homolog of NCBI NO: 15230975 NR Description: bHLH protein family [Arabidopsis thaliana]
  misc_feature (28)..(237): Homolog of NCBI NO: 15228207 NR Description: bHLH protein family [Arabidopsis thaliana]
  misc_feature (1)..(106): Homolog of NCBI NO: 34913194 NR Description: contains EST C74688(E50368)~similar to amelogenin
  misc_feature (107)..(261): Homolog of NCBI NO: 34913194 NR Description: contains EST C74688(E50368)~similar to amelogenin
  misc_feature (1)..(261): Homolog of NCBI NO: 33146544 NR Description: amelogenin precursor-like protein
  misc_feature (1)..(261): Homolog of NCBI NO: 34391901 NR Description: putative transcription factor bHLH
  misc_feature (1)..(250): Homolog of NCBI NO: 18071393 NR Description: putative amelogenin precursor [Oryza sativa]
MLPAARGDAAPAASAGAADKLVHGPVTDGKCKKKAPRMIHKAEREKHKRDLLNDLFSELDEMLEADRQTNGKACILTDTTRILRDLLSQLESLRKENSTLQNESHYVTMERNELQDENGVLRNEILELQNELATLPAGNPGWGHATAGSPHPAGTVFPSQQPMQPTTIASAVFPLQQPLQQTTILEHPYAPPPPPRELKLFPDAASDIEGLEPSEDQEAANHIARPLARYPTQSALWPVSLGLPRMEDEQCSSGTTGSSKEGSSSASSRD

SEQ ID NO: 63192 - DNA, 1687 bp, Triticum aestivum
  misc_feature (1)..(1687): Ceres Seq. ID no. 15178681
aatcgaataatccgtcgactgttctggagagtgagcaggatcggattgttattctattgttgtccgcggcggccatggcgttcttcgaggagacggagtcgtactacgtcccctacctccgcgcccacctgcaccaattcgcagcgtcggtctccgcggcgagctgcgaggagggggcgggcgacgacgaggagtgccgcgacgaggcggccgcgctcaggctcaagatggtggccgtcgccgccatcctcatcgccggcgcggtcggcgtcgccatcccgctcgtcggccggaggcggcgcggcgggggcggcggcggcgagggcgggtcctccggcggcgggatgttcgtgctcgccaaggcgttcgcggcgggggtcatcctcgccacggggttcgtgcacatgatgcacgacgccgaggagaagttcgccgacccgtgcctcccggccatgccgtggcgccggttccccttcccgggcttcatcgccatgctcgccgcgctgggcacgctcgtcatggagttcgtcggcacccgcttctacgagcgcaggcacggcgaggaggccgctgcagccgcggccacagccgcgcgtgacgacaccacggcgctgctcgaggacggctccctgtcagggatggctgccgccgcgatgagcggcgacgatgagaagcaggacgccatgcacatcgtgggcatgcgcgcgcacgcggcggcgcaccagcacagccatgcgcatggccatgacgcgtgcgatggtggagccgtgtacgacgcccatgcacacgcccacgcccagggccatggccatgaccatgggcatgggagcgaggagaggccgtcccaagctcatcatgtggttgtctcgcagattctggagacggggattgtatctcattcggtgatcatcgggctatccttgggcgtttcgcaaagcccatgtaccattaaacctcttgttgccgccctctccttccaccagttcttcgagggttttgccttgggtggctgcatttctgaggcgcagttcaagaatttctctgcactcctgatggctttcttctttgctatcacaacacctgctgggatcaccgtgggggcggggatcgcgtcattctacaatgccaacagccccagggcattggtggtggaaggcattctggattcaatgtcatctggtatactggtctatatggcattagtggatctcattgctgctgatttcctgagccggaggatgagctgcaatccgaggctgcaagtgtgctcatacgttgccttgtttgtcggggctattgccatgtcatcactggctatctgggcttagtgccagtgaggattattgaagcttgggacgggctgcttggtgatcaatgcactacgacttgttgcctagctaccattaactgagtaagatgggaggcttttcctttcgctgtccattcttttgtttgttcttccatggtgctgggccgtgtaacgtcctcttttggtcatagaaaaggaagtccctctttgggtacattgtggtggtacagaattgggacaagttagttagggaataaagagtttaggagtcccaccagtctttgcagatgtacagttcatcctcggtgttagataagaggccttgtctgttctcaagtataatcttgcacgtacatcaatgtggatctcctgaaagcc

SEQ ID NO: 63193 - protein, 441 aa, Triticum aestivum
  peptide (1)..(441): Ceres Seq. ID no. 15178682
  misc_feature (232)..(310): Pfam Name: Cation efflux family Pfam Description: Cation efflux family
  misc_feature (47)..(249): Homolog of NCBI NO: 40888862 NR Description: TPA: putative ZIP-like protein
  misc_feature (47)..(441): Homolog of NCBI NO: 21553732 NR Description: putative iron-regulated transporter [Arabidopsis
  misc_feature (59)..(441): Homolog of NCBI NO: 7381054 NR Description: Zn and Cd transporter ZNT1 [Thlaspi caerulescens]
  misc_feature (259)..(441): Homolog of NCBI NO: 30526082 NR Description: putative ZIP-like zinc transporter
  misc_feature (35)..(249): Homolog of NCBI NO: 30526082 NR Description: putative ZIP-like zinc transporter
  misc_feature (59)..(441): Homolog of NCBI NO: 14582255 NR Description: ZIP-like zinc transporter [Thlaspi caerulescens]
  misc_feature (47)..(441): Homolog of NCBI NO: 37079196 NR Description: Fe(II) transport protein 3, chloroplast precursor
  misc_feature (47)..(441): Homolog of NCBI NO: 18406954 NR Description: metal transporter, putative (IRT3) [Arabidopsis
  misc_feature (291)..(441): Homolog of NCBI NO: 40888856 NR Description: TPA: putative ZIP-like protein
  misc_feature (31)..(219): Homolog of NCBI NO: 40888856 NR Description: TPA: putative ZIP-like protein
SNNPSTVLESEQDRIVILLLSAAAMAFFEETESYYVPYLRAHLHQFAASVSAASCEEGAGDDEECRDEAAALRLKMVAVAAILIAGAVGVAIPLVGRRRRGGGGGGEGGSSGGGMFVLAKAFAAGVILATGFVHMMHDAEEKFADPCLPAMPWRRFPFPGFIAMLAALGTLVMEFVGTRFYERRHGEEAAAAAATAARDDTTALLEDGSLSGMAAAAMSGDDEKQDAMHIVGMRAHAAAHQHSHAHGHDACDGGAVYDAHAHAHAQGHGHDHGHGSEERPSQAHHVVVSQILETGIVSHSVIIGLSLGVSQSPCTIKPLVAALSFHQFFEGFALGGCISEAQFKNFSALLMAFFFAITTPAGITVGAGIASFYNANSPRALVVEGILDSMSSGILVYMALVDLIAADFLSRRMSCNPRLQVCSYVALFVGAIAMSSLAIWA

SEQ ID NO: 63194 - protein, 417 aa, Triticum aestivum
  peptide (1)..(417): Ceres Seq. ID no. 15178683
  misc_feature (208)..(286): Pfam Name: Cation efflux family Pfam Description: Cation efflux family
  misc_feature (23)..(225): Homolog of NCBI NO: 40888862 NR Description: TPA: putative ZIP-like protein
  misc_feature (23)..(417): Homolog of NCBI NO: 21553732 NR Description: putative iron-regulated transporter [Arabidopsis
  misc_feature (35)..(417): Homolog of NCBI NO: 7381054 NR Description: Zn and Cd transporter ZNT1 [Thlaspi caerulescens]
  misc_feature (235)..(417): Homolog of NCBI NO: 30526082 NR Description: putative ZIP-like zinc transporter
  misc_feature (11)..(225): Homolog of NCBI NO: 30526082 NR Description: putative ZIP-like zinc transporter
  misc_feature (35)..(417): Homolog of NCBI NO: 14582255 NR Description: ZIP-like zinc transporter [Thlaspi caerulescens]
  misc_feature (23)..(417): Homolog of NCBI NO: 37079196 NR Description: Fe(II) transport protein 3, chloroplast precursor
  misc_feature (23)..(417): Homolog of NCBI NO: 18406954 NR Description: metal transporter, putative (IRT3) [Arabidopsis
  misc_feature (267)..(417): Homolog of NCBI NO: 40888856 NR Description: TPA: putative ZIP-like protein
  misc_feature (7)..(195): Homolog of NCBI NO: 40888856 NR Description: TPA: putative ZIP-like protein
MAFFEETESYYVPYLRAHLHQFAASVSAASCEEGAGDDEECRDEAAALRLKMVAVAAILIAGAVGVAIPLVGRRRRGGGGGGEGGSSGGGMFVLAKAFAAGVILATGFVHMMHDAEEKFADPCLPAMPWRRFPFPGFIAMLAALGTLVMEFVGTRFYERRHGEEAAAAAATAARDDTTALLEDGSLSGMAAAAMSGDDEKQDAMHIVGMRAHAAAHQHSHAHGHDACDGGAVYDAHAHAHAQGHGHDHGHGSEERPSQAHHVVVSQILETGIVSHSVIIGLSLGVSQSPCTIKPLVAALSFHQFFEGFALGGCISEAQFKNFSALLMAFFFAITTPAGITVGAGIASFYNANSPRALVVEGILDSMSSGILVYMALVDLIAADFLSRRMSCNPRLQVCSYVALFVGAIAMSSLAIWA

SEQ ID NO: 63195 - protein, 366 aa, Triticum aestivum
  peptide (1)..(366): Ceres Seq. ID no. 15178684
  misc_feature (157)..(235): Pfam Name: Cation efflux family Pfam Description: Cation efflux family
  misc_feature (1)..(174): Homolog of NCBI NO: 40888862 NR Description: TPA: putative ZIP-like protein
  misc_feature (1)..(366): Homolog of NCBI NO: 21553732 NR Description: putative iron-regulated transporter [Arabidopsis
  misc_feature (1)..(366): Homolog of NCBI NO: 7381054 NR Description: Zn and Cd transporter ZNT1 [Thlaspi caerulescens]
  misc_feature (184)..(366): Homolog of NCBI NO: 30526082 NR Description: putative ZIP-like zinc transporter
  misc_feature (1)..(174): Homolog of NCBI NO: 30526082 NR Description: putative ZIP-like zinc transporter
  misc_feature (1)..(366): Homolog of NCBI NO: 14582255 NR Description: ZIP-like zinc transporter [Thlaspi caerulescens]
  misc_feature (1)..(366): Homolog of NCBI NO: 37079196 NR Description: Fe(II) transport protein 3, chloroplast precursor
  misc_feature (1)..(366): Homolog of NCBI NO: 18406954 NR Description: metal transporter, putative (IRT3) [Arabidopsis
  misc_feature (216)..(366): Homolog of NCBI NO: 40888856 NR Description: TPA: putative ZIP-like protein
  misc_feature (1)..(144): Homolog of NCBI NO: 40888856 NR Description: TPA: putative ZIP-like protein
MVAVAAILIAGAVGVAIPLVGRRRRGGGGGGEGGSSGGGMFVLAKAFAAGVILATGFVHMMHDAEEKFADPCLPAMPWRRFPFPGFIAMLAALGTLVMEFVGTRFYERRHGEEAAAAAATAARDDTTALLEDGSLSGMAAAAMSGDDEKQDAMHIVGMRAHAAAHQHSHAHGHDACDGGAVYDAHAHAHAQGHGHDHGHGSEERPSQAHHVVVSQILETGIVSHSVIIGLSLGVSQSPCTIKPLVAALSFHQFFEGFALGGCISEAQFKNFSALLMAFFFAITTPAGITVGAGIASFYNANSPRALVVEGILDSMSSGILVYMALVDLIAADFLSRRMSCNPRLQVCSYVALFVGAIAMSSLAIWA

SEQ ID NO: 63196 - DNA, 1655 bp, Triticum aestivum
  misc_feature (1)..(1655): Ceres Seq. ID no. 13596984
ctagaacatcctaatcaaaaattgttccttctcccttgcttccatcttcctttgtatgcagccttcatgcatgactgactgtctaactagctcgagcagtagagctagtgcatgacgtgatggctccaacctccctgcagaggccgaggaagccgaggtgcccctcccaccccatgctctctctctcccctgccctcctctccctcctcctcgtccccttcctctacctcctcatccaccgttccgcgtgctccccgcccttcagcaacctcacgaccgccaggcgctcatcctcgagcgtgagcggcttcgccggagaccttcgtgacatcgagttctcgtggaaccacctgccgttcatgtcgtcgaagccaccccccgccaagctcaagatcgccgtgttctcgcggaagtggcccgtggccacggcccctggcggcatggagcggcacgcgcacacgctgcacacggcgctcgccgcgcggggccaccgcgtccacgtgttcacctcacctccgccgcataccgaggccgcgccctcgcccaccgccgatgggcctcagctgcatttccttgacggcacccccggccagtggcggtgcgacgaggcatggaagctgtacgaggccgagggcgacaacgatccgttcgacgtcatccactccgagagcgtggcggtgttccaccggtacgcgcgcggcgtgcccaacctggtcgtgtcgtggcacggaatctccctggaggcgctgcactcgggcatctaccaggacctcgcccgcggcgaggacgagcccatgtcgccggcgttcaaccagagcctgtcgcagtcggtgcaccgggtgctgtccgaggtgcgcttcttccggagctacgcgcaccaggtggccatcagcgactccaccagggagatgctccgcgacgtgtaccagatccccggccgccgcgtgcacgtaatcctgaacggcgtggacgaggcgcagttcactccggacacggagctcggccgcgccttccgggaagagatcgggctccccaagagcgccgacctcgtgctcggcgtgtccgggaggctcgtcaaggacaagggccaccctctgctctacgaggccttctccaagctcgccctccgccacccgaacgtgtacctcctggtcgccggcaaggggccgtgggagtcgaggtacatggacctgggacgcaacgccaaggtgcttggcgcggtgccgcccgggaagctcagggcgttctacaacgcgctggacgtgttcgtggacccgacgctgcggccgcagggcctggacctgacgctcatggaggcgatgcaatgcggcaagccggtggtggccacgcggttcccgagcatcaagggaagcatcgtggtggacgaggagttcggccacatgttcgcgcccaacgtggagtcgctgctagagagtctggaggcggtggtgcaggatggcgcccggcgcgccgcggagcgcggccgcgcgtgcagggagtacgccaggtccatgttcgcggccaccaagatggcactagcgtacgagaggctcttcctttgtgtcaaaaacgagaccttctgcatgtacccctctgaatttgattagttttctcgggagcctgtgcacttgcttagtgatttatggcacactaat

SEQ ID NO: 63197 - protein, 495 aa, Triticum aestivum
  peptide (1)..(495): Ceres Seq. ID no. 13596985
  misc_feature (295)..(460): Pfam Name: Glycosyl transferases group 1 Pfam Description: Glycosyl transferases group 1
  misc_feature (26)..(223): Homolog of NCBI NO: 15237813 NR Description: glycosyltransferase family 1 [Arabidopsis
  misc_feature (219)..(488): Homolog of NCBI NO: 15237813 NR Description: glycosyltransferase family 1 [Arabidopsis
  misc_feature (57)..(485): Homolog of NCBI NO: 5903105 NR Description: Hypothetical protein [Arabidopsis thaliana]
  misc_feature (57)..(495): Homolog of NCBI NO: 15219398 NR Description: glycosyltransferase family 1 [Arabidopsis
  misc_feature (10)..(468): Homolog of NCBI NO: 25407571 NR Description: hypothetical protein AT4g19460 [imported] -
  misc_feature (10)..(468): Homolog of NCBI NO: 7486088 NR Description: hypothetical protein F24J7.20 - Arabidopsis
  misc_feature (10)..(471): Homolog of NCBI NO: 7487719 NR Description: hypothetical protein T5K18.240 - Arabidopsis
  misc_feature (10)..(491): Homolog of NCBI NO: 18415319 NR Description: glycosyltransferase family 1 [Arabidopsis
  misc_feature (10)..(491): Homolog of NCBI NO: 21593749 NR Description: unknown [Arabidopsis thaliana]
  misc_feature (19)..(495): Homolog of NCBI NO: 34911892 NR Description: OSJNBb0032K15.23 [Oryza sativa (japonica
MAPTSLQRPRKPRCPSHPMLSLSPALLSLLLVPFLYLLIHRSACSPPFSNLTTARRSSSSVSGFAGDLRDIEFSWNHLPFMSSKPPPAKLKIAVFSRKWPVATAPGGMERHAHTLHTALAARGHRVHVFTSPPPHTEAAPSPTADGPQLHFLDGTPGQWRCDEAWKLYEAEGDNDPFDVIHSESVAVFHRYARGVPNLVVSWHGISLEALHSGIYQDLARGEDEPMSPAFNQSLSQSVHRVLSEVRFFRSYAHQVAISDSTREMLRDVYQIPGRRVHVILNGVDEAQFTPDTELGRAFREEIGLPKSADLVLGVSGRLVKDKGHPLLYEAFSKLALRHPNVYLLVAGKGPWESRYMDLGRNAKVLGAVPPGKLRAFYNALDVFVDPTLRPQGLDLTLMEAMQCGKPVVATRFPSIKGSIVVDEEFGHMFAPNVESLLESLEAVVQDGARRAAERGRACREYARSMFAATKMALAYERLFLCVKNETFCMYPSEFD

SEQ ID NO: 63198 - protein, 477 aa, Triticum aestivum
  peptide (1)..(477): Ceres Seq. ID no. 13596986
  misc_feature (277)..(442): Pfam Name: Glycosyl transferases group 1 Pfam Description: Glycosyl transferases group 1
  misc_feature (8)..(205): Homolog of NCBI NO: 15237813 NR Description: glycosyltransferase family 1 [Arabidopsis
  misc_feature (201)..(470): Homolog of NCBI NO: 15237813 NR Description: glycosyltransferase family 1 [Arabidopsis
  misc_feature (39)..(467): Homolog of NCBI NO: 5903105 NR Description: Hypothetical protein [Arabidopsis thaliana]
  misc_feature (39)..(477): Homolog of NCBI NO: 15219398 NR Description: glycosyltransferase family 1 [Arabidopsis
  misc_feature (1)..(450): Homolog of NCBI NO: 25407571 NR Description: hypothetical protein AT4g19460 [imported] -
  misc_feature (1)..(450): Homolog of NCBI NO: 7486088 NR Description: hypothetical protein F24J7.20 - Arabidopsis
  misc_feature (1)..(453): Homolog of NCBI NO: 7487719 NR Description: hypothetical protein T5K18.240 - Arabidopsis
  misc_feature (1)..(473): Homolog of NCBI NO: 18415319 NR Description: glycosyltransferase family 1 [Arabidopsis
  misc_feature (1)..(473): Homolog of NCBI NO: 21593749 NR Description: unknown [Arabidopsis thaliana]
  misc_feature (1)..(477): Homolog of NCBI NO: 34911892 NR Description: OSJNBb0032K15.23 [Oryza sativa (japonica
MLSLSPALLSLLLVPFLYLLIHRSACSPPFSNLTTARRSSSSVSGFAGDLRDIEFSWNHLPFMSSKPPPAKLKIAVFSRKWPVATAPGGMERHAHTLHTALAARGHRVHVFTSPPPHTEAAPSPTADGPQLHFLDGTPGQWRCDEAWKLYEAEGDNDPFDVIHSESVAVFHRYARGVPNLVVSWHGISLEALHSGIYQDLARGEDEPMSPAFNQSLSQSVHRVLSEVRFFRSYAHQVAISDSTREMLRDVYQIPGRRVHVILNGVDEAQFTPDTELGRAFREEIGLPKSADLVLGVSGRLVKDKGHPLLYEAFSKLALRHPNVYLLVAGKGPWESRYMDLGRNAKVLGAVPPGKLRAFYNALDVFVDPTLRPQGLDLTLMEAMQCGKPVVATRFPSIKGSIVVDEEFGHMFAPNVESLLESLEAVVQDGARRAAERGRACREYARSMFAATKMALAYERLFLCVKNETFCMYPSEFD

SEQ ID NO: 63199 - protein, 415 aa, Triticum aestivum
  peptide (1)..(415): Ceres Seq. ID no. 13596987
  misc_feature (215)..(380): Pfam Name: Glycosyl transferases group 1 Pfam Description: Glycosyl transferases group 1
  misc_feature (1)..(143): Homolog of NCBI NO: 15237813 NR Description: glycosyltransferase family 1 [Arabidopsis
  misc_feature (139)..(408): Homolog of NCBI NO: 15237813 NR Description: glycosyltransferase family 1 [Arabidopsis
  misc_feature (1)..(405): Homolog of NCBI NO: 5903105 NR Description: Hypothetical protein [Arabidopsis thaliana]
  misc_feature (1)..(415): Homolog of NCBI NO: 15219398 NR Description: glycosyltransferase family 1 [Arabidopsis
  misc_feature (1)..(388): Homolog of NCBI NO: 25407571 NR Description: hypothetical protein AT4g19460 [imported] -
  misc_feature (1)..(388): Homolog of NCBI NO: 7486088 NR Description: hypothetical protein F24J7.20 - Arabidopsis
  misc_feature (1)..(391): Homolog of NCBI NO: 7487719 NR Description: hypothetical protein T5K18.240 - Arabidopsis
  misc_feature (1)..(411): Homolog of NCBI NO: 18415319 NR Description: glycosyltransferase family 1 [Arabidopsis
  misc_feature (1)..(411): Homolog of NCBI NO: 21593749 NR Description: unknown [Arabidopsis thaliana]
  misc_feature (1)..(415): Homolog of NCBI NO: 34911892 NR Description: OSJNBb0032K15.23 [Oryza sativa (japonica
MSSKPPPAKLKIAVFSRKWPVATAPGGMERHAHTLHTALAARGHRVHVFTSPPPHTEAAPSPTADGPQLHFLDGTPGQWRCDEAWKLYEAEGDNDPFDVIHSESVAVFHRYARGVPNLVVSWHGISLEALHSGIYQDLARGEDEPMSPAFNQSLSQSVHRVLSEVRFFRSYAHQVAISDSTREMLRDVYQIPGRRVHVILNGVDEAQFTPDTELGRAFREEIGLPKSADLVLGVSGRLVKDKGHPLLYEAFSKLALRHPNVYLLVAGKGPWESRYMDLGRNAKVLGAVPPGKLRAFYNALDVFVDPTLRPQGLDLTLMEAMQCGKPVVATRFPSIKGSIVVDEEFGHMFAPNVESLLESLEAVVQDGARRAAERGRACREYARSMFAATKMALAYERLFLCVKNETFCMYPSEFD

SEQ ID NO: 63200 - DNA, 801 bp, Triticum aestivum
  misc_feature (1)..(801): Ceres Seq. ID no. 13655330
gtatttcggtttcctcgattgcccccaatccgtggctgcgcgtccgccggtggccgggggttctaatccgagcgattcccaatcccaaccgccgctggaagaccccgcagctccacgacagcgcgggcagacatggcgcccgtactacctgcgccggcggcggcggcggctcctcccaccttctgccgcgtctctctcccggcccgcagcgccttcccctcctcccccgccaaaagccttcgcaggtttgcggccaggagcagcggcggcggcggccgtcccgagcccaaagcaggtgatgacgagagcaaggccgtccttgacgccttcttcctcgggaaggccttggcggaggcgctgacggagagggccgagtcggtggtgggcgaggtattcagcgtcgtcgggcagtggcaggcggagcagcagaagcaggtccaggaattccaggaggaagtagttcagagagcccaaaaggctaaggaaagagctgctgaggaggtcgttgatgataagggaccaaagactctaaagggaccttcaacaacaatcgtgacgcctgcacctatgtctcctccttctcctaatattcccacacaggcagaacagttataagcggcgatgaagagttagtgctgcatgtagactcacttttgtgctccaagaaagtgatgaaattctcctatgagatatgtattgatcaagttgtcctttctttgatagtgaatatccagaatatcaactagaaaaatctatggtacaagttccgagatgagtggaataaaaatctgttagtttgcc

SEQ ID NO: 63201 - protein, 160 aa, Triticum aestivum
  peptide (1)..(160): Ceres Seq. ID no. 13655331
  misc_feature (59)..(120): Homolog of NCBI NO: 23130619 NR Description: hypothetical protein [Nostoc punctiforme]
  misc_feature (59)..(132): Homolog of NCBI NO: 17232006 NR Description: hypothetical protein [Nostoc sp. PCC 7120]
  misc_feature (54)..(129): Homolog of NCBI NO: 15235625 NR Description: expressed protein [Arabidopsis thaliana]
  misc_feature (54)..(159): Homolog of NCBI NO: 21553912 NR Description: unknown [Arabidopsis thaliana]
MAPVLPAPAAAAAPPTFCRVSLPARSAFPSSPAKSLRRFAARSSGGGGRPEPKAGDDESKAVLDAFFLGKALAEALTERAESVVGEVFSVVGQWQAEQQKQVQEFQEEVVQRAQKAKERAAEEVVDDKGPKTLKGPSTTIVTPAPMSPPSPNIPTQAEQL

SEQ ID NO: 63202 - protein, 119 aa, Triticum aestivum
  peptide (1)..(119): Ceres Seq. ID no. 13655332
YFGFLDCPQSVAARPPVAGGSNPSDSQSQPPLEDPAAPRQRGQTWRPYYLRRRRRRLLPPSAASLSRPAAPSPPPPPKAFAGLRPGAAAAAAVPSPKQVMTRARPSLTPSSSGRPWRRR

SEQ ID NO: 63203 - protein, 98 aa, Triticum aestivum
  peptide (1)..(98): Ceres Seq. ID no. 13655333
ISVSSIAPNPWLRVRRWPGVLIRAIPNPNRRWKTPQLHDSAGRHGARTTCAGGGGGSSHLLPRLSPGPQRLPLLPRQKPSQVCGQEQRRRRPSRAQSR

SEQ ID NO: 63204 - DNA, 948 bp, Triticum aestivum
  misc_feature (1)..(948): Ceres Seq. ID no. 12587066
attcaataccatctcccagtcaagtaaggggagagaagcagaggagcagcagccaatagccgcccacggagatagccagagccagagagcaaggcgtggaattcgagagatcggagggaggaggatgatggagcggcaggacgaggcgtggtgctcgtgctcgccgaggcagtgcaggatttgccacgaggaggaaagggacgacggctgcgtaaccgcaaccgcaaccgcaaccgccatggagtctccctgcggatgctctggctccctcaagtatgctcacagggggtgcgtgcagagatggtgcgacgagaaggggagcaccgtctgcgagatttgcctccagaattacgagcctggatacaccgctgctcccaagaaaactcaagttgctcatgtcgcagtcaccatcagagggagcctggaggtcccaaggcaggattatgaggcaccggagcatgccccgttgatcgggctcgacgcggcggcgggcgacccggcctacgctgagtgcgcgagtgccgccggcagaagtgctgcctggtgccggtcggtgacggtgacgttcactgttgtgttgctgctgaggcatctcattgccctggtgaccgtcggcgccgcgaatcaatacgccttcagcctgctgacgatatacttgctgagggcgagtgggatcttgctgccgttctacgtcctcatgcggcttatctccgcggtgcagcacggccagatgcagtaccggctgcagatgctccaggagcaaagaaggaacgcatcaagaatgcaacacagggtgcctggtcagggacaacggcagcatgtgattcttgttgtgtgaggagaacagtgaagtggatgttgtcctctggaatagtcttaaatgtattattattgatgttgatcaaggagcaattaggaaaaaagaaaagagaaagttcataagctttc

SEQ ID NO: 63205 - protein, 278 aa, Triticum aestivum
  peptide (1)..(278): Ceres Seq. ID no. 12587067
  misc_feature (58)..(113): Pfam Name: Zinc finger, C3HC4 type (RING finger) Pfam Description: Zinc finger, C3HC4 type (RING finger)
  misc_feature (51)..(240): Homolog of NCBI NO: 15240828 NR Description: putative protein; protein id: At5g38070.1
  misc_feature (57)..(272): Homolog of NCBI NO: 18424590 NR Description: expressed protein
  misc_feature (54)..(266): Homolog of NCBI NO: 21537046 NR Description: nucleoside triphosphatase, putative [Arabidopsis
  misc_feature (54)..(266): Homolog of NCBI NO: 26451292 NR Description: unknown protein [Arabidopsis thaliana]
  misc_feature (54)..(266): Homolog of NCBI NO: 15223693 NR Description: nucleoside triphosphatase, putative
  misc_feature (57)..(254): Homolog of NCBI NO: 15227065 NR Description: unknown protein
  misc_feature (54)..(237): Homolog of NCBI NO: 22325409 NR Description: similar to nucleoside triphosphatase, putative
  misc_feature (57)..(240): Homolog of NCBI NO: 18411826 NR Description: Expressed protein
  misc_feature (47)..(274): Homolog of NCBI NO: 25518349 NR Description: hypothetical protein T14P4.10 - Arabidopsis
  misc_feature (43)..(277): Homolog of NCBI NO: 34905532 NR Description: B1146F03.23 [Oryza sativa (japonica
FNTISQSSKGREAEEQQPIAAHGDSQSQRARRGIREIGGRRMMERQDEAWCSCSPRQCRICHEEERDDGCVTATATATAMESPCGCSGSLKYAHRGCVQRWCDEKGSTVCEICLQNYEPGYTAAPKKTQVAHVAVTIRGSLEVPRQDYEAPEHAPLIGLDAAAGDPAYAECASAAGRSAAWCRSVTVTFTVVLLLRHLIALVTVGAANQYAFSLLTIYLLRASGILLPFYVLMRLISAVQHGQMQYRLQMLQEQRRNASRMQHRVPGQGQRQHVILVV

SEQ ID NO: 63206 - protein, 237 aa, Triticum aestivum
  peptide (1)..(237): Ceres Seq. ID no. 12587068
  misc_feature (17)..(72): Pfam Name: Zinc finger, C3HC4 type (RING finger) Pfam Description: Zinc finger, C3HC4 type (RING finger)
  misc_feature (10)..(199): Homolog of NCBI NO: 15240828 NR Description: putative protein; protein id: At5g38070.1
  misc_feature (16)..(231): Homolog of NCBI NO: 18424590 NR Description: expressed protein
  misc_feature (13)..(225): Homolog of NCBI NO: 26451292 NR Description: unknown protein [Arabidopsis thaliana]
  misc_feature (13)..(225): Homolog of NCBI NO: 21537046 NR Description: nucleoside triphosphatase, putative [Arabidopsis
  misc_feature (13)..(225): Homolog of NCBI NO: 15223693 NR Description: nucleoside triphosphatase, putative
  misc_feature (16)..(213): Homolog of NCBI NO: 15227065 NR Description: unknown protein
  misc_feature (13)..(196): Homolog of NCBI NO: 22325409 NR Description: similar to nucleoside triphosphatase, putative
  misc_feature (16)..(199): Homolog of NCBI NO: 18411826 NR Description: Expressed protein
  misc_feature (6)..(233): Homolog of NCBI NO: 25518349 NR Description: hypothetical protein T14P4.10 - Arabidopsis
  misc_feature (2)..(236): Homolog of NCBI NO: 34905532 NR Description: B1146F03.23 [Oryza sativa (japonica
MMERQDEAWCSCSPRQCRICHEEERDDGCVTATATATAMESPCGCSGSLKYAHRGCVQRWCDEKGSTVCEICLQNYEPGYTAAPKKTQVAHVAVTIRGSLEVPRQDYEAPEHAPLIGLDAAAGDPAYAECASAAGRSAAWCRSVTVTFTVVLLLRHLIALVTVGAANQYAFSLLTIYLLRASGILLPFYVLMRLISAVQHGQMQYRLQMLQEQRRNASRMQHRVPGQGQRQHVILVV

SEQ ID NO: 63207 - protein, 236 aa, Triticum aestivum
  peptide (1)..(236): Ceres Seq. ID no. 12587069
  misc_feature (16)..(71): Pfam Name: Zinc finger, C3HC4 type (RING finger) Pfam Description: Zinc finger, C3HC4 type (RING finger)
  misc_feature (9)..(198): Homolog of NCBI NO: 15240828 NR Description: putative protein; protein id: At5g38070.1
  misc_feature (15)..(230): Homolog of NCBI NO: 18424590 NR Description: expressed protein
  misc_feature (12)..(224): Homolog of NCBI NO: 21537046 NR Description: nucleoside triphosphatase, putative [Arabidopsis
  misc_feature (12)..(224): Homolog of NCBI NO: 26451292 NR Description: unknown protein [Arabidopsis thaliana]
  misc_feature (12)..(224): Homolog of NCBI NO: 15223693 NR Description: nucleoside triphosphatase, putative
  misc_feature (15)..(212): Homolog of NCBI NO: 15227065 NR Description: unknown protein
  misc_feature (12)..(195): Homolog of NCBI NO: 22325409 NR Description: similar to nucleoside triphosphatase, putative
  misc_feature (15)..(198): Homolog of NCBI NO: 18411826 NR Description: Expressed protein
  misc_feature (5)..(232): Homolog of NCBI NO: 25518349 NR Description: hypothetical protein T14P4.10 - Arabidopsis
  misc_feature (1)..(235): Homolog of NCBI NO: 34905532 NR Description: B1146F03.23 [Oryza sativa (japonica
MERQDEAWCSCSPRQCRICHEEERDDGCVTATATATAMESPCGCSGSLKYAHRGCVQRWCDEKGSTVCEICLQNYEPGYTAAPKKTQVAHVAVTIRGSLEVPRQDYEAPEHAPLIGLDAAAGDPAYAECASAAGRSAAWCRSVTVTFTVVLLLRHLIALVTVGAANQYAFSLLTIYLLRASGILLPFYVLMRLISAVQHGQMQYRLQMLQEQRRNASRMQHRVPGQGQRQHVILVV

SEQ ID NO: 63208 - DNA, 1289 bp, Triticum aestivum
  misc_feature (1)..(1289): Ceres Seq. ID no. 14303612
ttcccctctcgcgcgcccgcccacgggatttcctcctccgccgccgccctccctccctccatcgtcagatctatccatccgtaagcaccccacctgctttccactcgatccgcgcgcccctcccgccgccgtcgccggcccttcatctgactccccccctcccctctccgcctcctcgccgctgcaggtgattccgtcgggggcgggccacatggcgtccacggctgcggcggcgctcgcggtgacggacgagctggccctgccgctccgcgcggtgggggacctggcggcggccgccggggtctcgcgggaggaggtcgtcgtcatcacgcagtgcgcctcgctcggtgggaagttgccttttgatgatgcatcggtgggtgctgttctatatgtcataaaaaatgtggagagctttggggataagttggttgctgaaattagccgagtgctgaaagctggtggaattgtgctggtacagagcttcacaccctctgctgatcagaagccaaacaattatatcgagcgccagctactcatgggaggttttgttgaagtgcaagcttctgccacaagctcgcaggatagtgtgcaatctgttactatcaaggcaaagaagccctcgtggagtatgggttcttccttccccctgaagaaagcagtaaaggctcttccaaagattgaaattgacgacgatgatgaactgattgacgaagacagcctcttgactgaggaggacttgaagaagccacagcttccagttgtaggagattgtgaggtgggagctacaaagaaggcatgcaagaactgcagttgtggcagggccgaggctgagcaggtggagaagctggggctcactgcagaacagattgataaccctgtctcagcttgtggcagttgtgggttgggcgacgccttccgatgcagcacctgcccatacagaggcctggcgccgttcaagttgggcgagaaggttaccttgtctgacaacttcctctcggccgacatatgatgacggacagcagctgcggatatgaaatgtgccttgttggatttgttggttcgttaggaagatatatctgcgtacgtttttttcgtggtgatggtggttacagcaaaagaagagtgcgtttggagtagcagctcgtgttagcatgtcgtgcgtgtccttgctctcccacctaggctgaagcgagaattggatcgtgtgtgcgcctctgtattcggcaagaagattacatgcatgtaatttgacgaagaaacatatgatggaaagactttgatctgcc

SEQ ID NO: 63209 - protein, 336 aa, Triticum aestivum
  peptide (1)..(336): Ceres Seq. ID no. 14303613
  misc_feature (180)..(328): Pfam Name: Protein of unknown function (DUF689) Pfam Description: Protein of unknown function (DUF689)
  misc_feature (127)..(332): Homolog of NCBI NO: 3252825 NR Description: Unknown gene product [Homo sapiens]
  misc_feature (141)..(331): Homolog of NCBI NO: 17555168 NR Description: PRO0915 like (25.6 kD) (3I468) [Caenorhabditis
  misc_feature (132)..(336): Homolog of NCBI NO: 31237546 NR Description: ENSANGP00000013898 [Anopheles gambiae]
  misc_feature (138)..(336): Homolog of NCBI NO: 17933742 NR Description: lethal (2) 35Bg CG4180-PA [Drosophila
  misc_feature (132)..(336): Homolog of NCBI NO: 2293332 NR Description: unknown [Dictyostelium discoideum]
  misc_feature (79)..(336): Homolog of NCBI NO: 19424097 NR Description: unknown protein [Arabidopsis thaliana]
  misc_feature (79)..(336): Homolog of NCBI NO: 30686798 NR Description: expressed protein [Arabidopsis thaliana]
  misc_feature (79)..(336): Homolog of NCBI NO: 18418605 NR Description: expressed protein [Arabidopsis thaliana]
  misc_feature (71)..(336): Homolog of NCBI NO: 32488638 NR Description: OSJNBa0032F06.14 [Oryza sativa (japonica
  misc_feature (71)..(336): Homolog of NCBI NO: 38344920 NR Description: OSJNBa0018M05.11 [Oryza sativa (japonica
SPLARPPTGFPPPPPPSLPPSSDLSIRKHPTCFPLDPRAPPAAVAGPSSDSPPPLSASSPLQVIPSGAGHMASTAAAALAVTDELALPLRAVGDLAAAAGVSREEVVVITQCASLGGKLPFDDASVGAVLYVIKNVESFGDKLVAEISRVLKAGGIVLVQSFTPSADQKPNNYIERQLLMGGFVEVQASATSSQDSVQSVTIKAKKPSWSMGSSFPLKKAVKALPKIEIDDDDELIDEDSLLTEEDLKKPQLPVVGDCEVGATKKACKNCSCGRAEAEQVEKLGLTAEQIDNPVSACGSCGLGDAFRCSTCPYRGLAPFKLGEKVTLSDNFLSADI

SEQ ID NO: 63210 - protein, 266 aa, Triticum aestivum
  peptide (1)..(266): Ceres Seq. ID no. 14303614
  misc_feature (110)..(258): Pfam Name: Protein of unknown function (DUF689) Pfam Description: Protein of unknown function (DUF689)
  misc_feature (57)..(262): Homolog of NCBI NO: 3252825 NR Description: Unknown gene product [Homo sapiens]
  misc_feature (71)..(261): Homolog of NCBI NO: 17555168 NR Description: PRO0915 like (25.6 kD) (3I468) [Caenorhabditis
  misc_feature (62)..(266): Homolog of NCBI NO: 31237546 NR Description: ENSANGP00000013898 [Anopheles gambiae]
  misc_feature (68)..(266): Homolog of NCBI NO: 17933742 NR Description: lethal (2) 35Bg CG4180-PA [Drosophila
  misc_feature (62)..(266): Homolog of NCBI NO: 2293332 NR Description: unknown [Dictyostelium discoideum]
  misc_feature (9)..(266): Homolog of NCBI NO: 19424097 NR Description: unknown protein [Arabidopsis thaliana]
  misc_feature (9)..(266): Homolog of NCBI NO: 30686798 NR Description: expressed protein [Arabidopsis thaliana]
  misc_feature (9)..(266): Homolog of NCBI NO: 18418605 NR Description: expressed protein [Arabidopsis thaliana]
  misc_feature (1)..(266): Homolog of NCBI NO: 32488638 NR Description: OSJNBa0032F06.14 [Oryza sativa (japonica
  misc_feature (1)..(266): Homolog of NCBI NO: 38344920 NR Description: OSJNBa0018M05.11 [Oryza sativa (japonica
MASTAAAALAVTDELALPLRAVGDLAAAAGVSREEVVVITQCASLGGKLPFDDASVGAVLYVIKNVESFGDKLVAEISRVLKAGGIVLVQSFTPSADQKPNNYIERQLLMGGFVEVQASATSSQDSVQSVTIKAKKPSWSMGSSFPLKKAVKALPKIEIDDDDELIDEDSLLTEEDLKKPQLPVVGDCEVGATKKACKNCSCGRAEAEQVEKLGLTAEQIDNPVSACGSCGLGDAFRCSTCPYRGLAPFKLGEKVTLSDNFLSADI

SEQ ID NO: 63211 - DNA, 1027 bp, Triticum aestivum
  misc_feature (1)..(1027): Ceres Seq. ID no. 12564952
gtacaggtaacatcaaattccctcttcgtagtctggaggcgggagattcggaagccatggcggaggagcagttcctggccgcagctgtgggcgccgccaagagcgccggcgagattatccgcaagagcttttacctaaccaagaatgtggagcacaagggccaggtggatttggtgacggagacggacaaggcctgcgaggatctcatcttcaaccacctccggatgctctacccggaccacaagttcatcggcgaggagacgtctgcagccctcggttccaccgatgacctcacctacgaccccacctggatagtcgaccccctcgatggcaccaccaatttcgttcatggctttccttttgtgtgcgtctcgattggcctcaccattgggaagattcccaccgttgcagttgtgtacaaccccatcatgaatgagcttttcacagctgttcgtggaaaaggtgcttttctcaatggttctccaattaaaacatcgcctcaaaatgagttggtgaaggctcttatggtgacagaggtagggaccaaaagagacaagtccactttggatgatacaaccaacagaattaataagttactattcaagattagatctatacgtatgtgtggctctttggctctaaacatgtgtggagttgcttgtggtaggctagatttgtgttatgagatcggttttggtggcccctgggatgtggctgctggagctttgattctaaaggaagctgggggttttgtttttgatccgagcggtgatgagtttgatctgatggcgcaaagaatggcaggatcaaatggccacctcaaggatcagttcatcaaagcattgggagatgcaagctgaataacttatttctcttttcaagtagaatgaaagaatgtaagatggccccaccaataagtaattaagggctaatttttgtgtagttttaagtggacactatatgcatattttgcaaacatggcggatgtaatgacatgtggatatattgctcgttttattgaccatgc

SEQ ID NO: 63212 - protein, 285 aa, Triticum aestivum
  peptide (1)..(285): Ceres Seq. ID no. 12564953
  misc_feature (28)..(281): Homolog of NCBI NO: 27805945 NR Description: inositol(myo)-1(or 4)-monophosphatase 1 [Bos
  misc_feature (22)..(281): Homolog of NCBI NO: 21357329 NR Description: CG9391-PA [Drosophila melanogaster]
  misc_feature (22)..(284): Homolog of NCBI NO: 30143277 NR Description: myo inositol monophosphatase isoform 2
  misc_feature (22)..(281): Homolog of NCBI NO: 30143275 NR Description: myo inositol monophosphatase isoform 1
  misc_feature (22)..(284): Homolog of NCBI NO: 1709204 NR Description: Inositol-1(or 4)-monophosphatase 2 (IMPase 2)
  misc_feature (22)..(281): Homolog of NCBI NO: 1709203 NR Description: Inositol-1(or 4)-monophosphatase 1 (IMPase 1)
  misc_feature (24)..(284): Homolog of NCBI NO: 3914097 NR Description: Inositol-1(or 4)-monophosphatase (IMPase) (IMP)
  misc_feature (22)..(281): Homolog of NCBI NO: 21553679 NR Description: putative myo-inositol monophosphatase
  misc_feature (15)..(281): Homolog of NCBI NO: 15232993 NR Description: putative myo-inositol monophosphatase
  misc_feature (22)..(283): Homolog of NCBI NO: 1709205 NR Description: Inositol-1(or 4)-monophosphatase 3 (IMPase 3)
TGNIKFPLRSLEAGDSEAMAEEQFLAAAVGAAKSAGEIIRKSFYLTKNVEHKGQVDLVTETDKACEDLIFNHLRMLYPDHKFIGEETSAALGSTDDLTYDPTWIVDPLDGTTNFVHGFPFVCVSIGLTIGKIPTVAVVYNPIMNELFTAVRGKGAFLNGSPIKTSPQNELVKALMVTEVGTKRDKSTLDDTTNRINKLLFKIRSIRMCGSLALNMCGVACGRLDLCYEIGFGGPWDVAAGALILKEAGGFVFDPSGDEFDLMAQRMAGSNGHLKDQFIKALGDAS

SEQ ID NO: 63213 - protein, 267 aa, Triticum aestivum
  peptide (1)..(267): Ceres Seq. ID no. 12564954
  misc_feature (10)..(263): Homolog of NCBI NO: 27805945 NR Description: inositol(myo)-1(or 4)-monophosphatase 1 [Bos
  misc_feature (4)..(263): Homolog of NCBI NO: 21357329 NR Description: CG9391-PA [Drosophila melanogaster]
  misc_feature (4)..(266): Homolog of NCBI NO: 30143277 NR Description: myo inositol monophosphatase isoform 2
  misc_feature (4)..(263): Homolog of NCBI NO: 30143275 NR Description: myo inositol monophosphatase isoform 1
  misc_feature (4)..(266): Homolog of NCBI NO: 1709204 NR Description: Inositol-1(or 4)-monophosphatase 2 (IMPase 2)
  misc_feature (4)..(263): Homolog of NCBI NO: 1709203 NR Description: Inositol-1(or 4)-monophosphatase 1 (IMPase 1)
  misc_feature (6)..(266): Homolog of NCBI NO: 3914097 NR Description: Inositol-1(or 4)-monophosphatase (IMPase) (IMP)
  misc_feature (4)..(263): Homolog of NCBI NO: 21553679 NR Description: putative myo-inositol monophosphatase
  misc_feature (1)..(263): Homolog of NCBI NO: 15232993 NR Description: putative myo-inositol monophosphatase
  misc_feature (4)..(265): Homolog of NCBI NO: 1709205 NR Description: Inositol-1(or 4)-monophosphatase 3 (IMPase 3)
MAEEQFLAAAVGAAKSAGEIIRKSFYLTKNVEHKGQVDLVTETDKACEDLIFNHLRMLYPDHKFIGEETSAALGSTDDLTYDPTWIVDPLDGTTNFVHGFPFVCVSIGLTIGKIPTVAVVYNPIMNELFTAVRGKGAFLNGSPIKTSPQNELVKALMVTEVGTKRDKSTLDDTTNRINKLLFKIRSIRMCGSLALNMCGVACGRLDLCYEIGFGGPWDVAAGALILKEAGGFVFDPSGDEFDLMAQRMAGSNGHLKDQFIKALGDAS

SEQ ID NO: 63214 - protein, 211 aa, Triticum aestivum
  peptide (1)..(211): Ceres Seq. ID no. 12564955
  misc_feature (1)..(207): Homolog of NCBI NO: 27805945 NR Description: inositol(myo)-1(or 4)-monophosphatase 1 [Bos
  misc_feature (1)..(207): Homolog of NCBI NO: 21357329 NR Description: CG9391-PA [Drosophila melanogaster]
  misc_feature (1)..(210): Homolog of NCBI NO: 30143277 NR Description: myo inositol monophosphatase isoform 2
  misc_feature (1)..(207): Homolog of NCBI NO: 30143275 NR Description: myo inositol monophosphatase isoform 1
  misc_feature (1)..(210): Homolog of NCBI NO: 1709204 NR Description: Inositol-1(or 4)-monophosphatase 2 (IMPase 2)
  misc_feature (1)..(207): Homolog of NCBI NO: 1709203 NR Description: Inositol-1(or 4)-monophosphatase 1 (IMPase 1)
  misc_feature (1)..(210): Homolog of NCBI NO: 3914097 NR Description: Inositol-1(or 4)-monophosphatase (IMPase) (IMP)
  misc_feature (1)..(207): Homolog of NCBI NO: 21553679 NR Description: putative myo-inositol monophosphatase
  misc_feature (1)..(207): Homolog of NCBI NO: 15232993 NR Description: putative myo-inositol monophosphatase
  misc_feature (1)..(209): Homolog of NCBI NO: 1709205 NR Description: Inositol-1(or 4)-monophosphatase 3 (IMPase 3)
MLYPDHKFIGEETSAALGSTDDLTYDPTWIVDPLDGTTNFVHGFPFVCVSIGLTIGKIPTVAVVYNPIMNELFTAVRGKGAFLNGSPIKTSPQNELVKALMVTEVGTKRDKSTLDDTTNRINKLLFKIRSIRMCGSLALNMCGVACGRLDLCYEIGFGGPWDVAAGALILKEAGGFVFDPSGDEFDLMAQRMAGSNGHLKDQFIKALGDAS

SEQ ID NO: 63215 - DNA, 1208 bp, Triticum aestivum
  misc_feature (1)..(1208): Ceres Seq. ID no. 12778054
acccgtccaccccctcgcgtattccgccgccacgccgccgcggcgcccttcccgccgtcgcgagccgtatctttcggcaacacacacacacaaagccgcccacacgccatggaggagaccgaggctaagaagcccacccccgcatcccccctcttctccttctccaaccccagcgcctccttcggcttcgggttcggcgccgcgcccggccctccccctccgcctccgccgccagctgtcgaggtcctcctctccgaggaatcacccgtcgcggccggcaacttggagcctgtggtggttgacgactccctatcgatctacaaggggagagttaacacctctgatgttttgggggtaaaaaactctgatttggttccaggaaaatatgaaggggggttgaaactgtgggaaggatcattggacttggtgaaaaccctaaattcagacatcaaagatgatcgattgcttatggaaggcaaacacgtactagagctaggatgtggacatggcctccctggcatctttgcaggtctgaagggtgctgctctagttcacttccaagatttcaatgctgaggtccttaggtgccttaccatcccaaatgtaaaagctaatctgttcaaggaatcatctgaaacatctaggagtgttggtttttatgctggtgattggagtgaaatcgacaagttacttcttcgcggagatgctgtccaggataaaacaaccaatcttcacacagaaaatgaagggcatagaggctacaatatcatcctgatggctgagactgtgtatgcattggattcacttcctagtctctacaggctcatcaagaagtgcttacactaccctagtggtgtagtttatatggcagggaaaaagcattactttggtgtaggtggcggcacaaggcaatttctacgcttggttacagaagatggtgccatgcagtcggacctgcttgctgaagttactgacggatcatccaatgttagggaggtttggaaattctcattcaagtagacaagcatggcctctgtgattgctgtatcagatacaaaacgtgtaccgggctccatattggtagagtgtgagccttggtttagccgtatcatggtgttttaatgcactgttagttccaagttgattgttcatgaactcttgagaagtcatacaagtacttgagtcctatctctgaattactgactctt

SEQ ID NO: 63216 - protein, 339 aa, Triticum aestivum
  peptide (1)..(339): Ceres Seq. ID no. 12778055
  misc_feature (253)..(339): Homolog of NCBI NO: 38346224 NR Description: OJ990528_30.4 [Oryza sativa (japonica
  misc_feature (76)..(231): Homolog of NCBI NO: 38346224 NR Description: OJ990528_30.4 [Oryza sativa (japonica
  misc_feature (223)..(339): Homolog of NCBI NO: 16226903 NR Description: At2g43320/T1O24.6 [Arabidopsis thaliana]
  misc_feature (76)..(231): Homolog of NCBI NO: 16226903 NR Description: At2g43320/T1O24.6 [Arabidopsis thaliana]
  misc_feature (223)..(339): Homolog of NCBI NO: 18406207 NR Description: expressed protein
  misc_feature (76)..(231): Homolog of NCBI NO: 18406207 NR Description: expressed protein
  misc_feature (209)..(315): Homolog of NCBI NO: 7485012 NR Description: hypothetical protein - Arabidopsis thaliana
  misc_feature (42)..(231): Homolog of NCBI NO: 7485012 NR Description: hypothetical protein - Arabidopsis thaliana
  misc_feature (42)..(339): Homolog of NCBI NO: 18414120 NR Description: expressed protein
  misc_feature (47)..(339): Homolog of NCBI NO: 21554662 NR Description: unknown [Arabidopsis thaliana]
TRPPPRVFRRHAAAAPFPPSRAVSFGNTHTQSRPHAMEETEAKKPTPASPLFSFSNPSASFGFGFGAAPGPPPPPPPPAVEVLLSEESPVAAGNLEPVVVDDSLSIYKGRVNTSDVLGVKNSDLVPGKYEGGLKLWEGSLDLVKTLNSDIKDDRLLMEGKHVLELGCGHGLPGIFAGLKGAALVHFQDFNAEVLRCLTIPNVKANLFKESSETSRSVGFYAGDWSEIDKLLLRGDAVQDKTTNLHTENEGHRGYNIILMAETVYALDSLPSLYRLIKKCLHYPSGVVYMAGKKHYFGVGGGTRQFLRLVTEDGAMQSDLLAEVTDGSSNVREVWKFSFK

SEQ ID NO: 63217 - protein, 303 aa, Triticum aestivum
  peptide (1)..(303): Ceres Seq. ID no. 12778056
  misc_feature (217)..(303): Homolog of NCBI NO: 38346224 NR Description: OJ990528_30.4 [Oryza sativa (japonica
  misc_feature (40)..(195): Homolog of NCBI NO: 38346224 NR Description: OJ990528_30.4 [Oryza sativa (japonica
  misc_feature (187)..(303): Homolog of NCBI NO: 16226903 NR Description: At2g43320/T1O24.6 [Arabidopsis thaliana]
  misc_feature (40)..(195): Homolog of NCBI NO: 16226903 NR Description: At2g43320/T1O24.6 [Arabidopsis thaliana]
  misc_feature (187)..(303): Homolog of NCBI NO: 18406207 NR Description: expressed protein
  misc_feature (40)..(195): Homolog of NCBI NO: 18406207 NR Description: expressed protein
  misc_feature (173)..(279): Homolog of NCBI NO: 7485012 NR Description: hypothetical protein - Arabidopsis thaliana
  misc_feature (6)..(195): Homolog of NCBI NO: 7485012 NR Description: hypothetical protein - Arabidopsis thaliana
  misc_feature (6)..(303): Homolog of NCBI NO: 18414120 NR Description: expressed protein
  misc_feature (11)..(303): Homolog of NCBI NO: 21554662 NR Description: unknown [Arabidopsis thaliana]
MEETEAKKPTPASPLFSFSNPSASFGFGFGAAPGPPPPPPPPAVEVLLSEESPVAAGNLEPVVVDDSLSIYKGRVNTSDVLGVKNSDLVPGKYEGGLKLWEGSLDLVKTLNSDIKDDRLLMEGKHVLELGCGHGLPGIFAGLKGAALVHFQDFNAEVLRCLTIPNVKANLFKESSETSRSVGFYAGDWSEIDKLLLRGDAVQDKTTNLHTENEGHRGYNIILMAETVYALDSLPSLYRLIKKCLHYPSGVVYMAGKKHYFGVGGGTRQFLRLVTEDGAMQSDLLAEVTDGSSNVREVWKFSFK

SEQ ID NO: 63218 - protein, 183 aa, Triticum aestivum
  peptide (1)..(183): Ceres Seq. ID no. 12778057
  misc_feature (97)..(183): Homolog of NCBI NO: 38346224 NR Description: OJ990528_30.4 [Oryza sativa (japonica
  misc_feature (1)..(75): Homolog of NCBI NO: 38346224 NR Description: OJ990528_30.4 [Oryza sativa (japonica
  misc_feature (67)..(183): Homolog of NCBI NO: 16226903 NR Description: At2g43320/T1O24.6 [Arabidopsis thaliana]
  misc_feature (1)..(75): Homolog of NCBI NO: 16226903 NR Description: At2g43320/T1O24.6 [Arabidopsis thaliana]
  misc_feature (67)..(183): Homolog of NCBI NO: 18406207 NR Description: expressed protein
  misc_feature (1)..(75): Homolog of NCBI NO: 18406207 NR Description: expressed protein
  misc_feature (53)..(159): Homolog of NCBI NO: 7485012 NR Description: hypothetical protein - Arabidopsis thaliana
  misc_feature (1)..(75): Homolog of NCBI NO: 7485012 NR Description: hypothetical protein - Arabidopsis thaliana
  misc_feature (1)..(183): Homolog of NCBI NO: 18414120 NR Description: expressed protein
  misc_feature (1)..(183): Homolog of NCBI NO: 21554662 NR Description: unknown [Arabidopsis thaliana]
MEGKHVLELGCGHGLPGIFAGLKGAALVHFQDFNAEVLRCLTIPNVKANLFKESSETSRSVGFYAGDWSEIDKLLLRGDAVQDKTTNLHTENEGHRGYNIILMAETVYALDSLPSLYRLIKKCLHYPSGVVYMAGKKHYFGVGGGTRQFLRLVTEDGAMQSDLLAEVTDGSSNVREVWKFSFK

SEQ ID NO: 63219 - DNA, 821 bp, Triticum aestivum
  misc_feature (1)..(821): Ceres Seq. ID no. 13655082
agaacatcctaatcgaaaaacaagaggaaacgagctagctagatagcatttggtacacagctacatacatatccggcacgagaggatgtcgttggtgaggttcttcgacaccctggccatggactcgtggaaccccttcggcaccatcttcggcaccacggcgtccagcggcaccgacgcctggctggccagcgacaccacggcgttcgccgacacctacatcgagacccgggagacggcggacgcctacgtcttcagcgccaggctccccgccggtgtcaccaaggaggaggtcaaggtggaggtggaggaggacggcaaggtgctggtcatcgccggcgagcggtgcctgcggagggaggccaagagcgaggcgcgccaccacatcgagcgcagcgtcgccaccttcttcggcaggttccacctccccgacgacgccgccttgggccaggtcagggccgccatggacgacgggggcgcgcagctcaccgtcactgtgcccagggtcggcgccgccgttgccgccgtgaccatgcccgagcctgccggggccatcgaggtcgtcgaggccagcccgtgctgattggctgattgcggcgtactccggtgccgactgcagacagagtgcagacatacgtgcggtaagttgccgctcgtatgatctgctcgatcgggtcctttgggtgtgattccacaaattgtggtgttcgatgtacgtaactacgtacttgagtcggtatgtggcttgctgttgtgacttgtgagtgaggtgcttgcatggttgcctgtactgttacttgttagttctcgtgttcacgctc

SEQ ID NO: 63220 - protein, 165 aa, Triticum aestivum
  peptide (1)..(165): Ceres Seq. ID no. 13655083
  misc_feature (7)..(140): Homolog of NCBI NO: 7441300 NR Description: probable heat shock protein - garden pea
  misc_feature (1)..(140): Homolog of NCBI NO: 7441298 NR Description: heat shock protein 17.0 - pearl millet
  misc_feature (1)..(159): Homolog of NCBI NO: 15408722 NR Description: putative 16.9 kDa heat shock protein
  misc_feature (1)..(140): Homolog of NCBI NO: 25044839 NR Description: class-1 LMW heat shock protein [Ananas comosus]
  misc_feature (7)..(156): Homolog of NCBI NO: 2911276 NR Description: LMW heat shock protein [Fragaria x ananassa]
  misc_feature (1)..(155): Homolog of NCBI NO: 7441297 NR Description: heat shock protein 16.9 - pearl millet
  misc_feature (1)..(159): Homolog of NCBI NO: 123543 NR Description: 16.9 KD CLASS I HEAT SHOCK PROTEIN
  misc_feature (1)..(159): Homolog of NCBI NO: 169799 NR Description: 16.9 kDa heat shock protein
  misc_feature (1)..(140): Homolog of NCBI NO: 100883 NR Description: heat shock protein 17.2 - maize
  misc_feature (1)..(164): Homolog of NCBI NO: 15408720 NR Description: P0443D08.1 [Oryza sativa (japonica
MSLVRFFDTLAMDSWNPFGTIFGTTASSGTDAWLASDTTAFADTYIETRETADAYVFSARLPAGVTKEEVKVEVEEDGKVLVIAGERCLRREAKSEARHHIERSVATFFGRFHLPDDAALGQVRAAMDDGGAQLTVTVPRVGAAVAAVTMPEPAGAIEVVEASPC

SEQ ID NO: 63221 - protein, 154 aa, Triticum aestivum
  peptide (1)..(154): Ceres Seq. ID no. 13655084
  misc_feature (1)..(129): Homolog of NCBI NO: 7441300 NR Description: probable heat shock protein - garden pea
  misc_feature (1)..(129): Homolog of NCBI NO: 7441298 NR Description: heat shock protein 17.0 - pearl millet
  misc_feature (1)..(148): Homolog of NCBI NO: 15408722 NR Description: putative 16.9 kDa heat shock protein
  misc_feature (1)..(129): Homolog of NCBI NO: 25044839 NR Description: class-1 LMW heat shock protein [Ananas comosus]
  misc_feature (1)..(145): Homolog of NCBI NO: 2911276 NR Description: LMW heat shock protein [Fragaria x ananassa]
  misc_feature (1)..(144): Homolog of NCBI NO: 7441297 NR Description: heat shock protein 16.9 - pearl millet
  misc_feature (1)..(148): Homolog of NCBI NO: 123543 NR Description: 16.9 KD CLASS I HEAT SHOCK PROTEIN
  misc_feature (1)..(148): Homolog of NCBI NO: 169799 NR Description: 16.9 kDa heat shock protein
  misc_feature (1)..(129): Homolog of NCBI NO: 100883 NR Description: heat shock protein 17.2 - maize
  misc_feature (1)..(153): Homolog of NCBI NO: 15408720 NR Description: P0443D08.1 [Oryza sativa (japonica
MDSWNPFGTIFGTTASSGTDAWLASDTTAFADTYIETRETADAYVFSARLPAGVTKEEVKVEVEEDGKVLVIAGERCLRREAKSEARHHIERSVATFFGRFHLPDDAALGQVRAAMDDGGAQLTVTVPRVGAAVAAVTMPEPAGAIEVVEASPC

SEQ ID NO: 63222 - DNA, 1139 bp, Triticum aestivum
  misc_feature (1)..(1139): Ceres Seq. ID no. 13655345
atcggatctccgaaccggaactctgactctctctgtctcctccccgtgccggacggcgaggtccccctcttcctccggccgcctctcccccccgttcccgtcgcttctcggttccacgggcgccgcggccgccggtctccgacgccatggggttcctcgaggacttccaggccagtgttgaaacattgccagctatgctgcacaagaactattcattaatgcgagagctcgataaaagcttgcaaggtgtgcagctggaaaatgagcagcgatgtcaacaagaaatagaggacattaagcatggacttgaatctggaagtattacaacatatgagccagcaaaacttaaattttctgatgaggcaatcgaggagcagaaacattgtgttaggattgctgatgagaaggtggctttagccacacaaacatatgacctggtcgacgctcatatccaacagcttgatcaatacatgaggaagcttgaagaacttcgactagaaaaggaggcagtggcagctgcagctgcagctgcggcagatacagctgttgctgctacttcagctgctcctgctggtgctggtagcttaaggtccgcagctgctgatcctgctccaaaaactggacgagctggcgaaagaagcagaggagggcggaagaaggctaaggtgcccacggagatgcctacagagatgcccatggagcagccagctatagatttagaattgcctgtcgatcctaatgaaccgacgtattgtttctgcaaccaagtcagctacggtgagatggtcgcgtgcgacaaccctgattgcaagatagagtggttccactttggatgcgtgggcttgaaagagcagccgaggggaaagtggtattgcctgagttgcagcgcgttccaaaagaagcgcaagggaaggtgagatacatatggtccttgtgctaggaggtatgcagtcagtcatccgtgatcgtctgattccgttgtgctgagcagcgccttgtttgtctgggaagcaactgttgaatgtagcttgagtgatcttgcacatgttgtgacagtcttgaggagtgttgtacatgtgtggccccgtttagaacatgggaatttcttctgttcttgtgggtgatgaactggtgactgc

SEQ ID NO: 63223 - protein, 256 aa, Triticum aestivum
  peptide (1)..(256): Ceres Seq. ID no. 13655346
  misc_feature (202)..(247): Pfam Name: PHD-finger Pfam Description: PHD-finger
  misc_feature (125)..(256): Homolog of NCBI NO: 10863865 NR Description: p47 [Mus musculus]
  misc_feature (3)..(243): Homolog of NCBI NO: 12002020 NR Description: brain my036 protein [Homo sapiens]
  misc_feature (1)..(120): Homolog of NCBI NO: 28278108 NR Description: Similar to inhibitor of growth family, member 3
  misc_feature (115)..(256): Homolog of NCBI NO: 28278108 NR Description: Similar to inhibitor of growth family, member 3
  misc_feature (3)..(253): Homolog of NCBI NO: 34858458 NR Description: similar to ING1-like protein
  misc_feature (125)..(256): Homolog of NCBI NO: 34855011 NR Description: similar to inhibitor of growth family, member 3
  misc_feature (1)..(120): Homolog of NCBI NO: 34855011 NR Description: similar to inhibitor of growth family, member 3
  misc_feature (3)..(253): Homolog of NCBI NO: 19111152 NR Description: ING1-like protein
  misc_feature (3)..(253): Homolog of NCBI NO: 26327491 NR Description: unnamed protein product [Mus musculus]
  misc_feature (1)..(256): Homolog of NCBI NO: 29367421 NR Description: putative PHD-finger protein
MGFLEDFQASVETLPAMLHKNYSLMRELDKSLQGVQLENEQRCQQEIEDIKHGLESGSITTYEPAKLKFSDEAIEEQKHCVRIADEKVALATQTYDLVDAHIQQLDQYMRKLEELRLEKEAVAAAAAAAADTAVAATSAAPAGAGSLRSAAADPAPKTGRAGERSRGGRKKAKVPTEMPTEMPMEQPAIDLELPVDPNEPTYCFCNQVSYGEMVACDNPDCKIEWFHFGCVGLKEQPRGKWYCLSCSAFQKKRKGR

SEQ ID NO: 63224 - protein, 240 aa, Triticum aestivum
  peptide (1)..(240): Ceres Seq. ID no. 13655347
  misc_feature (186)..(231): Pfam Name: PHD-finger Pfam Description: PHD-finger
  misc_feature (109)..(240): Homolog of NCBI NO: 10863865 NR Description: p47 [Mus musculus]
  misc_feature (1)..(227): Homolog of NCBI NO: 12002020 NR Description: brain my036 protein [Homo sapiens]
  misc_feature (1)..(104): Homolog of NCBI NO: 28278108 NR Description: Similar to inhibitor of growth family, member 3
  misc_feature (99)..(240): Homolog of NCBI NO: 28278108 NR Description: Similar to inhibitor of growth family, member 3
  misc_feature (1)..(237): Homolog of NCBI NO: 34858458 NR Description: similar to ING1-like protein
  misc_feature (109)..(240): Homolog of NCBI NO: 34855011 NR Description: similar to inhibitor of growth family, member 3
  misc_feature (1)..(104): Homolog of NCBI NO: 34855011 NR Description: similar to inhibitor of growth family, member 3
  misc_feature (1)..(237): Homolog of NCBI NO: 19111152 NR Description: ING1-like protein
  misc_feature (1)..(237): Homolog of NCBI NO: 26327491 NR Description: unnamed protein product [Mus musculus]
  misc_feature (1)..(240): Homolog of NCBI NO: 29367421 NR Description: putative PHD-finger protein
MLHKNYSLMRELDKSLQGVQLENEQRCQQEIEDIKHGLESGSITTYEPAKLKFSDEAIEEQKHCVRIADEKVALATQTYDLVDAHIQQLDQYMRKLEELRLEKEAVAAAAAAAADTAVAATSAAPAGAGSLRSAAADPAPKTGRAGERSRGGRKKAKVPTEMPTEMPMEQPAIDLELPVDPNEPTYCFCNQVSYGEMVACDNPDCKIEWFHFGCVGLKEQPRGKWYCLSCSAFQKKRKGR

SEQ ID NO: 63225 - protein, 232 aa, Triticum aestivum
  peptide (1)..(232): Ceres Seq. ID no. 13655348
  misc_feature (178)..(223): Pfam Name: PHD-finger Pfam Description: PHD-finger
  misc_feature (101)..(232): Homolog of NCBI NO: 10863865 NR Description: p47 [Mus musculus]
  misc_feature (1)..(219): Homolog of NCBI NO: 12002020 NR Description: brain my036 protein [Homo sapiens]
  misc_feature (1)..(96): Homolog of NCBI NO: 28278108 NR Description: Similar to inhibitor of growth family, member 3
  misc_feature (91)..(232): Homolog of NCBI NO: 28278108 NR Description: Similar to inhibitor of growth family, member 3
  misc_feature (1)..(229): Homolog of NCBI NO: 34858458 NR Description: similar to ING1-like protein
  misc_feature (101)..(232): Homolog of NCBI NO: 34855011 NR Description: similar to inhibitor of growth family, member 3
  misc_feature (1)..(96): Homolog of NCBI NO: 34855011 NR Description: similar to inhibitor of growth family, member 3
  misc_feature (1)..(229): Homolog of NCBI NO: 19111152 NR Description: ING1-like protein
  misc_feature (1)..(229): Homolog of NCBI NO: 26327491 NR Description: unnamed protein product [Mus musculus]
  misc_feature (1)..(232): Homolog of NCBI NO: 29367421 NR Description: putative PHD-finger protein
MRELDKSLQGVQLENEQRCQQEIEDIKHGLESGSITTYEPAKLKFSDEAIEEQKHCVRIADEKVALATQTYDLVDAHIQQLDQYMRKLEELRLEKEAVAAAAAAAADTAVAATSAAPAGAGSLRSAAADPAPKTGRAGERSRGGRKKAKVPTEMPTEMPMEQPAIDLELPVDPNEPTYCFCNQVSYGEMVACDNPDCKIEWFHFGCVGLKEQPRGKWYCLSCSAFQKKRKGR

SEQ ID NO: 63226 - DNA, 836 bp, Triticum aestivum
  misc_feature (1)..(836): Ceres Seq. ID no. 12585210
tctcctcttcttccccctcacgtctccatcaccttcttccacttctcccgcatttacacaccaccgcacgcagctagctagccacactcacactcccatccctctcacagcaccaccgcactagctagccacaccacaccgcactgcactcccgtcgctctcggccatggcgtcctacaggctgctcgtgatcctggtcttctccgcgctcctcctcggcgtcgcagtcggcgacacctacccggccgactgcccgtacccgtgcctgctgccgccgcccacgcccccggcctccagcgccgactgcccgccgccaccctcctcgccatccggctccggctacgtgtacccgcccccgtcctcctccgggaactccccgccgacgccgtcgtcctggagctacccgccaccgtctgggggctacattcccggcttctaccagcctcccgccggcgggggcggtggtggtggcggaggcggaggaggggctggcggcaacttcgggcctgcgccaccgccgccgaaccccatcctgccgtggtacccctggtactaccggtccccgccgtcctcgtccgcgaccaggcctggtcgcgcctcggcggtcgtgctctgcctggtggccgccgtgactgccgctgctgctctggtcggttactagtacgatcatcgatcaatcagttactagctaagctagcactcccatcacatttttcatttccgttcgtagtcgattcttgatatatactactccatgtacaatggggcaccattactatttagctatcctactcatcaactcctctgtattgattcattgctcagttggcttttgg

SEQ ID NO: 63227 - protein, 164 aa, Triticum aestivum
  peptide (1)..(164): Ceres Seq. ID no. 12585211
  misc_feature (36)..(94): Pfam Name: Extensin-like region Pfam Description: Extensin-like region
  misc_feature (37)..(118): Homolog of NCBI NO: 32422095 NR Description: predicted protein [Neurospora crassa]
  misc_feature (11)..(110): Homolog of NCBI NO: 33668156 NR Description: GPRP [Oryza sativa (indica cultivar-group)]
  misc_feature (37)..(118): Homolog of NCBI NO: 114248 NR Description: ANTHER-SPECIFIC PROTEIN SF18 PRECURSOR
  misc_feature (43)..(164): Homolog of NCBI NO: 18409730 NR Description: Expressed protein
  misc_feature (43)..(152): Homolog of NCBI NO: 18397707 NR Description: expressed protein
  misc_feature (32)..(162): Homolog of NCBI NO: 15220010 NR Description: unknown protein; protein id: At1g23050.1
  misc_feature (24)..(137): Homolog of NCBI NO: 15234820 NR Description: extensin like protein; protein id: At4g16140.1
  misc_feature (1)..(152): Homolog of NCBI NO: 18423010 NR Description: expressed protein
  misc_feature (27)..(160): Homolog of NCBI NO: 34894480 NR Description: OJ1116_C07.3 [Oryza sativa (japonica
  misc_feature (1)..(160): Homolog of NCBI NO: 34894212 NR Description: P0439B06.27 [Oryza sativa (japonica
MASYRLLVILVFSALLLGVAVGDTYPADCPYPCLLPPPTPPASSADCPPPPSSPSGSGYVYPPPSSSGNSPPTPSSWSYPPPSGGYIPGFYQPPAGGGGGGGGGGGGAGGNFGPAPPPPNPILPWYPWYYRSPPSSSATRPGRASAVVLCLVAAVTAAAALVGY

SEQ ID NO: 63228 - DNA, 620 bp, Triticum aestivum
  misc_feature (1)..(620): Ceres Seq. ID no. 12585212
cagatagcagagcgtccaggcccagggaagccacccctaatctcgaacagcacccaaagcagagccgccggggaggctgcggcgagctgccggagggagggaaggggagatggcgagccggctgtggaggtggtacgcggaccggcagttccacaagtgggagaagacggtgctgtgggacatggtggagccctaccgcccgccgcgctccttcgcgccgctcgtcggcacctacgtcgccgccttctacaccgccatcgtcggcgccgccgtcaccgagcagctctacaaggagaagtactgggaggatcacccgggcgaggcggtgccgatcatgccgcccatgttctactgggggccatggagggtggtgaacggagaggttccccgcttcatccagacgcccgaggaagctaagccggcatagaactgcttggagatcgctggggatgctgtgaaatgtttgctgttcactgtctgctgtgtagctatggcattcctgcatttcttgcaatttgcattctggtgattgcgcactgccgtgaatcataatggtctttctatgtatccttgtttgcacaaataaattgatatttctatcacggagcagattgtttgcc

SEQ ID NO: 63229 - protein, 138 aa, Triticum aestivum
  peptide (1)..(138): Ceres Seq. ID no. 12585213
QIAERPGPGKPPLISNSTQSRAAGEAAASCRREGRGDGEPAVEVVRGPAVPQVGEDGAVGHGGALPPAALLRAARRHLRRRLLHRHRRRRRHRAALQGEVLGGSPGRGGADHAAHVLLGAMEGGERRGSPLHPDARGS

SEQ ID NO: 63230 - protein, 123 aa, Triticum aestivum
  peptide (1)..(123): Ceres Seq. ID no. 12585214
DSRASRPREATPNLEQHPKQSRRGGCGELPEGGKGRWRAGCGGGTRTGSSTSGRRRCCGTWWSPTARRAPSRRSSAPTSPPSTPPSSAPPSPSSSTRRSTGRITRARRCRSCRPCSTGGHGGW

SEQ ID NO: 63231 - protein, 105 aa, Triticum aestivum
  peptide (1)..(105): Ceres Seq. ID no. 12585215
  misc_feature (3)..(87): Homolog of NCBI NO: 7487097 NR Description: hypothetical protein T16L4.170 - Arabidopsis
  misc_feature (3)..(91): Homolog of NCBI NO: 18417439 NR Description: putative protein
MASRLWRWYADRQFHKWEKTVLWDMVEPYRPPRSFAPLVGTYVAAFYTAIVGAAVTEQLYKEKYWEDHPGEAVPIMPPMFYWGPWRVVNGEVPRFIQTPEEAKPA

SEQ ID NO: 63232 - DNA, 839 bp, Triticum aestivum
  misc_feature (1)..(839): Ceres Seq. ID no. 13583909
acacactgaactgcttcagcttgttcttgttggttcacagacacttcccttctcacagtccattaagtccatggcgatgaggaagaacaaggttcacgagttcgaggccgatgtgcccgccgccgacctatgggggctctatggcacgctccgtgcagcggagctgctgcccgagcttctcccgcaggtgctcgccaagatacagctcgtgagcggcgacggcgacgtcggcaccatcttggagctcacattcgctccagggatccctggcctggagacatacagggagaaattcatcaaggtcgacaatgagaactacatcaaggaagcgcagacgattgacggagacatcctgaagctcgggttcctctattacatggtcaggttcgagatcatcgccaaaggacccagttcttcagtgataagatcgaccattgtgtatgagataaattatgaaactcaccccgggcttgaagctatggtcagcaccggacctctggctgcaactgctgagaaatttgcagggtacctcaaggagcagaagatcgctcagagcagttaattcttgcaacagctcagagcaaaagtgtatcaatgctttgagaaaaataatgtctgattccacgttgtgtgttttccctgaaaaaataaatgaccaatgatcaaacatattaggatagtatgtttgatcatatgaatatcacatagttgatatatagatatttcacggtccatgtaccttaactttattagtttcatgaaaatgaagttgggagccttgatgctccttttctcgaagaaatgtaccttaacttgttttggttaatgaaggtttgatt

SEQ ID NO: 63233 - protein, 186 aa, Triticum aestivum
  peptide (1)..(186): Ceres Seq. ID no. 13583910
  misc_feature (38)..(179): Pfam Name: Pathogenesis-related protein Bet v I family Pfam Description: Pathogenesis-related protein Bet v I family
  misc_feature (33)..(147): Homolog of NCBI NO: 27922941 NR Description: major allergen Mal d 1 [Malus x domestica]
  misc_feature (33)..(147): Homolog of NCBI NO: 7442194 NR Description: major allergen Mal d 1 - apple tree
  misc_feature (26)..(173): Homolog of NCBI NO: 9837528 NR Description: cytokinin-specific binding protein 1 [Lupinus
  misc_feature (31)..(184): Homolog of NCBI NO: 6466176 NR Description: putative intracellular pathogenesis-related
  misc_feature (28)..(184): Homolog of NCBI NO: 6466174 NR Description: putative intracellular pathogenesis-related
  misc_feature (31)..(160): Homolog of NCBI NO: 730048 NR Description: Major pollen allergen Car b 1 isoforms 1A and 1B
  misc_feature (31)..(160): Homolog of NCBI NO: 402743 NR Description: Car b I [Carpinus betulus]
  misc_feature (38)..(179): Homolog of NCBI NO: 3510542 NR Description: intracellular pathogenesis-related protein
  misc_feature (26)..(181): Homolog of NCBI NO: 38347062 NR Description: OSJNBa0006A01.3 [Oryza sativa (japonica
  misc_feature (26)..(186): Homolog of NCBI NO: 38347061 NR Description: OSJNBa0006A01.2 [Oryza sativa (japonica
HTELLQLVLVGSQTLPFSQSIKSMAMRKNKVHEFEADVPAADLWGLYGTLRAAELLPELLPQVLAKIQLVSGDGDVGTILELTFAPGIPGLETYREKFIKVDNENYIKEAQTIDGDILKLGFLYYMVRFEIIAKGPSSSVIRSTIVYEINYETHPGLEAMVSTGPLAATAEKFAGYLKEQKIAQSS

SEQ ID NO: 63234 - protein, 163 aa, Triticum aestivum
  peptide (1)..(163): Ceres Seq. ID no. 13583911
  misc_feature (15)..(156): Pfam Name: Pathogenesis-related protein Bet v I family Pfam Description: Pathogenesis-related protein Bet v I family
  misc_feature (10)..(124): Homolog of NCBI NO: 27922941 NR Description: major allergen Mal d 1 [Malus x domestica]
  misc_feature (10)..(124): Homolog of NCBI NO: 7442194 NR Description: major allergen Mal d 1 - apple tree
  misc_feature (3)..(150): Homolog of NCBI NO: 9837528 NR Description: cytokinin-specific binding protein 1 [Lupinus
  misc_feature (8)..(161): Homolog of NCBI NO: 6466176 NR Description: putative intracellular pathogenesis-related
  misc_feature (5)..(161): Homolog of NCBI NO: 6466174 NR Description: putative intracellular pathogenesis-related
  misc_feature (8)..(137): Homolog of NCBI NO: 730048 NR Description: Major pollen allergen Car b 1 isoforms 1A and 1B
  misc_feature (8)..(137): Homolog of NCBI NO: 402743 NR Description: Car b I [Carpinus betulus]
  misc_feature (15)..(156): Homolog of NCBI NO: 3510542 NR Description: intracellular pathogenesis-related protein
  misc_feature (3)..(158): Homolog of NCBI NO: 38347062 NR Description: OSJNBa0006A01.3 [Oryza sativa (japonica
  misc_feature (3)..(163): Homolog of NCBI NO: 38347061 NR Description: OSJNBa0006A01.2 [Oryza sativa (japonica
MAMRKNKVHEFEADVPAADLWGLYGTLRAAELLPELLPQVLAKIQLVSGDGDVGTILELTFAPGIPGLETYREKFIKVDNENYIKEAQTIDGDILKLGFLYYMVRFEIIAKGPSSSVIRSTIVYEINYETHPGLEAMVSTGPLAATAEKFAGYLKEQKIAQSS

SEQ ID NO: 63235 - protein, 161 aa, Triticum aestivum
  peptide (1)..(161): Ceres Seq. ID no. 13583912
  misc_feature (13)..(154): Pfam Name: Pathogenesis-related protein Bet v I family Pfam Description: Pathogenesis-related protein Bet v I family
  misc_feature (8)..(122): Homolog of NCBI NO: 27922941 NR Description: major allergen Mal d 1 [Malus x domestica]
  misc_feature (8)..(122): Homolog of NCBI NO: 7442194 NR Description: major allergen Mal d 1 - apple tree
  misc_feature (1)..(148): Homolog of NCBI NO: 9837528 NR Description: cytokinin-specific binding protein 1 [Lupinus
  misc_feature (6)..(159): Homolog of NCBI NO: 6466176 NR Description: putative intracellular pathogenesis-related
  misc_feature (3)..(159): Homolog of NCBI NO: 6466174 NR Description: putative intracellular pathogenesis-related
  misc_feature (6)..(135): Homolog of NCBI NO: 730048 NR Description: Major pollen allergen Car b 1 isoforms 1A and 1B
  misc_feature (6)..(135): Homolog of NCBI NO: 402743 NR Description: Car b I [Carpinus betulus]
  misc_feature (13)..(154): Homolog of NCBI NO: 3510542 NR Description: intracellular pathogenesis-related protein
  misc_feature (1)..(156): Homolog of NCBI NO: 38347062 NR Description: OSJNBa0006A01.3 [Oryza sativa (japonica
  misc_feature (1)..(161): Homolog of NCBI NO: 38347061 NR Description: OSJNBa0006A01.2 [Oryza sativa (japonica
MRKNKVHEFEADVPAADLWGLYGTLRAAELLPELLPQVLAKIQLVSGDGDVGTILELTFAPGIPGLETYREKFIKVDNENYIKEAQTIDGDILKLGFLYYMVRFEIIAKGPSSSVIRSTIVYEINYETHPGLEAMVSTGPLAATAEKFAGYLKEQKIAQSS

SEQ ID NO: 63236 - DNA, 614 bp, Triticum aestivum
  misc_feature (1)..(614): Ceres Seq. ID no. 13590229
cctcgttgaaatgcttagaagaggagaaacgccccctcgtggcacccagaacccagagcggaaaaactgtggtcctgctggagggatgaccaccttgctaggcgagccaaagcctcccccatgcagggacctggatgcctgctaggtttgctttgagttgcaagcacacaaataagtaggcccggtcgcactgtatgttgcggaaaccgcgaaagcgatttgatctcctgttgttctcaaagctttcttgtggccaacaatggacattcgatttgattgatcttgttgttgtcgaagctttcttttgtctgacaattggatgcgtctacctgtcacacaccatctcttcttttttccttatcatcagctagactgcccactgataagatagtgctattctgaagctgcagctttgtatccggcataagaatctggggcactagatcgattgctgttatgctactcctgcagtgttatattcctgttgttcatgcattaatgtttgaatgaacacggacctggtacattgccgattttcggggagaaactttttgatatactaattttcttattctgtcattgtattaaacatcaatttatgtggtgtgtactgc

SEQ ID NO: 63237 - protein, 58 aa, Triticum aestivum
  peptide (1)..(58): Ceres Seq. ID no. 13590230
MLRKPRKRFDLLLFSKLSCGQQWTFDLIDLVVVEAFFCLTIGCVYLSHTISSFFLIIS

SEQ ID NO: 63238 - protein, 47 aa, Triticum aestivum
  peptide (1)..(47): Ceres Seq. ID no. 13590231
  misc_feature (1)..(47): Homolog of NCBI NO: 18411985 NR Description: predicted NADH dehydrogenase 24 kD subunit
  misc_feature (1)..(47): Homolog of NCBI NO: 6647650 NR Description: NADH-ubiquinone oxidoreductase 24 kDa subunit,
LVEMLRRGETPPRGTQNPERKNCGPAGGMTTLLGEPKPPPCRDLDAC

SEQ ID NO: 63239 - protein, 44 aa, Triticum aestivum
  peptide (1)..(44): Ceres Seq. ID no. 13590232
  misc_feature (1)..(44): Homolog of NCBI NO: 18411985 NR Description: predicted NADH dehydrogenase 24 kD subunit
  misc_feature (1)..(44): Homolog of NCBI NO: 6647650 NR Description: NADH-ubiquinone oxidoreductase 24 kDa subunit,
MLRRGETPPRGTQNPERKNCGPAGGMTTLLGEPKPPPCRDLDAC

SEQ ID NO: 63240 - DNA, 875 bp, Triticum aestivum
  misc_feature (1)..(875): Ceres Seq. ID no. 13583760
atcccgtcgctactcgcccatccccttcgccgcagcgccgccgcctctgatctccaccctcctcgacgcggcgactctgctttacgcccttacgcggcggaggcaaacagatcaaggataacacaaaatcatactttgaagaggtgtcttgtgccaatcactggaataatgactccgtcggcatctgttggaaaggaagtcaacttgaaggaagtcaacttcaacttgaaggaggataagaacataccctgtgctattcagtttgtaacgacgatgttggggacgtcttcaacattgacgatcggggaccggaacaagaagttcagggtgagccgttcttcgacttggataacggttgtcttcacacagtctatgttcattgccaccacagcaggttggatctacgacatgtataataaacctatctggaatgccggcttcccatggtggctgccagttgctgtgttgttgggcgcctacctggcagtggtagacctggcgcgtgggtatttgaccctcttcgtgccacaggcacccttggcggcatggaatgcacttgacgaagttggcttcaaggtgattggattttctgtcatcttaatctctgtccctgttttcttgtttgaccaggcgtggctgcacatcacctttgcttgccttcttagtgtcctcattgctaccatacttgccttctgtgtctgtcttgttcgcacgtaccggcaatagccctcttggcacctagcggctttgtttatggtttggatgtcgtttgctagtagacgaataagcttgtctctccaagccaaagtcgccccttttgtgtaaacagtcggtgccactcatgtgttgttgttgttattattattattattatt

SEQ ID NO: 63241 - protein, 241 aa, Triticum aestivum
  peptide (1)..(241): Ceres Seq. ID no. 13583761
  misc_feature (98)..(239): Homolog of NCBI NO: 15528714 NR Description: P0583G08.15 [Oryza sativa (japonica
  misc_feature (99)..(239): Homolog of NCBI NO: 34910720 NR Description: P0690B02.24 [Oryza sativa (japonica
IPSLLAHPLRRSAAASDLHPPRRGDSALRPYAAEANRSRITQNHTLKRCLVPITGIMTPSASVGKEVNLKEVNFNLKEDKNIPCAIQFVTTMLGTSSTLTIGDRNKKFRVSRSSTWITVVFTQSMFIATTAGWIYDMYNKPIWNAGFPWWLPVAVLLGAYLAVVDLARGYLTLFVPQAPLAAWNALDEVGFKVIGFSVILISVPVFLFDQAWLHITFACLLSVLIATILAFCVCLVRTYRQ

SEQ ID NO: 63242 - protein, 185 aa, Triticum aestivum
  peptide (1)..(185): Ceres Seq. ID no. 13583762
  misc_feature (42)..(183): Homolog of NCBI NO: 15528714 NR Description: P0583G08.15 [Oryza sativa (japonica
  misc_feature (43)..(183): Homolog of NCBI NO: 34910720 NR Description: P0690B02.24 [Oryza sativa (japonica
MTPSASVGKEVNLKEVNFNLKEDKNIPCAIQFVTTMLGTSSTLTIGDRNKKFRVSRSSTWITVVFTQSMFIATTAGWIYDMYNKPIWNAGFPWWLPVAVLLGAYLAVVDLARGYLTLFVPQAPLAAWNALDEVGFKVIGFSVILISVPVFLFDQAWLHITFACLLSVLIATILAFCVCLVRTYRQ

SEQ ID NO: 63243 - protein, 150 aa, Triticum aestivum
  peptide (1)..(150): Ceres Seq. ID no. 13583763
  misc_feature (7)..(148): Homolog of NCBI NO: 15528714 NR Description: P0583G08.15 [Oryza sativa (japonica
  misc_feature (8)..(148): Homolog of NCBI NO: 34910720 NR Description: P0690B02.24 [Oryza sativa (japonica
MLGTSSTLTIGDRNKKFRVSRSSTWITVVFTQSMFIATTAGWIYDMYNKPIWNAGFPWWLPVAVLLGAYLAVVDLARGYLTLFVPQAPLAAWNALDEVGFKVIGFSVILISVPVFLFDQAWLHITFACLLSVLIATILAFCVCLVRTYRQ

SEQ ID NO: 63244 - DNA, 1403 bp, Triticum aestivum
  misc_feature (1)..(1403): Ceres Seq. ID no. 14302317
atcaattattgtatccaaacagatctagaagagaagctgatcttctccttccttcggcaccctctccttccctgatccacctactactccttctctcttcctcctagatcctgatcgggtacgttacagacgcgctggccatggcttcccctcgccatcgccaggacggagacggaccacacgacggcgcgccgacgtacgccggcatggcgaagctggtgccggcgctcccgctcgagacgcggtgcccgccgttcgcgctgcggcgctacggcggcttctggctgccggaggcggccctgcggcgcggcctcccggcgttgcacgccgggttcgcgcccaggcgcgcagacgtgctcctcgccagctaccccaagtccggcaccacctggctcaaggccctcgccttcgccaccgtccgccgcgccgtgcacccgccttcttccatcgaccacccgctccgccgtcgcaacccgcaggactgcgtcccgttcctcgagttcgacttcgaccacggggacatggccgagctcgaggcgctcccttccccgcgggtgctcgccacgcacctcccctactcgctcctccccgaccgcgtcgtcgccgacgacggcgcgcggatcgtgtacgtctgccgggaccccaaggacgcgctggtctcctcgtggctcttcaccaggaaagcgtcgccgagtgtcggagtggactccgactcctactcgctgcaggaggcggccgagcttttccgcgagggccggtgcttctacggccctcagtgccggcacgtgctcgagtactgggacgcgagccgccgtcccttcggcggcggcgaggtgctgttcctgaggtacgaggagatgctgcgcgacccggcggggagtctgaagacgatggcggagttcatgggatgcggcttctccgaggaggaggtggcgcgaggggtggtggacgagatcgtggacctgtgcagcctggagaagctgaagaacatggaggccaacagggacgggcggcggaacgcgtcgggcatcaggagcgactctttcttccggaagggggtcgccggggactggagcagccacatgtcgccggagatggggaagatgctggacgaggccgtcgaggaggcactccaggggtctgggttcagcttctctggctgagctccggcgagcactggccagggcggtagtgcggggcaaacaacaatgtcattgcaaagcacggcttggaacacatgttttgtggcgatccatggatttaaggcgcgagtttgattccagtttcttgctcgaaagttgattgtcttgtaagttcaaacagtagtttgataactcattccaaatgtttctttcccaaagttccgaatcattccagttctacaatttcagtcctcattcagc

SEQ ID NO: 63245 - protein, 340 aa, Triticum aestivum
  peptide (1)..(340): Ceres Seq. ID no. 14302318
  misc_feature (70)..(335): Pfam Name: Sulfotransferase domain Pfam Description: Sulfotransferase domain
  misc_feature (3)..(340): Homolog of NCBI NO: 38344441 NR Description: OSJNBa0038O10.13 [Oryza sativa (japonica
  misc_feature (26)..(335): Homolog of NCBI NO: 21593660 NR Description: putative flavonol sulfotransferase [Arabidopsis
  misc_feature (26)..(335): Homolog of NCBI NO: 15221130 NR Description: sulfotransferase family [Arabidopsis thaliana]
  misc_feature (44)..(337): Homolog of NCBI NO: 34905060 NR Description: putative flavonol 4'-sulfotransferase
  misc_feature (25)..(338): Homolog of NCBI NO: 37531912 NR Description: putative flavonol 3-sulfotransferase
  misc_feature (37)..(321): Homolog of NCBI NO: 34393650 NR Description: putative flavonol 3-sulfotransferase
  misc_feature (36)..(335): Homolog of NCBI NO: 35215145 NR Description: putative flavonol 3'-sulfotransferase
  misc_feature (25)..(335): Homolog of NCBI NO: 38346451 NR Description: OSJNBa0018J19.12 [Oryza sativa (japonica
  misc_feature (23)..(337): Homolog of NCBI NO: 40253319 NR Description: putative flavonol 3-sulfotransferase
  misc_feature (41)..(337): Homolog of NCBI NO: 40253317 NR Description: putative flavonol 3-sulfotransferase
MASPRHRQDGDGPHDGAPTYAGMAKLVPALPLETRCPPFALRRYGGFWLPEAALRRGLPALHAGFAPRRADVLLASYPKSGTTWLKALAFATVRRAVHPPSSIDHPLRRRNPQDCVPFLEFDFDHGDMAELEALPSPRVLATHLPYSLLPDRVVADDGARIVYVCRDPKDALVSSWLFTRKASPSVGVDSDSYSLQEAAELFREGRCFYGPQCRHVLEYWDASRRPFGGGEVLFLRYEEMLRDPAGSLKTMAEFMGCGFSEEEVARGVVDEIVDLCSLEKLKNMEANRDGRRNASGIRSDSFFRKGVAGDWSSHMSPEMGKMLDEAVEEALQGSGFSFSG

SEQ ID NO: 63246 - protein, 318 aa, Triticum aestivum
  peptide (1)..(318): Ceres Seq. ID no. 14302319
  misc_feature (48)..(313): Pfam Name: Sulfotransferase domain Pfam Description: Sulfotransferase domain
  misc_feature (1)..(318): Homolog of NCBI NO: 38344441 NR Description: OSJNBa0038O10.13 [Oryza sativa (japonica
  misc_feature (4)..(313): Homolog of NCBI NO: 21593660 NR Description: putative flavonol sulfotransferase [Arabidopsis
  misc_feature (4)..(313): Homolog of NCBI NO: 15221130 NR Description: sulfotransferase family [Arabidopsis thaliana]
  misc_feature (22)..(315): Homolog of NCBI NO: 34905060 NR Description: putative flavonol 4'-sulfotransferase
  misc_feature (3)..(316): Homolog of NCBI NO: 37531912 NR Description: putative flavonol 3-sulfotransferase
  misc_feature (15)..(299): Homolog of NCBI NO: 34393650 NR Description: putative flavonol 3-sulfotransferase
  misc_feature (14)..(313): Homolog of NCBI NO: 35215145 NR Description: putative flavonol 3'-sulfotransferase
  misc_feature (3)..(313): Homolog of NCBI NO: 38346451 NR Description: OSJNBa0018J19.12 [Oryza sativa (japonica
  misc_feature (1)..(315): Homolog of NCBI NO: 40253319 NR Description: putative flavonol 3-sulfotransferase
  misc_feature (19)..(315): Homolog of NCBI NO: 40253317 NR Description: putative flavonol 3-sulfotransferase
MAKLVPALPLETRCPPFALRRYGGFWLPEAALRRGLPALHAGFAPRRADVLLASYPKSGTTWLKALAFATVRRAVHPPSSIDHPLRRRNPQDCVPFLEFDFDHGDMAELEALPSPRVLATHLPYSLLPDRVVADDGARIVYVCRDPKDALVSSWLFTRKASPSVGVDSDSYSLQEAAELFREGRCFYGPQCRHVLEYWDASRRPFGGGEVLFLRYEEMLRDPAGSLKTMAEFMGCGFSEEEVARGVVDEIVDLCSLEKLKNMEANRDGRRNASGIRSDSFFRKGVAGDWSSHMSPEMGKMLDEAVEEALQGSGFSFSG

SEQ ID NO: 63247 - protein, 213 aa, Triticum aestivum
  peptide (1)..(213): Ceres Seq. ID no. 14302320
  misc_feature (1)..(208): Pfam Name: Sulfotransferase domain Pfam Description: Sulfotransferase domain
  misc_feature (1)..(213): Homolog of NCBI NO: 38344441 NR Description: OSJNBa0038O10.13 [Oryza sativa (japonica
  misc_feature (1)..(208): Homolog of NCBI NO: 21593660 NR Description: putative flavonol sulfotransferase [Arabidopsis
  misc_feature (1)..(208): Homolog of NCBI NO: 15221130 NR Description: sulfotransferase family [Arabidopsis thaliana]
  misc_feature (1)..(210): Homolog of NCBI NO: 34905060 NR Description: putative flavonol 4'-sulfotransferase
  misc_feature (1)..(211): Homolog of NCBI NO: 37531912 NR Description: putative flavonol 3-sulfotransferase
  misc_feature (1)..(194): Homolog of NCBI NO: 34393650 NR Description: putative flavonol 3-sulfotransferase
  misc_feature (1)..(208): Homolog of NCBI NO: 35215145 NR Description: putative flavonol 3'-sulfotransferase
  misc_feature (1)..(208): Homolog of NCBI NO: 38346451 NR Description: OSJNBa0018J19.12 [Oryza sativa (japonica
  misc_feature (1)..(210): Homolog of NCBI NO: 40253319 NR Description: putative flavonol 3-sulfotransferase
  misc_feature (1)..(210): Homolog of NCBI NO: 40253317 NR Description: putative flavonol 3-sulfotransferase
MAELEALPSPRVLATHLPYSLLPDRVVADDGARIVYVCRDPKDALVSSWLFTRKASPSVGVDSDSYSLQEAAELFREGRCFYGPQCRHVLEYWDASRRPFGGGEVLFLRYEEMLRDPAGSLKTMAEFMGCGFSEEEVARGVVDEIVDLCSLEKLKNMEANRDGRRNASGIRSDSFFRKGVAGDWSSHMSPEMGKMLDEAVEEALQGSGFSFSG

SEQ ID NO: 63248 - DNA, 1475 bp, Triticum aestivum
  misc_feature (1)..(1475): Ceres Seq. ID no. 12615552
actgccagtccccacgcgagcgacctagggcgagatgagtagccgccgccgccgccgccacgccggctcgccggcgtccgcgccgctggacgacgacgacctcctctgcgagatcctgctccgccttcccccggagccctcctccctcccgcgcgcatccctcgtctgcaagcgctggcgccgcctcgtctcctaccccggcttcttccgccgcttccgcctccaccaccgccgcaacccttccctcctcggcttcttcgacaggtttaatggcctctccttcctacccactctgggggcccccaatcgcgtcccccacgggcgcttctctttccactgcgatgacttcgacagctgctctatgtcccttggatgtcgccatggcctcatgctcatcttccttcgtaagcgtctccaggtcctggtgtgggaccccgtcaccggcgaccagcaccgcattgccattcccgcagcgtttgatacggagaaaacccttatcaacggggcggttcttcgcgctgccggagatgtcgaaaacttccaggtggtgttggtagctgcagatggcgacgacgaacaacacatacaggcgctcgcctgtgtttactcgtcaaagaccggcttatggggaaatcttgtctcaacaccgattccataccaggcttctgatagtccataccgtatccccaccatggttaatacagatgacgctgtgctagctggagattccctttactggaagcttactgggaatatggttggaattcttgagtttgatttggaaaagcagagtctagctgtgataaggatgccactggatatgtatggccagggcaagtgcttcacggttatgcgggccgagggtggtgggctgggtctcctcgttgtgttgaactctgactacaccgcccagttatggaagaggaagatcgattgtgatggtggtgcttcatgggggcttgcacgaactattgaactggacaagctacttcccataaaaccggaggagaaagggcttctagtgatactagggtttgctgagcagaataatgtggtgtttctgtggacagttatcggtgtattgatgatccagcttgagtcattggagttcaagaatctttataaaaccatgatcttttcttactaccatccatttgaaagtgtctacagtgcaggaacatctgtttctggtggacgcgacagggctgagcttttggtcaataaataagatgattgtccgttggatatgctgtttgatctactaattgagcaggtatctagagctacattctggtgactgagatgaagaagaaatgggttgttggctgtaggcagggatcaggctcttgtattttgtatgttggaccttcagattgactctctatgtagcatgcaccggtctgtactctgctgtgaagtgcacctgtaggaattaattgcttaatttgacaacctgcgtcgatcatctagtttct

SEQ ID NO: 63249 - protein, 397 aa, Triticum aestivum
  peptide (1)..(397): Ceres Seq. ID no. 12615553
  misc_feature (17)..(62): Pfam Name: F-box domain Pfam Description: F-box domain
  misc_feature (4)..(376): Homolog of NCBI NO: 37531214 NR Description: unknown protein [Oryza sativa (japonica
  misc_feature (9)..(397): Homolog of NCBI NO: 37531022 NR Description: hypothetical protein [Oryza sativa (japonica
  misc_feature (12)..(378): Homolog of NCBI NO: 37531026 NR Description: hypothetical protein [Oryza sativa (japonica
  misc_feature (1)..(296): Homolog of NCBI NO: 37530944 NR Description: hypothetical protein [Oryza sativa (japonica
  misc_feature (262)..(356): Homolog of NCBI NO: 37531854 NR Description: hypothetical protein [Oryza sativa (japonica
  misc_feature (1)..(205): Homolog of NCBI NO: 37531854 NR Description: hypothetical protein [Oryza sativa (japonica
  misc_feature (4)..(158): Homolog of NCBI NO: 37530924 NR Description: unknown protein [Oryza sativa (japonica
  misc_feature (178)..(392): Homolog of NCBI NO: 37530924 NR Description: unknown protein [Oryza sativa (japonica
  misc_feature (4)..(381): Homolog of NCBI NO: 37530900 NR Description: hypothetical protein [Oryza sativa (japonica
  misc_feature (3)..(391): Homolog of NCBI NO: 37530914 NR Description: unknown protein [Oryza sativa (japonica
MSSRRRRRHAGSPASAPLDDDDLLCEILLRLPPEPSSLPRASLVCKRWRRLVSYPGFFRRFRLHHRRNPSLLGFFDRFNGLSFLPTLGAPNRVPHGRFSFHCDDFDSCSMSLGCRHGLMLIFLRKRLQVLVWDPVTGDQHRIAIPAAFDTEKTLINGAVLRAAGDVENFQVVLVAADGDDEQHIQALACVYSSKTGLWGNLVSTPIPYQASDSPYRIPTMVNTDDAVLAGDSLYWKLTGNMVGILEFDLEKQSLAVIRMPLDMYGQGKCFTVMRAEGGGLGLLVVLNSDYTAQLWKRKIDCDGGASWGLARTIELDKLLPIKPEEKGLLVILGFAEQNNVVFLWTVIGVLMIQLESLEFKNLYKTMIFSYYHPFESVYSAGTSVSGGRDRAELLVNK

SEQ ID NO: 63250 - protein, 288 aa, Triticum aestivum
  peptide (1)..(288): Ceres Seq. ID no. 12615554
  misc_feature (1)..(267): Homolog of NCBI NO: 37531214 NR Description: unknown protein [Oryza sativa (japonica
  misc_feature (1)..(288): Homolog of NCBI NO: 37531022 NR Description: hypothetical protein [Oryza sativa (japonica
  misc_feature (1)..(269): Homolog of NCBI NO: 37531026 NR Description: hypothetical protein [Oryza sativa (japonica
  misc_feature (1)..(187): Homolog of NCBI NO: 37530944 NR Description: hypothetical protein [Oryza sativa (japonica
  misc_feature (153)..(247): Homolog of NCBI NO: 37531854 NR Description: hypothetical protein [Oryza sativa (japonica
  misc_feature (1)..(96): Homolog of NCBI NO: 37531854 NR Description: hypothetical protein [Oryza sativa (japonica
  misc_feature (1)..(49): Homolog of NCBI NO: 37530924 NR Description: unknown protein [Oryza sativa (japonica
  misc_feature (69)..(283): Homolog of NCBI NO: 37530924 NR Description: unknown protein [Oryza sativa (japonica
  misc_feature (1)..(272): Homolog of NCBI NO: 37530900 NR Description: hypothetical protein [Oryza sativa (japonica
  misc_feature (1)..(282): Homolog of NCBI NO: 37530914 NR Description: unknown protein [Oryza sativa (japonica
MSLGCRHGLMLIFLRKRLQVLVWDPVTGDQHRIAIPAAFDTEKTLINGAVLRAAGDVENFQVVLVAADGDDEQHIQALACVYSSKTGLWGNLVSTPIPYQASDSPYRIPTMVNTDDAVLAGDSLYWKLTGNMVGILEFDLEKQSLAVIRMPLDMYGQGKCFTVMRAEGGGLGLLVVLNSDYTAQLWKRKIDCDGGASWGLARTIELDKLLPIKPEEKGLLVILGFAEQNNVVFLWTVIGVLMIQLESLEFKNLYKTMIFSYYHPFESVYSAGTSVSGGRDRAELLVNK

SEQ ID NO: 63251 - protein, 279 aa, Triticum aestivum
  peptide (1)..(279): Ceres Seq. ID no. 12615555
  misc_feature (1)..(258): Homolog of NCBI NO: 37531214 NR Description: unknown protein [Oryza sativa (japonica
  misc_feature (1)..(279): Homolog of NCBI NO: 37531022 NR Description: hypothetical protein [Oryza sativa (japonica
  misc_feature (1)..(260): Homolog of NCBI NO: 37531026 NR Description: hypothetical protein [Oryza sativa (japonica
  misc_feature (1)..(178): Homolog of NCBI NO: 37530944 NR Description: hypothetical protein [Oryza sativa (japonica
  misc_feature (144)..(238): Homolog of NCBI NO: 37531854 NR Description: hypothetical protein [Oryza sativa (japonica
  misc_feature (1)..(87): Homolog of NCBI NO: 37531854 NR Description: hypothetical protein [Oryza sativa (japonica
  misc_feature (1)..(40): Homolog of NCBI NO: 37530924 NR Description: unknown protein [Oryza sativa (japonica
  misc_feature (60)..(274): Homolog of NCBI NO: 37530924 NR Description: unknown protein [Oryza sativa (japonica
  misc_feature (1)..(263): Homolog of NCBI NO: 37530900 NR Description: hypothetical protein [Oryza sativa (japonica
  misc_feature (1)..(273): Homolog of NCBI NO: 37530914 NR Description: unknown protein [Oryza sativa (japonica
MLIFLRKRLQVLVWDPVTGDQHRIAIPAAFDTEKTLINGAVLRAAGDVENFQVVLVAADGDDEQHIQALACVYSSKTGLWGNLVSTPIPYQASDSPYRIPTMVNTDDAVLAGDSLYWKLTGNMVGILEFDLEKQSLAVIRMPLDMYGQGKCFTVMRAEGGGLGLLVVLNSDYTAQLWKRKIDCDGGASWGLARTIELDKLLPIKPEEKGLLVILGFAEQNNVVFLWTVIGVLMIQLESLEFKNLYKTMIFSYYHPFESVYSAGTSVSGGRDRAELLVNK

SEQ ID NO: 63252 - DNA, 760 bp, Triticum aestivum
  misc_feature (1)..(760): Ceres Seq. ID no. 13583718
gaagagccgaacacccaccccaatccactaacctagcgatgcctcccaagcgcaagtccccggttgcgacggcggcggcccccgcaatgccgcctaggatgacccggagcatggccgccgggaagcggggcgccgacgctccggctaaaaaggaggaagcagaggcggcgccggcggcggccggggggaagggcaggaagaaggccaagaaggaggtgtctgcggtggagacggtactgtcgcctcctgcagcggccaagcagaaggtgaagaaaaatgccaagaaggaggtggtggcggccgcggtagatgatggcggtgctggcgctgaaagcgggaagcgcgtcatcgtcgaggcctgcacccagtgccaacagttcaagagaagagctttaaaggtgaaggaggatcttgaaagtgctgtccctggggtttctgtgacaatcaaccctgagaagccacgccgtggatgccttgagatacgggaggaaggtggtgatgtgttcatttcactgcagaacatgccccggcccttcaaaaagatgagggagctcgacatggacaaggttatcaaggacattgcccagaaaattgcttgaatctgacgtggcattaatgtatggatgcgctccttttgcaattgatgtttagggcttattttgtgtgggaacttggtattgcagtggccgtagaatgtgggatcagtgtttcgttattgtgccctatgtgggctaagacatgctgaaattatcgcattagc

SEQ ID NO: 63253 - protein, 198 aa, Triticum aestivum
  peptide (1)..(198): Ceres Seq. ID no. 13583719
  misc_feature (90)..(198): Homolog of NCBI NO: 33516960 NR Description: Selenoprotein H
  misc_feature (13)..(152): Homolog of NCBI NO: 7486666 NR Description: hypothetical protein F8F16.180 - Arabidopsis
  misc_feature (32)..(197): Homolog of NCBI NO: 18400547 NR Description: expressed protein [Arabidopsis thaliana]
  misc_feature (13)..(197): Homolog of NCBI NO: 22329049 NR Description: expressed protein [Arabidopsis thaliana]
RAEHPPQSTNLAMPPKRKSPVATAAAPAMPPRMTRSMAAGKRGADAPAKKEEAEAAPAAAGGKGRKKAKKEVSAVETVLSPPAAAKQKVKKNAKKEVVAAAVDDGGAGAESGKRVIVEACTQCQQFKRRALKVKEDLESAVPGVSVTINPEKPRRGCLEIREEGGDVFISLQNMPRPFKKMRELDMDKVIKDIAQKIA

SEQ ID NO: 63254 - protein, 186 aa, Triticum aestivum
  peptide (1)..(186): Ceres Seq. ID no. 13583720
  misc_feature (78)..(186): Homolog of NCBI NO: 33516960 NR Description: Selenoprotein H
  misc_feature (1)..(140): Homolog of NCBI NO: 7486666 NR Description: hypothetical protein F8F16.180 - Arabidopsis
  misc_feature (20)..(185): Homolog of NCBI NO: 18400547 NR Description: expressed protein [Arabidopsis thaliana]
  misc_feature (1)..(185): Homolog of NCBI NO: 22329049 NR Description: expressed protein [Arabidopsis thaliana]
MPPKRKSPVATAAAPAMPPRMTRSMAAGKRGADAPAKKEEAEAAPAAAGGKGRKKAKKEVSAVETVLSPPAAAKQKVKKNAKKEVVAAAVDDGGAGAESGKRVIVEACTQCQQFKRRALKVKEDLESAVPGVSVTINPEKPRRGCLEIREEGGDVFISLQNMPRPFKKMRELDMDKVIKDIAQKIA

SEQ ID NO: 63255 - protein, 170 aa, Triticum aestivum
  peptide (1)..(170): Ceres Seq. ID no. 13583721
  misc_feature (62)..(170): Homolog of NCBI NO: 33516960 NR Description: Selenoprotein H
  misc_feature (1)..(124): Homolog of NCBI NO: 7486666 NR Description: hypothetical protein F8F16.180 - Arabidopsis
  misc_feature (4)..(169): Homolog of NCBI NO: 18400547 NR Description: expressed protein [Arabidopsis thaliana]
  misc_feature (1)..(169): Homolog of NCBI NO: 22329049 NR Description: expressed protein [Arabidopsis thaliana]
MPPRMTRSMAAGKRGADAPAKKEEAEAAPAAAGGKGRKKAKKEVSAVETVLSPPAAAKQKVKKNAKKEVVAAAVDDGGAGAESGKRVIVEACTQCQQFKRRALKVKEDLESAVPGVSVTINPEKPRRGCLEIREEGGDVFISLQNMPRPFKKMRELDMDKVIKDIAQKIA

SEQ ID NO: 63256 - DNA, 1429 bp, Triticum aestivum
  misc_feature (1)..(1429): Ceres Seq. ID no. 14314084
cttttttcgcttcactccattctcaaaccatggcggagcacaagcgtacagtttccaccctcgttctcctcctcctcttcttctcggcgccgacgaatgccacacggccaccagcaacgctccgcatccccgtcgtccaccgcgacgcggtcttcccgccgccgccgggcgccagccgtggtagcctcctaagccgccgcgcggctgccgacgccgcgcggctgccgacgccgcgcgctacgcctccctcaaggcgtccctcgggcctcggcctccgctcctcctccgcgcacgacgaccgcctccactccccggtcatgtccgggctccccttcgacagcggcgagtacttcgcgtccgtcggcgtgggcaccccgtccaccagcgcgctgctggtcatcgacaccgggagcgacctcatctggctccagtgcaaaccctgccgccgctgccaccgccagatgagcccgctctacgaccccaagggctccagcacctaccgccagatcccctgctcgtcgccgcggtgcttccctcgccatggctgcgacaccagcaccggggcctgcgggtacgccatggtctacggcgacggctccggcagcaggggcaacctcgccaccgacaggctcgtcttctccaacgacacgtccgtggacagcgtcgtcatcgggtgcggccacgacaacgcggagctgttcgactcgtcggccggggtgctgggcgtcggccgcggcgccggctccctggcgacgcaggtggcgccgacctacgggcgctacttcgcctactgcctcggcgaccgcacgtccgtcgcgcggagcagcgcctcgtacctcgccttcggccgcacgccggagccgccgtccacggccttcaccccgctgctgtccaacccgcggcgccccaacctgtactacgtgaacatggccggcttcagcgtcggcggcgagcgtgtcgccggcgggttctgcagctccagcctctggctcgacccggcgaccgggcggggcggcgtggtggtggactcgggcacgtccatatcgcggctccccagggatgtgtacgcggcgctgcgcgacgccttcgacgcgcgcgcggccgcggccgggatgcggaggctggcgcggggcatctcggtgttcgacgcgtgctacgagctccgaggcgccagcgtgccggcggtggtgctgcacttcgctggcggcgcggacgtggcgctgcccccggagaactacttcatacccgagcagggcgggaagtaccactgcctggcgctggaggcgacggacgacgggctcagcgtgctcggcaacgtcctgcagcagggattccgggtcgtgttcgatgtcgagaaagaacgtgtcgggttcgcgccaaatggctgctaagcttgatcaacatttatttacacggttgtttaacctgc

SEQ ID NO: 63257 - protein, 462 aa, Triticum aestivum
  peptide (1)..(462): Ceres Seq. ID no. 14314085
  misc_feature (70)..(459): Pfam Name: Eukaryotic aspartyl protease Pfam Description: Eukaryotic aspartyl protease
  misc_feature (101)..(462): Homolog of NCBI NO: 19424106 NR Description: putative chloroplast nucleoid DNA-binding protein
  misc_feature (101)..(462): Homolog of NCBI NO: 15229656 NR Description: chloroplast nucleoid DNA-binding protein -related
  misc_feature (39)..(462): Homolog of NCBI NO: 28392860 NR Description: unknown protein [Arabidopsis thaliana]
  misc_feature (64)..(462): Homolog of NCBI NO: 34895664 NR Description: nucleoid DNA-binding protein cnd41-like protein
  misc_feature (105)..(462): Homolog of NCBI NO: 15228618 NR Description: expressed protein [Arabidopsis thaliana]
  misc_feature (62)..(462): Homolog of NCBI NO: 21594980 NR Description: chloroplast nucleoid DNA binding protein,
  misc_feature (62)..(462): Homolog of NCBI NO: 15223368 NR Description: chloroplast nucleoid DNA binding protein -related
  misc_feature (38)..(462): Homolog of NCBI NO: 15290061 NR Description: nucleoid DNA-binding protein cnd41-like protein
  misc_feature (17)..(73): Homolog of NCBI NO: 34910676 NR Description: P0690B02.2 [Oryza sativa (japonica
  misc_feature (70)..(462): Homolog of NCBI NO: 34910676 NR Description: P0690B02.2 [Oryza sativa (japonica
FFASLHSQTMAEHKRTVSTLVLLLLFFSAPTNATRPPATLRIPVVHRDAVFPPPPGASRGSLLSRRAAADAARLPTPRATPPSRRPSGLGLRSSSAHDDRLHSPVMSGLPFDSGEYFASVGVGTPSTSALLVIDTGSDLIWLQCKPCRRCHRQMSPLYDPKGSSTYRQIPCSSPRCFPRHGCDTSTGACGYAMVYGDGSGSRGNLATDRLVFSNDTSVDSVVIGCGHDNAELFDSSAGVLGVGRGAGSLATQVAPTYGRYFAYCLGDRTSVARSSASYLAFGRTPEPPSTAFTPLLSNPRRPNLYYVNMAGFSVGGERVAGGFCSSSLWLDPATGRGGVVVDSGTSISRLPRDVYAALRDAFDARAAAAGMRRLARGISVFDACYELRGASVPAVVLHFAGGADVALPPENYFIPEQGGKYHCLALEATDDGLSVLGNVLQQGFRVVFDVEKERVGFAPNGC

SEQ ID NO: 63258 - protein, 453 aa, Triticum aestivum
  peptide (1)..(453): Ceres Seq. ID no. 14314086
  misc_feature (61)..(450): Pfam Name: Eukaryotic aspartyl protease Pfam Description: Eukaryotic aspartyl protease
  misc_feature (92)..(453): Homolog of NCBI NO: 19424106 NR Description: putative chloroplast nucleoid DNA-binding protein
  misc_feature (92)..(453): Homolog of NCBI NO: 15229656 NR Description: chloroplast nucleoid DNA-binding protein -related
  misc_feature (30)..(453): Homolog of NCBI NO: 28392860 NR Description: unknown protein [Arabidopsis thaliana]
  misc_feature (55)..(453): Homolog of NCBI NO: 34895664 NR Description: nucleoid DNA-binding protein cnd41-like protein
  misc_feature (96)..(453): Homolog of NCBI NO: 15228618 NR Description: expressed protein [Arabidopsis thaliana]
  misc_feature (53)..(453): Homolog of NCBI NO: 21594980 NR Description: chloroplast nucleoid DNA binding protein,
  misc_feature (53)..(453): Homolog of NCBI NO: 15223368 NR Description: chloroplast nucleoid DNA binding protein -related
  misc_feature (29)..(453): Homolog of NCBI NO: 15290061 NR Description: nucleoid DNA-binding protein cnd41-like protein
  misc_feature (8)..(64): Homolog of NCBI NO: 34910676 NR Description: P0690B02.2 [Oryza sativa (japonica
  misc_feature (61)..(453): Homolog of NCBI NO: 34910676 NR Description: P0690B02.2 [Oryza sativa (japonica
MAEHKRTVSTLVLLLLFFSAPTNATRPPATLRIPVVHRDAVFPPPPGASRGSLLSRRAAADAARLPTPRATPPSRRPSGLGLRSSSAHDDRLHSPVMSGLPFDSGEYFASVGVGTPSTSALLVIDTGSDLIWLQCKPCRRCHRQMSPLYDPKGSSTYRQIPCSSPRCFPRHGCDTSTGACGYAMVYGDGSGSRGNLATDRLVFSNDTSVDSVVIGCGHDNAELFDSSAGVLGVGRGAGSLATQVAPTYGRYFAYCLGDRTSVARSSASYLAFGRTPEPPSTAFTPLLSNPRRPNLYYVNMAGFSVGGERVAGGFCSSSLWLDPATGRGGVVVDSGTSISRLPRDVYAALRDAFDARAAAAGMRRLARGISVFDACYELRGASVPAVVLHFAGGADVALPPENYFIPEQGGKYHCLALEATDDGLSVLGNVLQQGFRVVFDVEKERVGFAPNGC

SEQ ID NO: 63259 - protein, 357 aa, Triticum aestivum
  peptide (1)..(357): Ceres Seq. ID no. 14314087
  misc_feature (1)..(354): Pfam Name: Eukaryotic aspartyl protease Pfam Description: Eukaryotic aspartyl protease
  misc_feature (1)..(357): Homolog of NCBI NO: 15231010 NR Description: expressed protein [Arabidopsis thaliana]
  misc_feature (1)..(357): Homolog of NCBI NO: 19424106 NR Description: putative chloroplast nucleoid DNA-binding protein
  misc_feature (1)..(357): Homolog of NCBI NO: 15229656 NR Description: chloroplast nucleoid DNA-binding protein -related
  misc_feature (1)..(357): Homolog of NCBI NO: 28392860 NR Description: unknown protein [Arabidopsis thaliana]
  misc_feature (1)..(357): Homolog of NCBI NO: 34895664 NR Description: nucleoid DNA-binding protein cnd41-like protein
  misc_feature (1)..(357): Homolog of NCBI NO: 15228618 NR Description: expressed protein [Arabidopsis thaliana]
  misc_feature (1)..(357): Homolog of NCBI NO: 21594980 NR Description: chloroplast nucleoid DNA binding protein,
  misc_feature (1)..(357): Homolog of NCBI NO: 15223368 NR Description: chloroplast nucleoid DNA binding protein -related
  misc_feature (1)..(357): Homolog of NCBI NO: 15290061 NR Description: nucleoid DNA-binding protein cnd41-like protein
  misc_feature (1)..(357): Homolog of NCBI NO: 34910676 NR Description: P0690B02.2 [Oryza sativa (japonica
MSGLPFDSGEYFASVGVGTPSTSALLVIDTGSDLIWLQCKPCRRCHRQMSPLYDPKGSSTYRQIPCSSPRCFPRHGCDTSTGACGYAMVYGDGSGSRGNLATDRLVFSNDTSVDSVVIGCGHDNAELFDSSAGVLGVGRGAGSLATQVAPTYGRYFAYCLGDRTSVARSSASYLAFGRTPEPPSTAFTPLLSNPRRPNLYYVNMAGFSVGGERVAGGFCSSSLWLDPATGRGGVVVDSGTSISRLPRDVYAALRDAFDARAAAAGMRRLARGISVFDACYELRGASVPAVVLHFAGGADVALPPENYFIPEQGGKYHCLALEATDDGLSVLGNVLQQGFRVVFDVEKERVGFAPNGC

SEQ ID NO: 63260 - DNA, 1262 bp, Triticum aestivum
  misc_feature (1)..(1262): Ceres Seq. ID no. 12616162
gaagaaagcatggcacgtattttccatgaaagcacgtccacgccgaagctctctataaagtacgtgcagtgcacagaaagtatcatcatatcatagaaaaacaagcatccatctcctcggttcagcccacagccaacgaacacacgcgagcgcacgagtgagcgagcgagagagagaaagatggcgaatctgttcctgaagcaggcgaagcactacgcggcggcgcggccggactacccggcggagctcttccacttcatcgcgtccaagacggcccgccacgacctcgcgtgggacgtcggcaccggcagcggccaggccgcagtctcgctggcgaagctgtacaagaacgtggtgggcacggacacgagcgcgcagcagctgggctacgcgcgggagctccccaacgtgcgctacgcccataccccggcggacctgccgctcgacggcatccacgcggccgtcgcgccgccgggctcggttgacgtggtcaccgtggcgcaggccttccactggctcgacctgccgcgcttctacgcgcaggtccgctccctcctgcgcccgcacggcgtcctcgccgcatggtgctacacggagccccgcatgggggccgccgtcgacgccgtcttctggcgcctctacgacggctcgcagccccactgggcgcccaaccggaagatggtcgacgacgagtaccgcagcgccgacttccccttcgaccccgtcgacggcgagacccacacgggccccttcgagttctccacggagcgatgcatgaacctcgacgactacttcacctacatcaagtcctggtccgcgtaccagaccgccaaggacaatggcgtcgagctgctcgacgccgagactgtgctggacttcgccgacgcgtggggcggcgaccgcgaggaggtcaagacggtgaggtaccccatcttcctcaggatcggcaaggtgaggccttaagaatcagatgcagcatgatgcaatgcaagtggccttgagaaagggacgctttcatgtctgcacgtcacgatcgaagtgacgatggtgcaaaatgccgagcagcgtacgtgtgccgccgctggaccattttatttgtattcccctcctattcctattccaaattcagcgtgtaacaaatggtattcctagtatccatcccattttagacaaataattgtaagttgtggatgttacctttgtctatcatatatgaatgttatttttgcggtgttgctaaaactgagtccgttgtgttagtc

SEQ ID NO: 63261 - protein, 260 aa, Triticum aestivum
  peptide (1)..(260): Ceres Seq. ID no. 12616163
  misc_feature (1)..(258): Homolog of NCBI NO: 21594033 NR Description: embryonic abundant protein-like [Arabidopsis
  misc_feature (1)..(257): Homolog of NCBI NO: 34910604 NR Description: putative embryonic abundant protein-like
  misc_feature (1)..(258): Homolog of NCBI NO: 15235684 NR Description: putative protein; protein id: At4g22530.1
  misc_feature (1)..(258): Homolog of NCBI NO: 15233061 NR Description: putative protein; protein id: At3g61210.1
  misc_feature (166)..(259): Homolog of NCBI NO: 34912212 NR Description: P0415C01.8 [Oryza sativa (japonica
  misc_feature (1)..(161): Homolog of NCBI NO: 34912212 NR Description: P0415C01.8 [Oryza sativa (japonica
  misc_feature (1)..(259): Homolog of NCBI NO: 15238280 NR Description: embryonic abundant protein -like; protein id:
  misc_feature (7)..(258): Homolog of NCBI NO: 7484460 NR Description: embryonic abundant protein EMB34 - white spruce
  misc_feature (1)..(259): Homolog of NCBI NO: 20339366 NR Description: embryo-abundant protein EMB [Pisum sativum]
  misc_feature (1)..(258): Homolog of NCBI NO: 15227331 NR Description: putative embryo-abundant protein
MANLFLKQAKHYAAARPDYPAELFHFIASKTARHDLAWDVGTGSGQAAVSLAKLYKNVVGTDTSAQQLGYARELPNVRYAHTPADLPLDGIHAAVAPPGSVDVVTVAQAFHWLDLPRFYAQVRSLLRPHGVLAAWCYTEPRMGAAVDAVFWRLYDGSQPHWAPNRKMVDDEYRSADFPFDPVDGETHTGPFEFSTERCMNLDDYFTYIKSWSAYQTAKDNGVELLDAETVLDFADAWGGDREEVKTVRYPIFLRIGKVRP

SEQ ID NO: 63262 - protein, 139 aa, Triticum aestivum
  peptide (1)..(139): Ceres Seq. ID no. 12616164
MVLHGAPHGGRRRRRLLAPLRRLAAPLGAQPEDGRRRVPQRRLPLRPRRRRDPHGPLRVLHGAMHEPRRLLHLHQVLVRVPDRQGQWRRAARRRDCAGLRRRVGRRPRGGQDGEVPHLPQDRQGEALRIRCSMMQCKWP

SEQ ID NO: 63263 - DNA, 1186 bp, Triticum aestivum
  misc_feature (1)..(1186): Ceres Seq. ID no. 12593170
ttggactggaagcgacccgcgtccaccaccgccgctttccccgtctccccctcaccgcgcggcgacgccgagcgacccagcggcgagcccggcatgcatcacgaccccaaccccttcgacgagggcaccgccggcgacgagaaccccttctcgaatggaggaggccgcggcgggaagcagcagcacggcttccggcccaccgagcccgtcggcttcggcggcggcggcagcaggggcgacgccaccgtcgacgtgccgctcggcaacatgggcgactcgaatggcaaggcgagggagctctcgtcgtgggaatcagatctgaggcgccgtgaggcggatatcaaaaggagggaggaatcactgaagaatgctggagtgcccatggaggagaagaattggccgccttttttcccgattatccaccatgacatcgccaatgagatacctgccaacgtgcagaagctacagtatctggcgttcgcaagctggcttggaattgtgctctgcctctcctggacttattttgctgtcatagtctgctggatcaaggagggagattcaaagctgttcttccttgctacaatctatgctttgcttggaattcccctctcttacttgatgtggtatagacccctctatcgtgcaatgagaactaacagtgcattcagttttggatggtttttcctgtgttacctgatccacattggtttttgcataattgctgccattgctccgccaatcgtattccaagggaaatcattaacgggcatattggctgcgatcgacactttctctgagcatgtgataattgggatcttttacttcgtggggtttgcactattttgcttggagacactgctgagcatcggggttcttcagaaagtatacatgtacttccgagggcataagtgaagctagtcgtgatggaaatttttcagaagcctacaagcagtagtgattctgtccatatgtgttagtacaccttgagtctatgtttgttgagcgaagggttatcgaagaatgcttctgagactgagtggagtatggcatgtagcgctgctactataggatcttctctaagatgggggtgctgaggttctttatatgctgtgcttcgtgtgtcatctggtagttcgtttgggagtctggcatgtcggcgaacattacagtagtcagtatttattat

SEQ ID NO: 63264 - protein, 303 aa, Triticum aestivum
  peptide (1)..(303): Ceres Seq. ID no. 12593171
  misc_feature (129)..(303): Pfam Name: SCAMP family Pfam Description: SCAMP family
  misc_feature (34)..(301): Homolog of NCBI NO: 18379111 NR Description: expressed protein
  misc_feature (23)..(301): Homolog of NCBI NO: 34899754 NR Description: putative secretory carrier membrane protein
  misc_feature (31)..(301): Homolog of NCBI NO: 15220305 NR Description: secretory carrier membrane protein, putative
  misc_feature (34)..(301): Homolog of NCBI NO: 15226410 NR Description: putative secretory carrier-associated membrane
  misc_feature (34)..(301): Homolog of NCBI NO: 7109232 NR Description: secretory carrier membrane protein [Oryza sativa]
  misc_feature (34)..(301): Homolog of NCBI NO: 15219893 NR Description: secretory carrier membrane protein
  misc_feature (34)..(301): Homolog of NCBI NO: 3941289 NR Description: similarity to SCAMP37 [Pisum sativum]
  misc_feature (46)..(293): Homolog of NCBI NO: 38567965 NR Description: OSJNBa0093F12.6 [Oryza sativa (japonica
  misc_feature (33)..(303): Homolog of NCBI NO: 15222550 NR Description: secretory carrier membrane protein, putative
  misc_feature (32)..(303): Homolog of NCBI NO: 38347080 NR Description: OSJNBa0006A01.21 [Oryza sativa (japonica
LDWKRPASTTAAFPVSPSPRGDAERPSGEPGMHHDPNPFDEGTAGDENPFSNGGGRGGKQQHGFRPTEPVGFGGGGSRGDATVDVPLGNMGDSNGKARELSSWESDLRRREADIKRREESLKNAGVPMEEKNWPPFFPIIHHDIANEIPANVQKLQYLAFASWLGIVLCLSWTYFAVIVCWIKEGDSKLFFLATIYALLGIPLSYLMWYRPLYRAMRTNSAFSFGWFFLCYLIHIGFCIIAAIAPPIVFQGKSLTGILAAIDTFSEHVIIGIFYFVGFALFCLETLLSIGVLQKVYMYFRGHK

SEQ ID NO: 63265 - protein, 272 aa, Triticum aestivum
  peptide (1)..(272): Ceres Seq. ID no. 12593172
  misc_feature (98)..(272): Pfam Name: SCAMP family Pfam Description: SCAMP family
  misc_feature (3)..(270): Homolog of NCBI NO: 18379111 NR Description: expressed protein
  misc_feature (1)..(270): Homolog of NCBI NO: 34899754 NR Description: putative secretory carrier membrane protein
  misc_feature (1)..(270): Homolog of NCBI NO: 15220305 NR Description: secretory carrier membrane protein, putative
  misc_feature (3)..(270): Homolog of NCBI NO: 15226410 NR Description: putative secretory carrier-associated membrane
  misc_feature (3)..(270): Homolog of NCBI NO: 7109232 NR Description: secretory carrier membrane protein [Oryza sativa]
  misc_feature (3)..(270): Homolog of NCBI NO: 15219893 NR Description: secretory carrier membrane protein
  misc_feature (3)..(270): Homolog of NCBI NO: 3941289 NR Description: similarity to SCAMP37 [Pisum sativum]
  misc_feature (15)..(262): Homolog of NCBI NO: 38567965 NR Description: OSJNBa0093F12.6 [Oryza sativa (japonica
  misc_feature (2)..(272): Homolog of NCBI NO: 15222550 NR Description: secretory carrier membrane protein, putative
  misc_feature (1)..(272): Homolog of NCBI NO: 38347080 NR Description: OSJNBa0006A01.21 [Oryza sativa (japonica
MHHDPNPFDEGTAGDENPFSNGGGRGGKQQHGFRPTEPVGFGGGGSRGDATVDVPLGNMGDSNGKARELSSWESDLRRREADIKRREESLKNAGVPMEEKNWPPFFPIIHHDIANEIPANVQKLQYLAFASWLGIVLCLSWTYFAVIVCWIKEGDSKLFFLATIYALLGIPLSYLMWYRPLYRAMRTNSAFSFGWFFLCYLIHIGFCIIAAIAPPIVFQGKSLTGILAAIDTFSEHVIIGIFYFVGFALFCLETLLSIGVLQKVYMYFRGHK

SEQ ID NO: 63266 - protein, 214 aa, Triticum aestivum
  peptide (1)..(214): Ceres Seq. ID no. 12593173
  misc_feature (40)..(214): Pfam Name: SCAMP family Pfam Description: SCAMP family
  misc_feature (1)..(212): Homolog of NCBI NO: 18379111 NR Description: expressed protein
  misc_feature (1)..(212): Homolog of NCBI NO: 34899754 NR Description: putative secretory carrier membrane protein
  misc_feature (1)..(212): Homolog of NCBI NO: 15220305 NR Description: secretory carrier membrane protein, putative
  misc_feature (1)..(212): Homolog of NCBI NO: 15226410 NR Description: putative secretory carrier-associated membrane
  misc_feature (1)..(212): Homolog of NCBI NO: 7109232 NR Description: secretory carrier membrane protein [Oryza sativa]
  misc_feature (1)..(212): Homolog of NCBI NO: 15219893 NR Description: secretory carrier membrane protein
  misc_feature (1)..(212): Homolog of NCBI NO: 3941289 NR Description: similarity to SCAMP37 [Pisum sativum]
  misc_feature (1)..(204): Homolog of NCBI NO: 38567965 NR Description: OSJNBa0093F12.6 [Oryza sativa (japonica
  misc_feature (1)..(214): Homolog of NCBI NO: 15222550 NR Description: secretory carrier membrane protein, putative
  misc_feature (1)..(214): Homolog of NCBI NO: 38347080 NR Description: OSJNBa0006A01.21 [Oryza sativa (japonica
MGDSNGKARELSSWESDLRRREADIKRREESLKNAGVPMEEKNWPPFFPIIHHDIANEIPANVQKLQYLAFASWLGIVLCLSWTYFAVIVCWIKEGDSKLFFLATIYALLGIPLSYLMWYRPLYRAMRTNSAFSFGWFFLCYLIHIGFCIIAAIAPPIVFQGKSLTGILAAIDTFSEHVIIGIFYFVGFALFCLETLLSIGVLQKVYMYFRGHK

SEQ ID NO: 63267 - DNA, 1013 bp, Triticum aestivum
  misc_feature (1)..(1013): Ceres Seq. ID no. 15173596
cgaaaacatccaccacagcttagcagcaaccaccagtgccttacacactatccatcaacaaactctagctgatcagttgcatagcaagcaatggggtgctctaaaaccctagtagctgccctcttcgccatgctgttcctagcttcgaccgtcctagccaccgaccctgatcctctccaggacttctgcgtcgccgacctcgacggcaaggcggtctcggtgaacgggcacacgtgcaagcccatgtcggaggccggcgacgacttcctcttctcatccaagctggccaaggccggcaacacgtccactccgaacggctcggctgtgacggagctggacgtggctgagtggcccggtaccaacacactgggtgtgtccatgaaccgcgtggacttcgcgccagggggcaccaacccgccgcacatccacccgcgtgccaccgagatcggcatcgtgatgaaaggtgagctcctcgttggaatcctcggcagccttgactccgggaacaagctctactcgagggtggtgcgcgccggagagacgttcctcatcccacggggccttatgcacttccagttcaatgtcggtaagaccgaggcctccatggtcgtctccttcaacagccagaaccccggaatcgtcttcgtgcccctcacgcttttcggctccaacccgcccatcccaacgccggtgctcaccaaggcactccgggtggaggccggggtcgtggaacttctcaagtccaagttcgccgctgggttttaatttctgggagccttccctgaaatgatcaatatataattccatatatgcatgctagcaaaatttaataattctcaccagaagacatgtattcaagtttcaggttaatctcgcatgcagttgtaataagattgaataagttagcctcatggtgtagccttcaatcagaaccaatatgaggaattgaatgtactactttttactgtcgtctttgttcttttcactgaacggaatatataataagcattttc

SEQ ID NO: 63268 - protein, 224 aa, Triticum aestivum
  peptide (1)..(224): Ceres Seq. ID no. 15173597
  misc_feature (63)..(214): Pfam Name: Cupin Pfam Description: Cupin
  misc_feature (24)..(223): Homolog of NCBI NO: 14278247 NR Description: Chain A, Crystal Structure Of Germin (Oxalate
  misc_feature (1)..(223): Homolog of NCBI NO: 7447343 NR Description: germin homolog Ger3 - wheat
  misc_feature (1)..(223): Homolog of NCBI NO: 121131 NR Description: Oxalate oxidase GF-3.8 precursor (Germin GF-3.8)
  misc_feature (4)..(224): Homolog of NCBI NO: 22138786 NR Description: oxalate oxidase [Lolium perenne]
  misc_feature (1)..(224): Homolog of NCBI NO: 21912430 NR Description: oxalate oxidase 4 [Lolium perenne]
  misc_feature (1)..(224): Homolog of NCBI NO: 21912428 NR Description: oxalate oxidase 2 [Lolium perenne]
  misc_feature (1)..(224): Homolog of NCBI NO: 11967814 NR Description: oxalate oxidase [Lolium perenne]
  misc_feature (1)..(223): Homolog of NCBI NO: 2266668 NR Description: oxalate oxidase [Hordeum vulgare]
  misc_feature (1)..(224): Homolog of NCBI NO: 1171937 NR Description: Oxalate oxidase 2 precursor (Germin)
  misc_feature (1)..(224): Homolog of NCBI NO: 121129 NR Description: Oxalate oxidase GF-2.8 precursor (Germin GF-2.8)
MGCSKTLVAALFAMLFLASTVLATDPDPLQDFCVADLDGKAVSVNGHTCKPMSEAGDDFLFSSKLAKAGNTSTPNGSAVTELDVAEWPGTNTLGVSMNRVDFAPGGTNPPHIHPRATEIGIVMKGELLVGILGSLDSGNKLYSRVVRAGETFLIPRGLMHFQFNVGKTEASMVVSFNSQNPGIVFVPLTLFGSNPPIPTPVLTKALRVEAGVVELLKSKFAAGF

SEQ ID NO: 63269 - protein, 211 aa, Triticum aestivum
  peptide (1)..(211): Ceres Seq. ID no. 15173598
  misc_feature (50)..(201): Pfam Name: Cupin Pfam Description: Cupin
  misc_feature (11)..(210): Homolog of NCBI NO: 14278247 NR Description: Chain A, Crystal Structure Of Germin (Oxalate
  misc_feature (1)..(210): Homolog of NCBI NO: 7447343 NR Description: germin homolog Ger3 - wheat
  misc_feature (1)..(210): Homolog of NCBI NO: 121131 NR Description: Oxalate oxidase GF-3.8 precursor (Germin GF-3.8)
  misc_feature (1)..(211): Homolog of NCBI NO: 22138786 NR Description: oxalate oxidase [Lolium perenne]
  misc_feature (1)..(211): Homolog of NCBI NO: 21912430 NR Description: oxalate oxidase 4 [Lolium perenne]
  misc_feature (1)..(211): Homolog of NCBI NO: 21912428 NR Description: oxalate oxidase 2 [Lolium perenne]
  misc_feature (1)..(211): Homolog of NCBI NO: 11967814 NR Description: oxalate oxidase [Lolium perenne]
  misc_feature (1)..(210): Homolog of NCBI NO: 2266668 NR Description: oxalate oxidase [Hordeum vulgare]
  misc_feature (1)..(211): Homolog of NCBI NO: 1171937 NR Description: Oxalate oxidase 2 precursor (Germin)
  misc_feature (1)..(211): Homolog of NCBI NO: 121129 NR Description: Oxalate oxidase GF-2.8 precursor (Germin GF-2.8)
MLFLASTVLATDPDPLQDFCVADLDGKAVSVNGHTCKPMSEAGDDFLFSSKLAKAGNTSTPNGSAVTELDVAEWPGTNTLGVSMNRVDFAPGGTNPPHIHPRATEIGIVMKGELLVGILGSLDSGNKLYSRVVRAGETFLIPRGLMHFQFNVGKTEASMVVSFNSQNPGIVFVPLTLFGSNPPIPTPVLTKALRVEAGVVELLKSKFAAGF

SEQ ID NO: 63270 - protein, 173 aa, Triticum aestivum
  peptide (1)..(173): Ceres Seq. ID no. 15173599
  misc_feature (12)..(163): Pfam Name: Cupin Pfam Description: Cupin
  misc_feature (1)..(172): Homolog of NCBI NO: 14278247 NR Description: Chain A, Crystal Structure Of Germin (Oxalate
  misc_feature (1)..(172): Homolog of NCBI NO: 7447343 NR Description: germin homolog Ger3 - wheat
  misc_feature (1)..(172): Homolog of NCBI NO: 121131 NR Description: Oxalate oxidase GF-3.8 precursor (Germin GF-3.8)
  misc_feature (1)..(173): Homolog of NCBI NO: 22138786 NR Description: oxalate oxidase [Lolium perenne]
  misc_feature (1)..(173): Homolog of NCBI NO: 21912430 NR Description: oxalate oxidase 4 [Lolium perenne]
  misc_feature (1)..(173): Homolog of NCBI NO: 21912428 NR Description: oxalate oxidase 2 [Lolium perenne]
  misc_feature (1)..(173): Homolog of NCBI NO: 11967814 NR Description: oxalate oxidase [Lolium perenne]
  misc_feature (1)..(172): Homolog of NCBI NO: 2266668 NR Description: oxalate oxidase [Hordeum vulgare]
  misc_feature (1)..(173): Homolog of NCBI NO: 1171937 NR Description: Oxalate oxidase 2 precursor (Germin)
  misc_feature (1)..(173): Homolog of NCBI NO: 121129 NR Description: Oxalate oxidase GF-2.8 precursor (Germin GF-2.8)
MSEAGDDFLFSSKLAKAGNTSTPNGSAVTELDVAEWPGTNTLGVSMNRVDFAPGGTNPPHIHPRATEIGIVMKGELLVGILGSLDSGNKLYSRVVRAGETFLIPRGLMHFQFNVGKTEASMVVSFNSQNPGIVFVPLTLFGSNPPIPTPVLTKALRVEAGVVELLKSKFAAGF

SEQ ID NO: 63271 - DNA, 1585 bp, Triticum aestivum
  misc_feature (1)..(1585): Ceres Seq. ID no. 13503468
gactgcaagtagttttaggagagcgccgaggacgcacccgcgtactgccaaatacaagccgcggtgcacccgtgccgccgttcgtccgctcccgtcgtccgcacacgcgcacgctcggctcgataatcctcaccggcgagcgcgcagctcacgatctatcatcccgatgtcgccggtgaggattaccgactcgacctatgtcggcgtgccggagaccgccgcgccaccgccggggccgatcaggttcaccgcgatggaggcgctctgggtcgtcttcccggtgctgcagcacgtgctgctctacgagggcgacgacgacatgccgcccttcgacgccattctcgagtccctccgctcctccctcgcggccactctgggcagcttcgcgccgctcgccggcaagctggtccacctcgaggagacgggggacgtgggcatcagctgctccgcctccgacggcgtcaggttcgtcgtcgccgagtgcgacgccgacatccgccgcctcgccggcgacgaggagcacgacctgcgcgtcctcgaggcgctcgtgccggaggtggacatgggccggctgccgaccgccctgctggccgtgcaggccacgcgtttcgagggcggcgtggcgctcgggctgacggtgcaccacggcgccgccgacgggcgggcgctgtggacgttcgtcgaggcgtgggcgacggcgtgccggggcgagacgccggccaccacgccgtgcttcgaccgctcgctcgtcaagatgcccgccggcgacgagctggccaggagtgttctgcggaagttcgctcccaatttgccctcggcggcactagcgtcatcagtcttcgaagaccgaaagcggctcactcgccgaaccttcaccttggaccaaggagacatccaacgcctgaagctgcgcattgtccacctcaatgagtcgggcggcacgcccctgcctcgcccgccgtctgctttcgccgccgtggtcgcgctcgcgtggacgtgcttcgcccggtgcaagtcgttctccttggacgacgacgtgtggctcttcttcttcgccgacatccgcgagcgccttgaccctcccgtcggcgcggggtacatcggctcgtgcctcaccaagtgtttggcaaggctccctgcccgggagcttcatggtgagcgtgccctggcggctgcggcgtcggcggtccaggacgagatcaacaagatgaaggaagaccctatcgctggttggaacttcttctcattcgatcccatgcccgccatggaccggttgatgaacatatcaggctcgtcgggctttagtgcatacaagatcgccgacttcgggtggggaaagccgacacggacagagccgattaggatgaacacagacggtcaggtggcattgatgggcagcagggacgaccggggtgtgcaggtctcagtggcactgctccaagcggcacaaatggacgagttcaaatctaactttctggcgctacttgagtgacaatttttgttctcaaagagacctagttaggtcaattcaaaacagtacacccagatgttttataaagattaatacattataattgaattgttt

SEQ ID NO: 63272 - protein, 496 aa, Triticum aestivum
  peptide (1)..(496): Ceres Seq. ID no. 13503469
  misc_feature (59)..(492): Pfam Name: Transferase family Pfam Description: Transferase family
  misc_feature (83)..(478): Homolog of NCBI NO: 15241632 NR Description: transferase family [Arabidopsis thaliana]
  misc_feature (57)..(496): Homolog of NCBI NO: 15230013 NR Description: transferase family [Arabidopsis thaliana]
  misc_feature (59)..(280): Homolog of NCBI NO: 34894314 NR Description: unnamed protein product [Oryza sativa (japonica
  misc_feature (75)..(491): Homolog of NCBI NO: 17980232 NR Description: malonyl CoA:anthocyanin
  misc_feature (60)..(491): Homolog of NCBI NO: 15230048 NR Description: transferase family [Arabidopsis thaliana]
  misc_feature (59)..(222): Homolog of NCBI NO: 39545754 NR Description: OSJNBb0034I13.20 [Oryza sativa (japonica
  misc_feature (55)..(492): Homolog of NCBI NO: 37534152 NR Description: putative anthocyanin 5-aromatic acyltransferase
  misc_feature (73)..(385): Homolog of NCBI NO: 40253598 NR Description: putative Anthocyanin 5-aromatic acyltransferase
  misc_feature (150)..(496): Homolog of NCBI NO: 40253598 NR Description: putative Anthocyanin 5-aromatic acyltransferase
  misc_feature (85)..(495): Homolog of NCBI NO: 21741235 NR Description: OSJNBb0034I13.21 [Oryza sativa (japonica
TASSFRRAPRTHPRTAKYKPRCTRAAVRPLPSSAHAHARLDNPHRRARSSRSIIPMSPVRITDSTYVGVPETAAPPPGPIRFTAMEALWVVFPVLQHVLLYEGDDDMPPFDAILESLRSSLAATLGSFAPLAGKLVHLEETGDVGISCSASDGVRFVVAECDADIRRLAGDEEHDLRVLEALVPEVDMGRLPTALLAVQATRFEGGVALGLTVHHGAADGRALWTFVEAWATACRGETPATTPCFDRSLVKMPAGDELARSVLRKFAPNLPSAALASSVFEDRKRLTRRTFTLDQGDIQRLKLRIVHLNESGGTPLPRPPSAFAAVVALAWTCFARCKSFSLDDDVWLFFFADIRERLDPPVGAGYIGSCLTKCLARLPARELHGERALAAAASAVQDEINKMKEDPIAGWNFFSFDPMPAMDRLMNISGSSGFSAYKIADFGWGKPTRTEPIRMNTDGQVALMGSRDDRGVQVSVALLQAAQMDEFKSNFLALLE

SEQ ID NO: 63273 - protein, 441 aa, Triticum aestivum
  peptide (1)..(441): Ceres Seq. ID no. 13503470
  misc_feature (4)..(437): Pfam Name: Transferase family Pfam Description: Transferase family
  misc_feature (28)..(423): Homolog of NCBI NO: 15241632 NR Description: transferase family [Arabidopsis thaliana]
  misc_feature (2)..(441): Homolog of NCBI NO: 15230013 NR Description: transferase family [Arabidopsis thaliana]
  misc_feature (4)..(225): Homolog of NCBI NO: 34894314 NR Description: unnamed protein product [Oryza sativa (japonica
  misc_feature (20)..(436): Homolog of NCBI NO: 17980232 NR Description: malonyl CoA:anthocyanin
  misc_feature (5)..(436): Homolog of NCBI NO: 15230048 NR Description: transferase family [Arabidopsis thaliana]
  misc_feature (4)..(167): Homolog of NCBI NO: 39545754 NR Description: OSJNBb0034I13.20 [Oryza sativa (japonica
  misc_feature (1)..(437): Homolog of NCBI NO: 37534152 NR Description: putative anthocyanin 5-aromatic acyltransferase
  misc_feature (18)..(330): Homolog of NCBI NO: 40253598 NR Description: putative Anthocyanin 5-aromatic acyltransferase
  misc_feature (95)..(441): Homolog of NCBI NO: 40253598 NR Description: putative Anthocyanin 5-aromatic acyltransferase
  misc_feature (30)..(440): Homolog of NCBI NO: 21741235 NR Description: OSJNBb0034I13.21 [Oryza sativa (japonica
MSPVRITDSTYVGVPETAAPPPGPIRFTAMEALWVVFPVLQHVLLYEGDDDMPPFDAILESLRSSLAATLGSFAPLAGKLVHLEETGDVGISCSASDGVRFVVAECDADIRRLAGDEEHDLRVLEALVPEVDMGRLPTALLAVQATRFEGGVALGLTVHHGAADGRALWTFVEAWATACRGETPATTPCFDRSLVKMPAGDELARSVLRKFAPNLPSAALASSVFEDRKRLTRRTFTLDQGDIQRLKLRIVHLNESGGTPLPRPPSAFAAVVALAWTCFARCKSFSLDDDVWLFFFADIRERLDPPVGAGYIGSCLTKCLARLPARELHGERALAAAASAVQDEINKMKEDPIAGWNFFSFDPMPAMDRLMNISGSSGFSAYKIADFGWGKPTRTEPIRMNTDGQVALMGSRDDRGVQVSVALLQAAQMDEFKSNFLALLE

SEQ ID NO: 63274 - protein, 412 aa, Triticum aestivum
  peptide (1)..(412): Ceres Seq. ID no. 13503471
  misc_feature (1)..(408): Pfam Name: Transferase family Pfam Description: Transferase family
  misc_feature (1)..(394): Homolog of NCBI NO: 15241632 NR Description: transferase family [Arabidopsis thaliana]
  misc_feature (1)..(412): Homolog of NCBI NO: 15230013 NR Description: transferase family [Arabidopsis thaliana]
  misc_feature (1)..(196): Homolog of NCBI NO: 34894314 NR Description: unnamed protein product [Oryza sativa (japonica
  misc_feature (1)..(407): Homolog of NCBI NO: 17980232 NR Description: malonyl CoA:anthocyanin
  misc_feature (1)..(407): Homolog of NCBI NO: 15230048 NR Description: transferase family [Arabidopsis thaliana]
  misc_feature (1)..(138): Homolog of NCBI NO: 39545754 NR Description: OSJNBb0034I13.20 [Oryza sativa (japonica
  misc_feature (1)..(408): Homolog of NCBI NO: 37534152 NR Description: putative anthocyanin 5-aromatic acyltransferase
  misc_feature (1)..(301): Homolog of NCBI NO: 40253598 NR Description: putative Anthocyanin 5-aromatic acyltransferase
  misc_feature (66)..(412): Homolog of NCBI NO: 40253598 NR Description: putative Anthocyanin 5-aromatic acyltransferase
  misc_feature (1)..(411): Homolog of NCBI NO: 21741235 NR Description: OSJNBb0034I13.21 [Oryza sativa (japonica
MEALWVVFPVLQHVLLYEGDDDMPPFDAILESLRSSLAATLGSFAPLAGKLVHLEETGDVGISCSASDGVRFVVAECDADIRRLAGDEEHDLRVLEALVPEVDMGRLPTALLAVQATRFEGGVALGLTVHHGAADGRALWTFVEAWATACRGETPATTPCFDRSLVKMPAGDELARSVLRKFAPNLPSAALASSVFEDRKRLTRRTFTLDQGDIQRLKLRIVHLNESGGTPLPRPPSAFAAVVALAWTCFARCKSFSLDDDVWLFFFADIRERLDPPVGAGYIGSCLTKCLARLPARELHGERALAAAASAVQDEINKMKEDPIAGWNFFSFDPMPAMDRLMNISGSSGFSAYKIADFGWGKPTRTEPIRMNTDGQVALMGSRDDRGVQVSVALLQAAQMDEFKSNFLALLE

SEQ ID NO: 63275 - DNA, 937 bp, Triticum aestivum
  misc_feature (1)..(937): Ceres Seq. ID no. 13662587
gattaagcaagcatctgccttcaatatctcctgtattttctcatctaattagccacgcttgaagttcatacttgaaccatatttcctgctcttcttcgtgctaatcggctggccacttccagaaaccaatttctgtcctcagttttagtattgtgattctagattagaaaaaagagaaccaggtgatcgagcgaggtgaggcaatgggaggcaccctgcggttcctgtcggatgtgctgctaggtagcagcagccagaggcagcacagcaagaagcggaggcagttcaacacggtggagctcaaggtgaagatggactgcgacggctgcgagctcaagatccggaacaccctcgccaacatgagaggagctcagtcggtggagatcaaccggaagcagcacaaggtgacggtgaaggggttcgtggagccgcagcgtgtgctgaggagagtccagtcgacggggaagcgggccgagctctggccgtacgtgccttacacaaacccctacatggcgccggtgtacgacaagcgggctcccgccggccacgtgcgcaaggtggaaggtgtcatgccggtctccaccgggcaggaggagcgcctcgccacgatcttcagcgacgacaacccaaacgcctgctccgtcatgtagtcatgctcatgcaagtcactgcgccaaaagaccctttgcttcttcttcctttttcgggggtgattcctaccaaacgaccctctgctgaactttctccaccgacagactataaaatagcccattagtagaactactattacaaaactcgtcaacgatgcttgtaacaaaagactcatatttttaataatttaacaaagtactgtaatatatggtgaacgctatggtgaagctgatgctagcaagatttcatcgtatttcagaaatttaaaattatttgaagctagccc

SEQ ID NO: 63276 - protein, 148 aa, Triticum aestivum
  peptide (1)..(148): Ceres Seq. ID no. 13662588
  misc_feature (33)..(92): Pfam Name: Heavy-metal-associated domain Pfam Description: Heavy-metal-associated domain
  misc_feature (3)..(148): Homolog of NCBI NO: 21536547 NR Description: farnesylated protein (ATFP6) [Arabidopsis
  misc_feature (3)..(148): Homolog of NCBI NO: 15233937 NR Description: copper chaperone (CCH)-related [Arabidopsis
  misc_feature (19)..(148): Homolog of NCBI NO: 38346843 NR Description: OSJNBa0091C12.3 [Oryza sativa (japonica
  misc_feature (19)..(148): Homolog of NCBI NO: 23304411 NR Description: farnesylated protein 1 [Hordeum vulgare subsp.
  misc_feature (24)..(148): Homolog of NCBI NO: 15237967 NR Description: copper chaperone (CCH)-related [Arabidopsis
  misc_feature (3)..(148): Homolog of NCBI NO: 15223925 NR Description: copper chaperone (CCH)-related [Arabidopsis
  misc_feature (3)..(148): Homolog of NCBI NO: 15219990 NR Description: copper chaperone (CCH)-related [Arabidopsis
  misc_feature (3)..(148): Homolog of NCBI NO: 32442810 NR Description: putative farnesylated protein [Brassica rapa
  misc_feature (1)..(148): Homolog of NCBI NO: 15235984 NR Description: copper chaperone (CCH)-related [Arabidopsis
  misc_feature (1)..(148): Homolog of NCBI NO: 37573003 NR Description: putative farnesylated protein
MGGTLRFLSDVLLGSSSQRQHSKKRRQFNTVELKVKMDCDGCELKIRNTLANMRGAQSVEINRKQHKVTVKGFVEPQRVLRRVQSTGKRAELWPYVPYTNPYMAPVYDKRAPAGHVRKVEGVMPVSTGQEERLATIFSDDNPNACSVM

SEQ ID NO: 63277 - protein, 112 aa, Triticum aestivum
  peptide (1)..(112): Ceres Seq. ID no. 13662589
  misc_feature (1)..(56): Pfam Name: Heavy-metal-associated domain Pfam Description: Heavy-metal-associated domain
  misc_feature (1)..(112): Homolog of NCBI NO: 21536547 NR Description: farnesylated protein (ATFP6) [Arabidopsis
  misc_feature (1)..(112): Homolog of NCBI NO: 15233937 NR Description: copper chaperone (CCH)-related [Arabidopsis
  misc_feature (1)..(112): Homolog of NCBI NO: 38346843 NR Description: OSJNBa0091C12.3 [Oryza sativa (japonica
  misc_feature (1)..(112): Homolog of NCBI NO: 23304411 NR Description: farnesylated protein 1 [Hordeum vulgare subsp.
  misc_feature (1)..(112): Homolog of NCBI NO: 15237967 NR Description: copper chaperone (CCH)-related [Arabidopsis
  misc_feature (1)..(112): Homolog of NCBI NO: 15223925 NR Description: copper chaperone (CCH)-related [Arabidopsis
  misc_feature (1)..(112): Homolog of NCBI NO: 15219990 NR Description: copper chaperone (CCH)-related [Arabidopsis
  misc_feature (1)..(112): Homolog of NCBI NO: 32442810 NR Description: putative farnesylated protein [Brassica rapa
  misc_feature (1)..(112): Homolog of NCBI NO: 15235984 NR Description: copper chaperone (CCH)-related [Arabidopsis
  misc_feature (1)..(112): Homolog of NCBI NO: 37573003 NR Description: putative farnesylated protein
MDCDGCELKIRNTLANMRGAQSVEINRKQHKVTVKGFVEPQRVLRRVQSTGKRAELWPYVPYTNPYMAPVYDKRAPAGHVRKVEGVMPVSTGQEERLATIFSDDNPNACSVM

SEQ ID NO: 63278 - protein, 96 aa, Triticum aestivum
  peptide (1)..(96): Ceres Seq. ID no. 13662590
  misc_feature (1)..(96): Homolog of NCBI NO: 21536547 NR Description: farnesylated protein (ATFP6) [Arabidopsis
  misc_feature (1)..(96): Homolog of NCBI NO: 15233937 NR Description: copper chaperone (CCH)-related [Arabidopsis
  misc_feature (1)..(96): Homolog of NCBI NO: 38346843 NR Description: OSJNBa0091C12.3 [Oryza sativa (japonica
  misc_feature (1)..(96): Homolog of NCBI NO: 23304411 NR Description: farnesylated protein 1 [Hordeum vulgare subsp.
  misc_feature (1)..(96): Homolog of NCBI NO: 15237967 NR Description: copper chaperone (CCH)-related [Arabidopsis
  misc_feature (1)..(96): Homolog of NCBI NO: 15223925 NR Description: copper chaperone (CCH)-related [Arabidopsis
  misc_feature (1)..(96): Homolog of NCBI NO: 15219990 NR Description: copper chaperone (CCH)-related [Arabidopsis
  misc_feature (1)..(96): Homolog of NCBI NO: 32442810 NR Description: putative farnesylated protein [Brassica rapa
  misc_feature (1)..(96): Homolog of NCBI NO: 15235984 NR Description: copper chaperone (CCH)-related [Arabidopsis
  misc_feature (1)..(96): Homolog of NCBI NO: 37573003 NR Description: putative farnesylated protein
MRGAQSVEINRKQHKVTVKGFVEPQRVLRRVQSTGKRAELWPYVPYTNPYMAPVYDKRAPAGHVRKVEGVMPVSTGQEERLATIFSDDNPNACSVM

SEQ ID NO: 63279 - DNA, 2140 bp, Triticum aestivum
  misc_feature (1)..(2140): Ceres Seq. ID no. 14314096
gtctccttccccacatcgtcgtcaatccccaattcccaaatcacgcgctccgacgaccaaaccctaacctcggatccccggaagcacgccaaattcgccaaccctcccctcagattgggcatgccagccccccgaaactccagcccgtgacctcgccggagacgatggcctcgctgccgccgcatccccgccggattcggcccatcgccgtggcctccctggtgctcttcctcctcttcctctacacccgctcggatgggaaccctccgcggctcccgggctccgattcgcgcccgctccaccggaggctcctctccggtgccgatcccgccagccccgccgcgtccagaggcgggaacctttcggaggtcaccgggctgaacggcgagcagctggagaacccctccaccgcgtgcgccggcatcgaccgccacgagggtttcgggtcccagtgcgagttcctccgggctcacccgcagtgcagctccggcgggttcgtcgactacctggacttcttctactgcaggtgcgagagattcaggctgcttggatatgccgtgcttgcagtgtgcctcgcggcgctgttctacatgctcggtaacacggccgcggactacttctgttgcagcctagagaagatgtctgcgctgctgcggctaccgccgacagtggctggtgttaccctgctcccctttggtaatggtgctcctgatgtgtttgccagcattgcagcgtttatggggtctggcgccggggatgtcgggctgaacagcgtgctgggcggagcggtgtttgttacctgcgtcgttgttggggcagtatcattgtccgtcgcggagaagaatgtgcagattgattggaggtgctttgtgagggatgttggattcttcctgatcactttggtggcactgtctattatgttgattgtcgggaaggtgaccgtttggggagctatgctgtttgtatcgatttatgtggtttatgcatttgtggtggctgcaaatgagttattaaggaagcatgcacggatgctgaagtttgatgtagtcacaccattgcttccggtgaggggaagtatcttctcacacggactagaggatgatgattctgtgtacagttcacttcttgaggaggatacaagtgatgacgcggcccaggtaaacacatcattgccgcagtggatgtgggcttctcatgtggctatctactcaaatcaagggagagatggttcacctgacaggcctttgtggggttggaatgaagaaggaagagtggatacctccacgcttaactactccaaactgtttctgtttttggagctacccttgacaataccaagaaagttgacgattccaatagttgaggaagaccgctggtcacaagaatatgctgttgccagtgctggcttggcacctctactcttagcatttctgtggaacagccaggatggagtatccacgggtgccagcgtagcagcatatgtgattgctggtatttttgggattgcacttgcaggtcttgcttttacattcaccagtcccgaccgccctccaaggagatacttactcccatgggtgtttggagggtttgtgatgagcatcgtttggttctacatcattgccaatgagctggttgcactgttggttgcatttggagtgatacttgggattaatccttcaattctcggtttaacggtgttagcatggggcaattcgatgggtgacttaatgtcaaatgtggccttggcaatgaatggtggagatggtgtacagattgctatgtctggctgttatgcaggacctatgtttaatacacttgctggcctaggaatatcgatgctacttggagcttggtcgacggcacccaactcttatgttcttccgcaggaccgctctcttatttacacgatgagcttcctggttgctgggttgatctgggcgcttgttacgctgccacgaagcggcatgcgacctaacaagacgcttggagttggcctcattgctctctactcagttttccttttcattagagtaagcagtgctatggggatattgccactcccgggcttgaattagttgtttgtgtctattgtacatgactgtcctttatacagatgaaatggagttgtacattgttcctc

SEQ ID NO: 63280 - protein, 690 aa, Triticum aestivum
  peptide (1)..(690): Ceres Seq. ID no. 14314097
  misc_feature (534)..(676): Pfam Name: Sodium/calcium exchanger protein Pfam Description: Sodium/calcium exchanger protein
  misc_feature (107)..(394): Homolog of NCBI NO: 18483233 NR Description: K-exchanger-like protein [Sorghum bicolor]
  misc_feature (138)..(331): Homolog of NCBI NO: 15238663 NR Description: cation exchanger, putative (CAX8) [Arabidopsis
  misc_feature (110)..(343): Homolog of NCBI NO: 18087575 NR Description: AT5g17860/MVA3_210 [Arabidopsis thaliana]
  misc_feature (431)..(682): Homolog of NCBI NO: 15238663 NR Description: cation exchanger, putative (CAX8) [Arabidopsis
  misc_feature (431)..(684): Homolog of NCBI NO: 18087575 NR Description: AT5g17860/MVA3_210 [Arabidopsis thaliana]
  misc_feature (110)..(343): Homolog of NCBI NO: 15238665 NR Description: cation exchanger, putative (CAX7) [Arabidopsis
  misc_feature (431)..(684): Homolog of NCBI NO: 15238665 NR Description: cation exchanger, putative (CAX7) [Arabidopsis
  misc_feature (70)..(685): Homolog of NCBI NO: 18400266 NR Description: cation exchanger, putative (CAX9) [Arabidopsis
  misc_feature (119)..(685): Homolog of NCBI NO: 18404796 NR Description: cation exchanger, putative [Arabidopsis thaliana]
  misc_feature (55)..(690): Homolog of NCBI NO: 24960738 NR Description: Putative potassium-dependent sodium-calcium
LLPHIVVNPQFPNHALRRPNPNLGSPEARQIRQPSPQIGHASPPKLQPVTSPETMASLPPHPRRIRPIAVASLVLFLLFLYTRSDGNPPRLPGSDSRPLHRRLLSGADPASPAASRGGNLSEVTGLNGEQLENPSTACAGIDRHEGFGSQCEFLRAHPQCSSGGFVDYLDFFYCRCERFRLLGYAVLAVCLAALFYMLGNTAADYFCCSLEKMSALLRLPPTVAGVTLLPFGNGAPDVFASIAAFMGSGAGDVGLNSVLGGAVFVTCVVVGAVSLSVAEKNVQIDWRCFVRDVGFFLITLVALSIMLIVGKVTVWGAMLFVSIYVVYAFVVAANELLRKHARMLKFDVVTPLLPVRGSIFSHGLEDDDSVYSSLLEEDTSDDAAQVNTSLPQWMWASHVAIYSNQGRDGSPDRPLWGWNEEGRVDTSTLNYSKLFLFLELPLTIPRKLTIPIVEEDRWSQEYAVASAGLAPLLLAFLWNSQDGVSTGASVAAYVIAGIFGIALAGLAFTFTSPDRPPRRYLLPWVFGGFVMSIVWFYIIANELVALLVAFGVILGINPSILGLTVLAWGNSMGDLMSNVALAMNGGDGVQIAMSGCYAGPMFNTLAGLGISMLLGAWSTAPNSYVLPQDRSLIYTMSFLVAGLIWALVTLPRSGMRPNKTLGVGLIALYSVFLFIRVSSAMGILPLPGLN

SEQ ID NO: 63281 - protein, 636 aa, Triticum aestivum
  peptide (1)..(636): Ceres Seq. ID no. 14314098
  misc_feature (480)..(622): Pfam Name: Sodium/calcium exchanger protein Pfam Description: Sodium/calcium exchanger protein
  misc_feature (53)..(340): Homolog of NCBI NO: 18483233 NR Description: K-exchanger-like protein [Sorghum bicolor]
  misc_feature (84)..(277): Homolog of NCBI NO: 15238663 NR Description: cation exchanger, putative (CAX8) [Arabidopsis
  misc_feature (56)..(289): Homolog of NCBI NO: 18087575 NR Description: AT5g17860/MVA3_210 [Arabidopsis thaliana]
  misc_feature (377)..(628): Homolog of NCBI NO: 15238663 NR Description: cation exchanger, putative (CAX8) [Arabidopsis
  misc_feature (377)..(630): Homolog of NCBI NO: 18087575 NR Description: AT5g17860/MVA3_210 [Arabidopsis thaliana]
  misc_feature (56)..(289): Homolog of NCBI NO: 15238665 NR Description: cation exchanger, putative (CAX7) [Arabidopsis
  misc_feature (377)..(630): Homolog of NCBI NO: 15238665 NR Description: cation exchanger, putative (CAX7) [Arabidopsis
  misc_feature (16)..(631): Homolog of NCBI NO: 18400266 NR Description: cation exchanger, putative (CAX9) [Arabidopsis
  misc_feature (65)..(631): Homolog of NCBI NO: 18404796 NR Description: cation exchanger, putative [Arabidopsis thaliana]
  misc_feature (1)..(636): Homolog of NCBI NO: 24960738 NR Description: Putative potassium-dependent sodium-calcium
MASLPPHPRRIRPIAVASLVLFLLFLYTRSDGNPPRLPGSDSRPLHRRLLSGADPASPAASRGGNLSEVTGLNGEQLENPSTACAGIDRHEGFGSQCEFLRAHPQCSSGGFVDYLDFFYCRCERFRLLGYAVLAVCLAALFYMLGNTAADYFCCSLEKMSALLRLPPTVAGVTLLPFGNGAPDVFASIAAFMGSGAGDVGLNSVLGGAVFVTCVVVGAVSLSVAEKNVQIDWRCFVRDVGFFLITLVALSIMLIVGKVTVWGAMLFVSIYVVYAFVVAANELLRKHARMLKFDVVTPLLPVRGSIFSHGLEDDDSVYSSLLEEDTSDDAAQVNTSLPQWMWASHVAIYSNQGRDGSPDRPLWGWNEEGRVDTSTLNYSKLFLFLELPLTIPRKLTIPIVEEDRWSQEYAVASAGLAPLLLAFLWNSQDGVSTGASVAAYVIAGIFGIALAGLAFTFTSPDRPPRRYLLPWVFGGFVMSIVWFYIIANELVALLVAFGVILGINPSILGLTVLAWGNSMGDLMSNVALAMNGGDGVQIAMSGCYAGPMFNTLAGLGISMLLGAWSTAPNSYVLPQDRSLIYTMSFLVAGLIWALVTLPRSGMRPNKTLGVGLIALYSVFLFIRVSSAMGILPLPGLN

SEQ ID NO: 63282 - protein, 494 aa, Triticum aestivum
  peptide (1)..(494): Ceres Seq. ID no. 14314099
  misc_feature (338)..(480): Pfam Name: Sodium/calcium exchanger protein Pfam Description: Sodium/calcium exchanger protein
  misc_feature (1)..(198): Homolog of NCBI NO: 18483233 NR Description: K-exchanger-like protein [Sorghum bicolor]
  misc_feature (1)..(135): Homolog of NCBI NO: 15238663 NR Description: cation exchanger, putative (CAX8) [Arabidopsis
  misc_feature (1)..(147): Homolog of NCBI NO: 18087575 NR Description: AT5g17860/MVA3_210 [Arabidopsis thaliana]
  misc_feature (235)..(486): Homolog of NCBI NO: 15238663 NR Description: cation exchanger, putative (CAX8) [Arabidopsis
  misc_feature (235)..(488): Homolog of NCBI NO: 18087575 NR Description: AT5g17860/MVA3_210 [Arabidopsis thaliana]
  misc_feature (1)..(147): Homolog of NCBI NO: 15238665 NR Description: cation exchanger, putative (CAX7) [Arabidopsis
  misc_feature (235)..(488): Homolog of NCBI NO: 15238665 NR Description: cation exchanger, putative (CAX7) [Arabidopsis
  misc_feature (1)..(489): Homolog of NCBI NO: 18400266 NR Description: cation exchanger, putative (CAX9) [Arabidopsis
  misc_feature (1)..(489): Homolog of NCBI NO: 18404796 NR Description: cation exchanger, putative [Arabidopsis thaliana]
  misc_feature (1)..(494): Homolog of NCBI NO: 24960738 NR Description: Putative potassium-dependent sodium-calcium
MLGNTAADYFCCSLEKMSALLRLPPTVAGVTLLPFGNGAPDVFASIAAFMGSGAGDVGLNSVLGGAVFVTCVVVGAVSLSVAEKNVQIDWRCFVRDVGFFLITLVALSIMLIVGKVTVWGAMLFVSIYVVYAFVVAANELLRKHARMLKFDVVTPLLPVRGSIFSHGLEDDDSVYSSLLEEDTSDDAAQVNTSLPQWMWASHVAIYSNQGRDGSPDRPLWGWNEEGRVDTSTLNYSKLFLFLELPLTIPRKLTIPIVEEDRWSQEYAVASAGLAPLLLAFLWNSQDGVSTGASVAAYVIAGIFGIALAGLAFTFTSPDRPPRRYLLPWVFGGFVMSIVWFYIIANELVALLVAFGVILGINPSILGLTVLAWGNSMGDLMSNVALAMNGGDGVQIAMSGCYAGPMFNTLAGLGISMLLGAWSTAPNSYVLPQDRSLIYTMSFLVAGLIWALVTLPRSGMRPNKTLGVGLIALYSVFLFIRVSSAMGILPLPGLN

SEQ ID NO: 63283 - DNA, 1169 bp, Triticum aestivum
  misc_feature (1)..(1169): Ceres Seq. ID no. 13655404
ccagctctagcagtcccggctttccctgctcgcctcgcagtcgccgccgccgccgccagccatgggtcgcaccaaggacgagctcctcgcgcgcctcgaggagcttaagattgatttcaagcgctacgaccacccggttgtgctgacggtcgaggaacaggccaaacatgtgggaagttttggaggtgctttgaccaagaatctgcttctgaaggacaagaagcatcgcttgtacattgtttctgcacttgctgacaccaaagttgacatgaaaattctgtcccagcgtcttggcttgggaaaaggtggtgtgcgaatggctcctgaggagaatttgcgtcaagtgcttcaggtaccgttaggatgtgttactccgtttgcgctattcaatgagtccgcgagtgccgtctcattattactggaccaagggttcaagtctaaacagagctgctacttccatccactgacaaatgatgtgactattgccctcagttcaagcaacctggacaagtttctcctctccattgggaagcaaccagcttatgtagacttggaggcctcaccagtggtaggtaaagataatccccctgatctagcagatcttgtgccttctggtgcactctgttcctcagaagaatcagttgagaatccgactcctaaagatgctcctcaagtcaacgtacccaaacagaaaacgtgtctaccagaagtgaaggctaagcccaaagttcagaacaagggtgcagaaagttcagagagtaaagttcctactaataatggcgcaaatgttgagatatttgcaagtgatgtgcttgaggtcatcttcccattgttcctgtctgagacatcaaagaaattgaatattaaacaggaagagcttactcaaattttaaaattagatgactttaaacgacgagctgctccagatctggagagtgcaacgaatatgttcaaaaacatggcatacagtgcaggatttcacgctggcttcgataccatgctcaagtcgggtttaggtgggatgccctctcggaaatagtgggttaattcgatatagaagactgtgagttgattcagtcaatttttgtatgccccttggtgtaaaatcaaatcataccatatagtacttattatgttgaatgattcgattgaatgtatcaccttaagcc

SEQ ID NO: 63284 - protein, 325 aa, Triticum aestivum
  peptide (1)..(325): Ceres Seq. ID no. 13655405
  misc_feature (14)..(164): Pfam Name: YbaK / prolyl-tRNA synthetases associated domain Pfam Description: YbaK / prolyl-tRNA synthetases associated domain
  misc_feature (1)..(166): Homolog of NCBI NO: 13473736 NR Description: hypothetical protein, putative DNA-binding
  misc_feature (1)..(165): Homolog of NCBI NO: 34783837 NR Description: Unknown (protein for MGC:64201) [Danio rerio]
  misc_feature (7)..(165): Homolog of NCBI NO: 21312706 NR Description: RIKEN cDNA 2010316F05 [Mus musculus]
  misc_feature (11)..(165): Homolog of NCBI NO: 27676960 NR Description: similar to RIKEN cDNA 2010316F05
  misc_feature (4)..(171): Homolog of NCBI NO: 22968624 NR Description: hypothetical protein [Rhodospirillum rubrum]
  misc_feature (3)..(171): Homolog of NCBI NO: 16124366 NR Description: DNA-binding protein, putative [Caulobacter
  misc_feature (1)..(97): Homolog of NCBI NO: 25405166 NR Description: hypothetical protein T12C22.11 [imported] -
  misc_feature (164)..(309): Homolog of NCBI NO: 25405166 NR Description: hypothetical protein T12C22.11 [imported] -
  misc_feature (86)..(309): Homolog of NCBI NO: 7271117 NR Description: 25.7 kDa protein [Cicer arietinum]
  misc_feature (1)..(309): Homolog of NCBI NO: 30693857 NR Description: expressed protein [Arabidopsis thaliana]
MGRTKDELLARLEELKIDFKRYDHPVVLTVEEQAKHVGSFGGALTKNLLLKDKKHRLYIVSALADTKVDMKILSQRLGLGKGGVRMAPEENLRQVLQVPLGCVTPFALFNESASAVSLLLDQGFKSKQSCYFHPLTNDVTIALSSSNLDKFLLSIGKQPAYVDLEASPVVGKDNPPDLADLVPSGALCSSEESVENPTPKDAPQVNVPKQKTCLPEVKAKPKVQNKGAESSESKVPTNNGANVEIFASDVLEVIFPLFLSETSKKLNIKQEELTQILKLDDFKRRAAPDLESATNMFKNMAYSAGFHAGFDTMLKSGLGGMPSRK

SEQ ID NO: 63285 - protein, 256 aa, Triticum aestivum
  peptide (1)..(256): Ceres Seq. ID no. 13655406
  misc_feature (1)..(95): Pfam Name: YbaK / prolyl-tRNA synthetases associated domain Pfam Description: YbaK / prolyl-tRNA synthetases associated domain
  misc_feature (1)..(97): Homolog of NCBI NO: 13473736 NR Description: hypothetical protein, putative DNA-binding
  misc_feature (1)..(96): Homolog of NCBI NO: 34783837 NR Description: Unknown (protein for MGC:64201) [Danio rerio]
  misc_feature (1)..(96): Homolog of NCBI NO: 21312706 NR Description: RIKEN cDNA 2010316F05 [Mus musculus]
  misc_feature (1)..(96): Homolog of NCBI NO: 27676960 NR Description: similar to RIKEN cDNA 2010316F05
  misc_feature (1)..(102): Homolog of NCBI NO: 22968624 NR Description: hypothetical protein [Rhodospirillum rubrum]
  misc_feature (1)..(102): Homolog of NCBI NO: 16124366 NR Description: DNA-binding protein, putative [Caulobacter
  misc_feature (1)..(28): Homolog of NCBI NO: 25405166 NR Description: hypothetical protein T12C22.11 [imported] -
  misc_feature (95)..(240): Homolog of NCBI NO: 25405166 NR Description: hypothetical protein T12C22.11 [imported] -
  misc_feature (17)..(240): Homolog of NCBI NO: 7271117 NR Description: 25.7 kDa protein [Cicer arietinum]
  misc_feature (1)..(240): Homolog of NCBI NO: 30693857 NR Description: expressed protein [Arabidopsis thaliana]
MKILSQRLGLGKGGVRMAPEENLRQVLQVPLGCVTPFALFNESASAVSLLLDQGFKSKQSCYFHPLTNDVTIALSSSNLDKFLLSIGKQPAYVDLEASPVVGKDNPPDLADLVPSGALCSSEESVENPTPKDAPQVNVPKQKTCLPEVKAKPKVQNKGAESSESKVPTNNGANVEIFASDVLEVIFPLFLSETSKKLNIKQEELTQILKLDDFKRRAAPDLESATNMFKNMAYSAGFHAGFDTMLKSGLGGMPSRK

SEQ ID NO: 63286 - protein, 240 aa, Triticum aestivum
  peptide (1)..(240): Ceres Seq. ID no. 13655407
  misc_feature (1)..(79): Pfam Name: YbaK / prolyl-tRNA synthetases associated domain Pfam Description: YbaK / prolyl-tRNA synthetases associated domain
  misc_feature (1)..(81): Homolog of NCBI NO: 13473736 NR Description: hypothetical protein, putative DNA-binding
  misc_feature (1)..(80): Homolog of NCBI NO: 34783837 NR Description: Unknown (protein for MGC:64201) [Danio rerio]
  misc_feature (1)..(80): Homolog of NCBI NO: 21312706 NR Description: RIKEN cDNA 2010316F05 [Mus musculus]
  misc_feature (1)..(80): Homolog of NCBI NO: 27676960 NR Description: similar to RIKEN cDNA 2010316F05
  misc_feature (1)..(86): Homolog of NCBI NO: 22968624 NR Description: hypothetical protein [Rhodospirillum rubrum]
  misc_feature (1)..(86): Homolog of NCBI NO: 16124366 NR Description: DNA-binding protein, putative [Caulobacter
  misc_feature (1)..(12): Homolog of NCBI NO: 25405166 NR Description: hypothetical protein T12C22.11 [imported] -
  misc_feature (79)..(224): Homolog of NCBI NO: 25405166 NR Description: hypothetical protein T12C22.11 [imported] -
  misc_feature (1)..(224): Homolog of NCBI NO: 7271117 NR Description: 25.7 kDa protein [Cicer arietinum]
  misc_feature (1)..(224): Homolog of NCBI NO: 30693857 NR Description: expressed protein [Arabidopsis thaliana]
MAPEENLRQVLQVPLGCVTPFALFNESASAVSLLLDQGFKSKQSCYFHPLTNDVTIALSSSNLDKFLLSIGKQPAYVDLEASPVVGKDNPPDLADLVPSGALCSSEESVENPTPKDAPQVNVPKQKTCLPEVKAKPKVQNKGAESSESKVPTNNGANVEIFASDVLEVIFPLFLSETSKKLNIKQEELTQILKLDDFKRRAAPDLESATNMFKNMAYSAGFHAGFDTMLKSGLGGMPSRK

SEQ ID NO: 63287 - DNA, 1439 bp, Triticum aestivum
  misc_feature (1)..(1439): Ceres Seq. ID no. 14302820
gaaaagcaaatcgtgcccaaccaaaccctagccccctccccagcccatggcgaagttcggcgagggcgacgctcggtggatcgtgcaggagcgcgccgacggtgccaacgtccacaactggcactgggcggagcgcgactgtctcgactggtctcgcgcgcttctctccaagctcctcgcgggcctccccgtcctctccggagagggcggcctcaccctccgcaccaccaccctcgacaagctcgatggcgaggcctacgtcaacatccgcaagggcaaggtcatcccagggtacgagctttccctcacgctcgcctgggaggccgatgccacaaccgagtcgggggtcgtcaaggtcaccggcaccgctgaggtaccctacctcgctgacgagaacgccgacgaggaccccgaactccgcatcactgttcgcggtgacgacggccccctcgcgcgccgggccaaggatgccttcatcgcccatggcaagcctctggttattacgaagatccgggattatgtcgccgccatggcgaatggtggccccgccaaggacgagatagattctaagaagatttccaccaaggctgccccagcggccggtggcgcagctgttgctcctgctccttcagtgaaggtaacagcagcgccagtgcaggcgccagcagctaaggagaagaaggcgaatggcaaggataaggaaggattcaagactatcgagatgacagagaagttcaactgccgctccaaggacatctatgagatcttgatggatgacaacaggtggaagggtttcacacagagcaatgcgaggatcagcaaggatgttggtgggcagtttagcctctttgatgggtccatcacaggtgttaatgaggagctgcaggaagggaagctgatcgtgcagaaatggcggtttgggagctgggctgatggcgtccattctacagtcaggttggtgtttgatgagcctgagtcaggagtgacaacaataaagctcaaacaaactgatgtgccagaggaagacaggtatgggaactcaaccgtggtggagaacactgagagaggctggaaagagctcatcttccagaggatacgtgcagtgttcggttttggggtctgaaaaagcatctttgacatccagcttcaatgaagtcgatcctgccttttcatggctatccatgttttgctgtcttagtttattcgatgctgatcgacacacaaaacttcgtgaacttccgggaattgaaaaatactccgtgttaccttgtattcatcacgctgggttgtgctttgaagtcgtcactcatgaaagtttgagcttgtgactcatgtagaggccggcgaaagatggtcgctgagtgactattatttttattccttgcgtctgtatgacatggtaccagataaattgtattgaagtttctagttctacaagc

SEQ ID NO: 63288 - protein, 358 aa, Triticum aestivum
  peptide (1)..(358): Ceres Seq. ID no. 14302821
  misc_feature (219)..(358): Pfam Name: Aha1 domain Pfam Description: Aha1 domain
  misc_feature (1)..(328): Homolog of NCBI NO: 6912280 NR Description: AHA1, activator of heat shock 90kDa protein
  misc_feature (224)..(324): Homolog of NCBI NO: 39850089 NR Description: RIKEN cDNA 1110064P04 [Mus musculus]
  misc_feature (1)..(180): Homolog of NCBI NO: 39850089 NR Description: RIKEN cDNA 1110064P04 [Mus musculus]
  misc_feature (1)..(328): Homolog of NCBI NO: 22122515 NR Description: AHA1, activator of heat shock 90kDa protein
  misc_feature (1)..(358): Homolog of NCBI NO: 24585720 NR Description: CG1416-PA [Drosophila melanogaster]
  misc_feature (1)..(357): Homolog of NCBI NO: 40786381 NR Description: Bm44 [Bombyx mori]
  misc_feature (1)..(68): Homolog of NCBI NO: 30682028 NR Description: expressed protein [Arabidopsis thaliana]
  misc_feature (89)..(358): Homolog of NCBI NO: 30682028 NR Description: expressed protein [Arabidopsis thaliana]
  misc_feature (1)..(358): Homolog of NCBI NO: 18399461 NR Description: expressed protein [Arabidopsis thaliana]
  misc_feature (1)..(358): Homolog of NCBI NO: 21539453 NR Description: unknown protein [Arabidopsis thaliana]
MAKFGEGDARWIVQERADGANVHNWHWAERDCLDWSRALLSKLLAGLPVLSGEGGLTLRTTTLDKLDGEAYVNIRKGKVIPGYELSLTLAWEADATTESGVVKVTGTAEVPYLADENADEDPELRITVRGDDGPLARRAKDAFIAHGKPLVITKIRDYVAAMANGGPAKDEIDSKKISTKAAPAAGGAAVAPAPSVKVTAAPVQAPAAKEKKANGKDKEGFKTIEMTEKFNCRSKDIYEILMDDNRWKGFTQSNARISKDVGGQFSLFDGSITGVNEELQEGKLIVQKWRFGSWADGVHSTVRLVFDEPESGVTTIKLKQTDVPEEDRYGNSTVVENTERGWKELIFQRIRAVFGFGV

SEQ ID NO: 63289 - protein, 197 aa, Triticum aestivum
  peptide (1)..(197): Ceres Seq. ID no. 14302822
  misc_feature (58)..(197): Pfam Name: Aha1 domain Pfam Description: Aha1 domain
  misc_feature (1)..(19): Homolog of NCBI NO: 31982558 NR Description: RIKEN cDNA 1110064P04 [Mus musculus]
  misc_feature (1)..(167): Homolog of NCBI NO: 6912280 NR Description: AHA1, activator of heat shock 90kDa protein
  misc_feature (63)..(163): Homolog of NCBI NO: 39850089 NR Description: RIKEN cDNA 1110064P04 [Mus musculus]
  misc_feature (1)..(19): Homolog of NCBI NO: 39850089 NR Description: RIKEN cDNA 1110064P04 [Mus musculus]
  misc_feature (1)..(167): Homolog of NCBI NO: 22122515 NR Description: AHA1, activator of heat shock 90kDa protein
  misc_feature (1)..(197): Homolog of NCBI NO: 24585720 NR Description: CG1416-PA [Drosophila melanogaster]
  misc_feature (1)..(196): Homolog of NCBI NO: 40786381 NR Description: Bm44 [Bombyx mori]
  misc_feature (1)..(197): Homolog of NCBI NO: 30682028 NR Description: expressed protein [Arabidopsis thaliana]
  misc_feature (1)..(197): Homolog of NCBI NO: 18399461 NR Description: expressed protein [Arabidopsis thaliana]
  misc_feature (1)..(197): Homolog of NCBI NO: 21539453 NR Description: unknown protein [Arabidopsis thaliana]
MANGGPAKDEIDSKKISTKAAPAAGGAAVAPAPSVKVTAAPVQAPAAKEKKANGKDKEGFKTIEMTEKFNCRSKDIYEILMDDNRWKGFTQSNARISKDVGGQFSLFDGSITGVNEELQEGKLIVQKWRFGSWADGVHSTVRLVFDEPESGVTTIKLKQTDVPEEDRYGNSTVVENTERGWKELIFQRIRAVFGFGV

SEQ ID NO: 63290 - protein, 186 aa, Triticum aestivum
  peptide (1)..(186): Ceres Seq. ID no. 14302823
  misc_feature (36)..(152): Pfam Name: Equine herpesvirus glycoprotein gp2 Pfam Description: Equine herpesvirus glycoprotein gp2
  misc_feature (7)..(160): Homolog of NCBI NO: 9630030 NR Description: unknown [Orgyia pseudotsugata multicapsid
  misc_feature (2)..(186): Homolog of NCBI NO: 25408663 NR Description: En/Spm-like transposon protein [imported] -
  misc_feature (2)..(163): Homolog of NCBI NO: 5420387 NR Description: proteophosphoglycan [Leishmania major]
  misc_feature (2)..(163): Homolog of NCBI NO: 11359723 NR Description: proteophosphoglycan, membrane-associated
  misc_feature (2)..(163): Homolog of NCBI NO: 5420387 NR Description: proteophosphoglycan [Leishmania major]
  misc_feature (9)..(159): Homolog of NCBI NO: 11359723 NR Description: proteophosphoglycan, membrane-associated
  misc_feature (2)..(163): Homolog of NCBI NO: 13592175 NR Description: ppg3 [Leishmania major]
  misc_feature (2)..(163): Homolog of NCBI NO: 32699068 NR Description: hypothetical protein FLJ35107 [Homo sapiens]
  misc_feature (7)..(160): Homolog of NCBI NO: 38175466 NR Description: putative high-affinity potassium transporter
  misc_feature (10)..(163): Homolog of NCBI NO: 32699068 NR Description: hypothetical protein FLJ35107 [Homo sapiens]
KANRAQPNPSPLPSPWRSSARATLGGSCRSAPTVPTSTTGTGRSATVSTGLARFSPSSSRASPSSPERAASPSAPPPSTSSMARPTSTSARARSSQGTSFPSRSPGRPMPQPSRGSSRSPAPLRYPTSLTRTPTRTPNSASLFAVTTAPSRAGPRMPSSPMASLWLLRRSGIMSPPWRMVAPPRTR

SEQ ID NO: 63291 - DNA, 1203 bp, Triticum aestivum
  misc_feature (1)..(1203): Ceres Seq. ID no. 12616221
gatatccctctcggtagacggtacaatcataccgatcaggagccagctgctgcttcttgtgttgtgttggtcccactgccgagatcggcagcagaagcagccgtcggtcctctgtacctctcgttgatcgcttgatccgaggggatccgaggggatccaaggcgagctgcgtgcgtggtggcggcgatgagttcgctgagcatggtggaggcgaggctgccgccgggcttcaggttccacccacgggacgacgagctcgtgctcgactacctgtccaggaagctcggcggcggtggcgccggaggggcggcggccgcggtggcgagcatctacggctgccccgccatggtcgacgtcgacctcaacaagatcgagccctgggacctccccgaaatcgcatgcattggcggcaaggagtggtacttctacagcttaagggacaagaagtacgctacaggccagcgaacaaatagagcaactgaatcaggctactggaaggccacagggaaagaccgtgcgataagccggaaagggttgctagttggcatgagaaaaaccctggtgttttatgaaggtagagcccctaaagggaagaagactgaatgggtcatgcacgaattccgcaaggaagggcaaggcgatctgatgaagttgccactcaaggaggactgggtcttgtgtagggttttttacaagaccaggacaaccattgccaaaccatccacagggagcaactacaacattgacagtgcagccgcaacctcactgcctcctctcattgacaactacattgcctttgaccatcctggaatgtccacggtgcaaaacctagagggttatgagcaagtgccctgcttctccaatggcccctcctctcacccgtcgtcgtcggcctcgatgaacatcccggtgatggcgatggcgcccatggctgccgatcaggagcagcagcacatggggaaggcgatcaaggacgcgctgagccagctcaccaggtttgagcaaggcaacgtgaaaagggaggcgcctgcccagggtggtgtgtttgctcaagatgggttcgagtacttagctgagagtggcttttcacagatgtggaactcactcagttgattttctagctaggggtattattgctagtgctaccaatcaaagatctacattttctccacccgcaaaaataaagatctacattttcttgcg

SEQ ID NO: 63292 - protein, 308 aa, Triticum aestivum
  peptide (1)..(308): Ceres Seq. ID no. 12616222
  misc_feature (11)..(148): Pfam Name: No apical meristem (NAM) protein Pfam Description: No apical meristem (NAM) protein
  misc_feature (7)..(199): Homolog of NCBI NO: 40737029 NR Description: putative OsNAC1 protein [Oryza sativa (japonica
  misc_feature (7)..(68): Homolog of NCBI NO: 5679845 NR Description: l1332.9 [Oryza sativa (indica cultivar-group)]
  misc_feature (69)..(149): Homolog of NCBI NO: 5679845 NR Description: l1332.9 [Oryza sativa (indica cultivar-group)]
  misc_feature (8)..(234): Homolog of NCBI NO: 1279640 NR Description: NAM [Petunia x hybrida]
  misc_feature (7)..(68): Homolog of NCBI NO: 5852096 NR Description: zwh19.1 [Oryza sativa (indica cultivar-group)]
  misc_feature (69)..(149): Homolog of NCBI NO: 5852096 NR Description: zwh19.1 [Oryza sativa (indica cultivar-group)]
  misc_feature (3)..(270): Homolog of NCBI NO: 15795128 NR Description: NAM (no apical meristem) protein-like
  misc_feature (2)..(226): Homolog of NCBI NO: 15222818 NR Description: NAC1
  misc_feature (1)..(245): Homolog of NCBI NO: 38636961 NR Description: putative NAC domain protein NAC1
  misc_feature (1)..(306): Homolog of NCBI NO: 15148912 NR Description: NAC domain protein NAC1 [Phaseolus vulgaris]
MSSLSMVEARLPPGFRFHPRDDELVLDYLSRKLGGGGAGGAAAAVASIYGCPAMVDVDLNKIEPWDLPEIACIGGKEWYFYSLRDKKYATGQRTNRATESGYWKATGKDRAISRKGLLVGMRKTLVFYEGRAPKGKKTEWVMHEFRKEGQGDLMKLPLKEDWVLCRVFYKTRTTIAKPSTGSNYNIDSAAATSLPPLIDNYIAFDHPGMSTVQNLEGYEQVPCFSNGPSSHPSSSASMNIPVMAMAPMAADQEQQHMGKAIKDALSQLTRFEQGNVKREAPAQGGVFAQDGFEYLAESGFSQMWNSLS

SEQ ID NO: 63293 - protein, 303 aa, Triticum aestivum
  peptide (1)..(303): Ceres Seq. ID no. 12616223
  misc_feature (6)..(143): Pfam Name: No apical meristem (NAM) protein Pfam Description: No apical meristem (NAM) protein
  misc_feature (2)..(194): Homolog of NCBI NO: 40737029 NR Description: putative OsNAC1 protein [Oryza sativa (japonica
  misc_feature (2)..(63): Homolog of NCBI NO: 5679845 NR Description: l1332.9 [Oryza sativa (indica cultivar-group)]
  misc_feature (64)..(144): Homolog of NCBI NO: 5679845 NR Description: l1332.9 [Oryza sativa (indica cultivar-group)]
  misc_feature (3)..(229): Homolog of NCBI NO: 1279640 NR Description: NAM [Petunia x hybrida]
  misc_feature (2)..(63): Homolog of NCBI NO: 5852096 NR Description: zwh19.1 [Oryza sativa (indica cultivar-group)]
  misc_feature (64)..(144): Homolog of NCBI NO: 5852096 NR Description: zwh19.1 [Oryza sativa (indica cultivar-group)]
  misc_feature (1)..(265): Homolog of NCBI NO: 15795128 NR Description: NAM (no apical meristem) protein-like
  misc_feature (1)..(221): Homolog of NCBI NO: 15222818 NR Description: NAC1
  misc_feature (1)..(240): Homolog of NCBI NO: 38636961 NR Description: putative NAC domain protein NAC1
  misc_feature (1)..(301): Homolog of NCBI NO: 15148912 NR Description: NAC domain protein NAC1 [Phaseolus vulgaris]
MVEARLPPGFRFHPRDDELVLDYLSRKLGGGGAGGAAAAVASIYGCPAMVDVDLNKIEPWDLPEIACIGGKEWYFYSLRDKKYATGQRTNRATESGYWKATGKDRAISRKGLLVGMRKTLVFYEGRAPKGKKTEWVMHEFRKEGQGDLMKLPLKEDWVLCRVFYKTRTTIAKPSTGSNYNIDSAAATSLPPLIDNYIAFDHPGMSTVQNLEGYEQVPCFSNGPSSHPSSSASMNIPVMAMAPMAADQEQQHMGKAIKDALSQLTRFEQGNVKREAPAQGGVFAQDGFEYLAESGFSQMWNSLS

SEQ ID NO: 63294 - protein, 255 aa, Triticum aestivum
  peptide (1)..(255): Ceres Seq. ID no. 12616224
  misc_feature (1)..(95): Pfam Name: No apical meristem (NAM) protein Pfam Description: No apical meristem (NAM) protein
  misc_feature (1)..(146): Homolog of NCBI NO: 40737029 NR Description: putative OsNAC1 protein [Oryza sativa (japonica
  misc_feature (1)..(15): Homolog of NCBI NO: 5679845 NR Description: l1332.9 [Oryza sativa (indica cultivar-group)]
  misc_feature (16)..(96): Homolog of NCBI NO: 5679845 NR Description: l1332.9 [Oryza sativa (indica cultivar-group)]
  misc_feature (1)..(181): Homolog of NCBI NO: 1279640 NR Description: NAM [Petunia x hybrida]
  misc_feature (1)..(15): Homolog of NCBI NO: 5852096 NR Description: zwh19.1 [Oryza sativa (indica cultivar-group)]
  misc_feature (16)..(96): Homolog of NCBI NO: 5852096 NR Description: zwh19.1 [Oryza sativa (indica cultivar-group)]
  misc_feature (1)..(217): Homolog of NCBI NO: 15795128 NR Description: NAM (no apical meristem) protein-like
  misc_feature (1)..(173): Homolog of NCBI NO: 15222818 NR Description: NAC1
  misc_feature (1)..(192): Homolog of NCBI NO: 38636961 NR Description: putative NAC domain protein NAC1
  misc_feature (1)..(253): Homolog of NCBI NO: 15148912 NR Description: NAC domain protein NAC1 [Phaseolus vulgaris]
MVDVDLNKIEPWDLPEIACIGGKEWYFYSLRDKKYATGQRTNRATESGYWKATGKDRAISRKGLLVGMRKTLVFYEGRAPKGKKTEWVMHEFRKEGQGDLMKLPLKEDWVLCRVFYKTRTTIAKPSTGSNYNIDSAAATSLPPLIDNYIAFDHPGMSTVQNLEGYEQVPCFSNGPSSHPSSSASMNIPVMAMAPMAADQEQQHMGKAIKDALSQLTRFEQGNVKREAPAQGGVFAQDGFEYLAESGFSQMWNSLS

SEQ ID NO: 63295 - DNA, 1539 bp, Triticum aestivum
  misc_feature (1)..(1539): Ceres Seq. ID no. 15226382
ttcctccgtccggccgtccccctttcccctttcacaccgcaagaaaaccctcgcccaaatctacagcaaccaacgcccccgtttcatctacgagagctgcgagctcacaattccgcggagcagctcggccatggcgtcctccgtcgccggcgggttgccgtcgaggtccgccatcgtggccgacacgaccagcgggcaccaccttctcaccatccacggctactcccgcaccaaggacatacccaccggagagcgcgtcaagtctcaccctttcatcatcggcggccatcgctggcggatcgactactaccccggcggcgtgcgcccggaggtcgcggactacgtgtccctctccctgatactagaggaagatggcccggcgccggtgaaggcccagtacgacatctgcctcgttaccaaggaggaggaggcggagcaagccgcgtcgatggcgtcggcaccggtcgacgagttcgctccccggaagggctgggagtactccaagttcgtcaggagggtggagctggagagctcaaagtatctcaccaacgattcgttcaccgtccggtgcgatatcgttgtcgtccatggttaccgcgccgcggccggcatggcggccttggtctctgtgcccccatgtgacctgcgtgagaaccttggcaggctcctcgacaccgggatgggcgccgacgtggtgtttgaggtcggcggcgagaccgtcgcggcacaccggtgcgtgctcgcggcctgctctccggtgtttgccgcccaactctttggacccatgaaggagggtaatgccggcgtcgtgcgcgtggaagacatggacgcggaggtgttcaaggcgttgctccgtttcacatacgccggcttgctgccggagacgttcaaggaagacgcagtcgtatgccagcatctgctcgttgctgcggacaggtatggcatggggcggctaaagctgatctgcgagcagaagctgtgcgagtacatcgacatcggcacggcagcaaccatcctgacgctggccgagcagcaccgctgtgaggggctgaagaaggcctgcttcgattttctcgccgctccaccaaatctgagggaagtcgtggccaccgacggcttccagcatctgatcgcgagctgcccttctcttatggtcgagctcatggctatgtcccctacacattagccaagtgatggatatgcatgcctctgagtgttgtagcaatggtgaaacatggtttctaggctcatgtactaatctgggtacctctcttggtgtatccgtggctctacctagttaacaaccgagatgcaaaaattagcctcatttcgcccctgttttatcagttcattgcatctctaactgtgcctattaaccaggacgtgcgttggaatcagaggtgataaaatgctcaggtttttaggcaatggtagcttgtggtttcaggtctttgttatctgatattgcgcttgtggttccatggtttctgaaccttattgagataatactattatgttcttattatcacctactgtgct

SEQ ID NO: 63296 - protein, 394 aa, Triticum aestivum
  peptide (1)..(394): Ceres Seq. ID no. 15226383
  misc_feature (219)..(330): Pfam Name: BTB/POZ domain Pfam Description: BTB/POZ domain
  misc_feature (53)..(389): Homolog of NCBI NO: 37534588 NR Description: putative speckle-type protein
  misc_feature (44)..(394): Homolog of NCBI NO: 37534548 NR Description: putative speckle-type protein
  misc_feature (44)..(125): Homolog of NCBI NO: 37534590 NR Description: putative speckle-type protein
  misc_feature (168)..(390): Homolog of NCBI NO: 37534590 NR Description: putative speckle-type protein
  misc_feature (40)..(394): Homolog of NCBI NO: 37534532 NR Description: putative speckle-type protein
  misc_feature (44)..(394): Homolog of NCBI NO: 37534558 NR Description: putative speckle-type protein
  misc_feature (33)..(195): Homolog of NCBI NO: 37534534 NR Description: putative speckle-type protein
  misc_feature (201)..(390): Homolog of NCBI NO: 37534534 NR Description: putative speckle-type protein
  misc_feature (44)..(390): Homolog of NCBI NO: 37534574 NR Description: putative speckle-type protein
  misc_feature (45)..(394): Homolog of NCBI NO: 37534570 NR Description: putative speckle-type protein
SSVRPSPFPLSHRKKTLAQIYSNQRPRFIYESCELTIPRSSSAMASSVAGGLPSRSAIVADTTSGHHLLTIHGYSRTKDIPTGERVKSHPFIIGGHRWRIDYYPGGVRPEVADYVSLSLILEEDGPAPVKAQYDICLVTKEEEAEQAASMASAPVDEFAPRKGWEYSKFVRRVELESSKYLTNDSFTVRCDIVVVHGYRAAAGMAALVSVPPCDLRENLGRLLDTGMGADVVFEVGGETVAAHRCVLAACSPVFAAQLFGPMKEGNAGVVRVEDMDAEVFKALLRFTYAGLLPETFKEDAVVCQHLLVAADRYGMGRLKLICEQKLCEYIDIGTAATILTLAEQHRCEGLKKACFDFLAAPPNLREVVATDGFQHLIASCPSLMVELMAMSPTH

SEQ ID NO: 63297 - protein, 351 aa, Triticum aestivum
  peptide (1)..(351): Ceres Seq. ID no. 15226384
  misc_feature (176)..(287): Pfam Name: BTB/POZ domain Pfam Description: BTB/POZ domain
  misc_feature (10)..(346): Homolog of NCBI NO: 37534588 NR Description: putative speckle-type protein
  misc_feature (1)..(351): Homolog of NCBI NO: 37534548 NR Description: putative speckle-type protein
  misc_feature (1)..(82): Homolog of NCBI NO: 37534590 NR Description: putative speckle-type protein
  misc_feature (125)..(347): Homolog of NCBI NO: 37534590 NR Description: putative speckle-type protein
  misc_feature (1)..(351): Homolog of NCBI NO: 37534532 NR Description: putative speckle-type protein
  misc_feature (1)..(351): Homolog of NCBI NO: 37534558 NR Description: putative speckle-type protein
  misc_feature (1)..(152): Homolog of NCBI NO: 37534534 NR Description: putative speckle-type protein
  misc_feature (158)..(347): Homolog of NCBI NO: 37534534 NR Description: putative speckle-type protein
  misc_feature (1)..(347): Homolog of NCBI NO: 37534574 NR Description: putative speckle-type protein
  misc_feature (2)..(351): Homolog of NCBI NO: 37534570 NR Description: putative speckle-type protein
MASSVAGGLPSRSAIVADTTSGHHLLTIHGYSRTKDIPTGERVKSHPFIIGGHRWRIDYYPGGVRPEVADYVSLSLILEEDGPAPVKAQYDICLVTKEEEAEQAASMASAPVDEFAPRKGWEYSKFVRRVELESSKYLTNDSFTVRCDIVVVHGYRAAAGMAALVSVPPCDLRENLGRLLDTGMGADVVFEVGGETVAAHRCVLAACSPVFAAQLFGPMKEGNAGVVRVEDMDAEVFKALLRFTYAGLLPETFKEDAVVCQHLLVAADRYGMGRLKLICEQKLCEYIDIGTAATILTLAEQHRCEGLKKACFDFLAAPPNLREVVATDGFQHLIASCPSLMVELMAMSPTH

SEQ ID NO: 63298 - protein, 245 aa, Triticum aestivum
  peptide (1)..(245): Ceres Seq. ID no. 15226385
  misc_feature (70)..(181): Pfam Name: BTB/POZ domain Pfam Description: BTB/POZ domain
  misc_feature (1)..(239): Homolog of NCBI NO: 37534474 NR Description: hypothetical protein [Oryza sativa (japonica
  misc_feature (1)..(240): Homolog of NCBI NO: 37534588 NR Description: putative speckle-type protein
  misc_feature (1)..(245): Homolog of NCBI NO: 37534548 NR Description: putative speckle-type protein
  misc_feature (19)..(241): Homolog of NCBI NO: 37534590 NR Description: putative speckle-type protein
  misc_feature (1)..(245): Homolog of NCBI NO: 37534532 NR Description: putative speckle-type protein
  misc_feature (1)..(245): Homolog of NCBI NO: 37534558 NR Description: putative speckle-type protein
  misc_feature (1)..(46): Homolog of NCBI NO: 37534534 NR Description: putative speckle-type protein
  misc_feature (52)..(241): Homolog of NCBI NO: 37534534 NR Description: putative speckle-type protein
  misc_feature (1)..(241): Homolog of NCBI NO: 37534574 NR Description: putative speckle-type protein
  misc_feature (1)..(245): Homolog of NCBI NO: 37534570 NR Description: putative speckle-type protein
MASAPVDEFAPRKGWEYSKFVRRVELESSKYLTNDSFTVRCDIVVVHGYRAAAGMAALVSVPPCDLRENLGRLLDTGMGADVVFEVGGETVAAHRCVLAACSPVFAAQLFGPMKEGNAGVVRVEDMDAEVFKALLRFTYAGLLPETFKEDAVVCQHLLVAADRYGMGRLKLICEQKLCEYIDIGTAATILTLAEQHRCEGLKKACFDFLAAPPNLREVVATDGFQHLIASCPSLMVELMAMSPTH

SEQ ID NO: 63299 - DNA, 1667 bp, Triticum aestivum
  misc_feature (1)..(1667): Ceres Seq. ID no. 12625388
gcacaaggccccagtacagaacaacatagcggcacgcaacacgccagccgcagcaaagcaccggtgccgcgccgcttcctcaggacccaagtcacctgccatctcctccccagcagcggcaaactcgccaccgcacgcagcgacggcatggcgatgtctcgcgccgcggcagcggtcgggcggcgccggtgcgggccgcgcctgcccgcggcgaggtccatggcgtcgtggttcggccacgtggagccggccgccaaggaccccatcctcggcgtcaccgaggccttcctcgccgacccctcgccggacaaagtgaacgtcggcgtcggtgcgtaccgggacgacgacgggaagcccgtggtgctcgagtgcgtgcgcgaggcggagcggcgcatcgccgggagcaccaacatggagtaccttccaatgggaggaagcgtgaagatgatcgaggagtcgctgaagctggcatacggggaggattctgagttcatcaaggacaagaggattgcggcagtgcaggctctttcagggactggtgcatgtcgcctctttgcagatttccagaaacgcttcttgccggattcacagatctacatacctacgcctacatggtcaaaccatcacaacatttggagggatgcccaggtaccacaaagaacatttgcctactaccacccggaatcaagaggactggactttgcaggcctaatggatgatatcaagaacgctccagagggttccttctttttgcttcatgcatgtgctcacaatcccactggggtcgatccttctgaggaacagtggagagagatatctcaacaattcaaggtgaagaaccatttcccatttttcgacatggcataccaaggatttgccagtggtgacccagagagagatgccaaggcaattcggatctttctcgaagatggacatcaaattggatgtgcacagtcatatgcaaaaaacatgggactttatggccaaagagcaggatgccttagtattctctgcgacgatgaaatacaagcagttgatgtgaagagccagttacaacagattgccagacctatgtacagcaacccaccccttcacggcgcactaattgtttccactatccttggtgatccagcactgaaaagcttatggctgaaagaggtcaagggtatggctgatcgcattattggaatgcgaaaagcacttaaggagagccttgaaaagttgggttcaccattatcatgggaacatattactaatcagattggcatgttttgctacagcgggatgacacctgaacaagttgatcgcttaacaaatgaatttcacatatacatgactcgtaatggcaggataagcatggctggtgtaacaacaggaaatgtcgcatatttggctaacgctattcatgaggtcactaagccaatttaagaccccttcctccctcctgccattttgagaaataagaggagcctttcaacttcaagttgcagtttgcttttaatttccttaaaccttttatgttccaacaatgttgtttttatcaaacaatgtcccatattgttgtgacctatgggtgtgcaaatattgatttgtttcatcggagacacagaaaggaacactttattagtaagaactaaactgatcctaaaaaaaaaaaaaaaaaagct

SEQ ID NO: 63300 - protein, 475 aa, Triticum aestivum
  peptide (1)..(475): Ceres Seq. ID no. 12625389
  misc_feature (155)..(472): Pfam Name: Aminotransferase class I and II Pfam Description: Aminotransferase class I and II
  misc_feature (66)..(473): Homolog of NCBI NO: 4504069 NR Description: aspartate aminotransferase 2 precursor
  misc_feature (50)..(473): Homolog of NCBI NO: 33585662 NR Description: Glutamate oxaloacetate transaminase 2 [Xenopus
  misc_feature (66)..(473): Homolog of NCBI NO: 6754036 NR Description: glutamate oxaloacetate transaminase 2,
  misc_feature (66)..(473): Homolog of NCBI NO: 2690302 NR Description: aspartate aminotransferase precursor [Mus
  misc_feature (66)..(473): Homolog of NCBI NO: 6980972 NR Description: glutamate oxaloacetate transaminase 2
  misc_feature (65)..(473): Homolog of NCBI NO: 1362046 NR Description: aspartate transaminase (EC 2.6.1.1) precursor -
  misc_feature (50)..(473): Homolog of NCBI NO: 15224592 NR Description: aspartate aminotransferase (AAT1)
  misc_feature (51)..(473): Homolog of NCBI NO: 100726 NR Description: aspartate transaminase (EC 2.6.1.1) AAT1
  misc_feature (51)..(473): Homolog of NCBI NO: 100728 NR Description: aspartate transaminase (EC 2.6.1.1) AAT3
  misc_feature (50)..(473): Homolog of NCBI NO: 2130067 NR Description: aspartate transaminase (EC 2.6.1.1) precursor,
AQGPSTEQHSGTQHASRSKAPVPRRFLRTQVTCHLLPSSGKLATARSDGMAMSRAAAAVGRRRCGPRLPAARSMASWFGHVEPAAKDPILGVTEAFLADPSPDKVNVGVGAYRDDDGKPVVLECVREAERRIAGSTNMEYLPMGGSVKMIEESLKLAYGEDSEFIKDKRIAAVQALSGTGACRLFADFQKRFLPDSQIYIPTPTWSNHHNIWRDAQVPQRTFAYYHPESRGLDFAGLMDDIKNAPEGSFFLLHACAHNPTGVDPSEEQWREISQQFKVKNHFPFFDMAYQGFASGDPERDAKAIRIFLEDGHQIGCAQSYAKNMGLYGQRAGCLSILCDDEIQAVDVKSQLQQIARPMYSNPPLHGALIVSTILGDPALKSLWLKEVKGMADRIIGMRKALKESLEKLGSPLSWEHITNQIGMFCYSGMTPEQVDRLTNEFHIYMTRNGRISMAGVTTGNVAYLANAIHEVTKPI

SEQ ID NO: 63301 - protein, 426 aa, Triticum aestivum
  peptide (1)..(426): Ceres Seq. ID no. 12625390
  misc_feature (106)..(423): Pfam Name: Aminotransferase class I and II Pfam Description: Aminotransferase class I and II
  misc_feature (17)..(424): Homolog of NCBI NO: 4504069 NR Description: aspartate aminotransferase 2 precursor
  misc_feature (1)..(424): Homolog of NCBI NO: 33585662 NR Description: Glutamate oxaloacetate transaminase 2 [Xenopus
  misc_feature (17)..(424): Homolog of NCBI NO: 6754036 NR Description: glutamate oxaloacetate transaminase 2,
  misc_feature (17)..(424): Homolog of NCBI NO: 2690302 NR Description: aspartate aminotransferase precursor [Mus
  misc_feature (17)..(424): Homolog of NCBI NO: 6980972 NR Description: glutamate oxaloacetate transaminase 2
  misc_feature (16)..(424): Homolog of NCBI NO: 1362046 NR Description: aspartate transaminase (EC 2.6.1.1) precursor -
  misc_feature (1)..(424): Homolog of NCBI NO: 15224592 NR Description: aspartate aminotransferase (AAT1)
  misc_feature (2)..(424): Homolog of NCBI NO: 100726 NR Description: aspartate transaminase (EC 2.6.1.1) AAT1
  misc_feature (2)..(424): Homolog of NCBI NO: 100728 NR Description: aspartate transaminase (EC 2.6.1.1) AAT3
  misc_feature (1)..(424): Homolog of NCBI NO: 2130067 NR Description: aspartate transaminase (EC 2.6.1.1) precursor,
MAMSRAAAAVGRRRCGPRLPAARSMASWFGHVEPAAKDPILGVTEAFLADPSPDKVNVGVGAYRDDDGKPVVLECVREAERRIAGSTNMEYLPMGGSVKMIEESLKLAYGEDSEFIKDKRIAAVQALSGTGACRLFADFQKRFLPDSQIYIPTPTWSNHHNIWRDAQVPQRTFAYYHPESRGLDFAGLMDDIKNAPEGSFFLLHACAHNPTGVDPSEEQWREISQQFKVKNHFPFFDMAYQGFASGDPERDAKAIRIFLEDGHQIGCAQSYAKNMGLYGQRAGCLSILCDDEIQAVDVKSQLQQIARPMYSNPPLHGALIVSTILGDPALKSLWLKEVKGMADRIIGMRKALKESLEKLGSPLSWEHITNQIGMFCYSGMTPEQVDRLTNEFHIYMTRNGRISMAGVTTGNVAYLANAIHEVTKPI

SEQ ID NO: 63302 - protein, 424 aa, Triticum aestivum
  peptide (1)..(424): Ceres Seq. ID no. 12625391
  misc_feature (104)..(421): Pfam Name: Aminotransferase class I and II Pfam Description: Aminotransferase class I and II
  misc_feature (15)..(422): Homolog of NCBI NO: 4504069 NR Description: aspartate aminotransferase 2 precursor
  misc_feature (1)..(422): Homolog of NCBI NO: 33585662 NR Description: Glutamate oxaloacetate transaminase 2 [Xenopus
  misc_feature (15)..(422): Homolog of NCBI NO: 6754036 NR Description: glutamate oxaloacetate transaminase 2,
  misc_feature (15)..(422): Homolog of NCBI NO: 2690302 NR Description: aspartate aminotransferase precursor [Mus
  misc_feature (15)..(422): Homolog of NCBI NO: 6980972 NR Description: glutamate oxaloacetate transaminase 2
  misc_feature (14)..(422): Homolog of NCBI NO: 1362046 NR Description: aspartate transaminase (EC 2.6.1.1) precursor -
  misc_feature (1)..(422): Homolog of NCBI NO: 15224592 NR Description: aspartate aminotransferase (AAT1)
  misc_feature (1)..(422): Homolog of NCBI NO: 100726 NR Description: aspartate transaminase (EC 2.6.1.1) AAT1
  misc_feature (1)..(422): Homolog of NCBI NO: 100728 NR Description: aspartate transaminase (EC 2.6.1.1) AAT3
  misc_feature (1)..(422): Homolog of NCBI NO: 2130067 NR Description: aspartate transaminase (EC 2.6.1.1) precursor,
MSRAAAAVGRRRCGPRLPAARSMASWFGHVEPAAKDPILGVTEAFLADPSPDKVNVGVGAYRDDDGKPVVLECVREAERRIAGSTNMEYLPMGGSVKMIEESLKLAYGEDSEFIKDKRIAAVQALSGTGACRLFADFQKRFLPDSQIYIPTPTWSNHHNIWRDAQVPQRTFAYYHPESRGLDFAGLMDDIKNAPEGSFFLLHACAHNPTGVDPSEEQWREISQQFKVKNHFPFFDMAYQGFASGDPERDAKAIRIFLEDGHQIGCAQSYAKNMGLYGQRAGCLSILCDDEIQAVDVKSQLQQIARPMYSNPPLHGALIVSTILGDPALKSLWLKEVKGMADRIIGMRKALKESLEKLGSPLSWEHITNQIGMFCYSGMTPEQVDRLTNEFHIYMTRNGRISMAGVTTGNVAYLANAIHEVTKPI

SEQ ID NO: 63303 - DNA, 1547 bp, Triticum aestivum
  misc_feature (1)..(1547): Ceres Seq. ID no. 13662513
ccgtggtcactccccrtcccatttccccmatcccccatccccgctagggttttccaccatggcgtcggcgtcgcgcgcgctcctcctctccagggcctcgcccctccacgccgccgcctcccgcttcctccgcccggtcgcggccgcggggagcctcctcccggcggcgctggtcccgtcchccgccgcggcgccctgggcggcggcgaggcgattcgcgacgcagcccgcgaactcgtcgctgcgggactcgtccccgaactggagcaaccgcccgcccaaggagacgatcctcctcgacggctgcgacttcgagcactggctcgtcgtcatggagccgcccccaggcgacggcgctaaccccgatgtcacccgcgacgagatcatcgacgggtacatcaagaccctcgcccaggtcgtcggaagtgaagacgaagcaaggatgaagatctactctgtgtcaactaggcattattttgcttttggtgccctagtatctgaggaactctcctacaaactcaaagagttgcctaaagtccgttgggttcttcctgattcatacctggatgtcagaaataaggactatggaggagaaccatttatagatggacaagctgttccttacgaccccaaataccatgaggagtgggtgagaaacaatgcccgtgccaatgaaagatcccggcgcaatgacaggcctcgcaactttgacaggtcgaggaactttgaaaggagaagggagaacacacaggcctaccagagtgggcctccaaaccaaatgccaccccatgatgctgctcctccaagtcgcggtgcacagggcccgccgccgccttcaggtgctccaccaaattaccagccccatgcaccaaacccacaggcaggctatgctgcaggaggtggaccaaactatccaaatgcaccaccaccccctggataccgaggtgccccagcccctggctaccaagctggyaaccaaggttaccagggtaatcctggtggcaacatgcacaatggaccmggcccagcctaccatagcaacaaccctggataccagggtggagygccaggaggcaacccgcygccrcctttygcaggtggcaaccagcctcctccctaccawggcggtggtcctagctatggtggtggtgcaccagactaccagggccaaccaggtggtaacccaggctaccaaggtggcggtaactacarcaacgccgcccctcctccctaygagggcagggacgggccagggaggaactaccagtagagaasactggtagaagagcgcygtktaggaagttagtamgagctatgctcgagtcgccctatgttgttctcgtggacttttatgcatatattctctatccatmatggtgttttgagaactagaactactgcaagcttaggtaagaagtgctttgtttttttctctttgtcgaaataaatacaatgctgactatcgtatggarccagagctttgttatttgttgccgtattgtaatagcaacatgttctgtgtgttctattgaatcacttttatattc

SEQ ID NO: 63304 - protein, 422 aa, Triticum aestivum
  peptide (1)..(422): Ceres Seq. ID no. 15220175
  misc_feature (250)..(394): Pfam Name: DivIVA protein Pfam Description: DivIVA protein
  misc_feature (83)..(250): Homolog of NCBI NO: 15226108 NR Description: plastid protein [Arabidopsis thaliana]
  misc_feature (22)..(248): Homolog of NCBI NO: 15226934 NR Description: expressed protein [Arabidopsis thaliana]
  misc_feature (68)..(227): Homolog of NCBI NO: 15218508 NR Description: DAG-related protein [Arabidopsis thaliana]
  misc_feature (83)..(250): Homolog of NCBI NO: 2440029 NR Description: DAL1 protein [Arabidopsis thaliana]
  misc_feature (18)..(253): Homolog of NCBI NO: 38344141 NR Description: OSJNBa0041A02.8 [Oryza sativa (japonica
  misc_feature (25)..(392): Homolog of NCBI NO: 15235263 NR Description: putative DAG protein [Arabidopsis thaliana]
  misc_feature (30)..(256): Homolog of NCBI NO: 15230785 NR Description: DAG protein -related [Arabidopsis thaliana]
  misc_feature (30)..(256): Homolog of NCBI NO: 27754695 NR Description: putative DAG protein [Arabidopsis thaliana]
  misc_feature (119)..(409): Homolog of NCBI NO: 15219250 NR Description: hypothetical protein [Arabidopsis thaliana]
  misc_feature (11)..(422): Homolog of NCBI NO: 18400602 NR Description: expressed protein [Arabidopsis thaliana]
  misc_feature (5)..(5): Xaa is any aa, unknown or other
  misc_feature (10)..(10): Xaa is any aa, unknown or other
  misc_feature (61)..(61): Xaa is any aa, unknown or other
  misc_feature (324)..(324): Xaa is any aa, unknown or other
  misc_feature (340)..(340): Xaa is any aa, unknown or other
  misc_feature (355)..(355): Xaa is any aa, unknown or other
  misc_feature (361)..(361): Xaa is any aa, unknown or other
  misc_feature (362)..(362): Xaa is any aa, unknown or other
  misc_feature (364)..(364): Xaa is any aa, unknown or other
  misc_feature (374)..(374): Xaa is any aa, unknown or other
  misc_feature (404)..(404): Xaa is any aa, unknown or other
  misc_feature (411)..(411): Xaa is any aa, unknown or other
RGHSXSHFPXPPSPLGFSTMASASRALLLSRASPLHAAASRFLRPVAAAGSLLPAALVPSXAAAPWAAARRFATQPANSSLRDSSPNWSNRPPKETILLDGCDFEHWLVVMEPPPGDGANPDVTRDEIIDGYIKTLAQVVGSEDEARMKIYSVSTRHYFAFGALVSEELSYKLKELPKVRWVLPDSYLDVRNKDYGGEPFIDGQAVPYDPKYHEEWVRNNARANERSRRNDRPRNFDRSRNFERRRENTQAYQSGPPNQMPPHDAAPPSRGAQGPPPPSGAPPNYQPHAPNPQAGYAAGGGPNYPNAPPPPGYRGAPAPGYQAXNQGYQGNPGGNMHNGXGPAYHSNNPGYQGGXPGGNPXXPXAGGNQPPPYXGGGPSYGGGAPDYQGQPGGNPGYQGGGNYXNAAPPPXEGRDGPGRNYQ

SEQ ID NO: 63305 - protein, 403 aa, Triticum aestivum
  peptide (1)..(403): Ceres Seq. ID no. 15220176
  misc_feature (231)..(375): Pfam Name: DivIVA protein Pfam Description: DivIVA protein
  misc_feature (64)..(231): Homolog of NCBI NO: 15226108 NR Description: plastid protein [Arabidopsis thaliana]
  misc_feature (3)..(229): Homolog of NCBI NO: 15226934 NR Description: expressed protein [Arabidopsis thaliana]
  misc_feature (49)..(208): Homolog of NCBI NO: 15218508 NR Description: DAG-related protein [Arabidopsis thaliana]
  misc_feature (64)..(231): Homolog of NCBI NO: 2440029 NR Description: DAL1 protein [Arabidopsis thaliana]
  misc_feature (1)..(234): Homolog of NCBI NO: 38344141 NR Description: OSJNBa0041A02.8 [Oryza sativa (japonica
  misc_feature (6)..(373): Homolog of NCBI NO: 15235263 NR Description: putative DAG protein [Arabidopsis thaliana]
  misc_feature (11)..(237): Homolog of NCBI NO: 15230785 NR Description: DAG protein -related [Arabidopsis thaliana]
  misc_feature (11)..(237): Homolog of NCBI NO: 27754695 NR Description: putative DAG protein [Arabidopsis thaliana]
  misc_feature (100)..(390): Homolog of NCBI NO: 15219250 NR Description: hypothetical protein [Arabidopsis thaliana]
  misc_feature (1)..(403): Homolog of NCBI NO: 18400602 NR Description: expressed protein [Arabidopsis thaliana]
  misc_feature (42)..(42): Xaa is any aa, unknown or other
  misc_feature (305)..(305): Xaa is any aa, unknown or other
  misc_feature (321)..(321): Xaa is any aa, unknown or other
  misc_feature (336)..(336): Xaa is any aa, unknown or other
  misc_feature (342)..(342): Xaa is any aa, unknown or other
  misc_feature (343)..(343): Xaa is any aa, unknown or other
  misc_feature (345)..(345): Xaa is any aa, unknown or other
  misc_feature (355)..(355): Xaa is any aa, unknown or other
  misc_feature (385)..(385): Xaa is any aa, unknown or other
  misc_feature (392)..(392): Xaa is any aa, unknown or other
MASASRALLLSRASPLHAAASRFLRPVAAAGSLLPAALVPSXAAAPWAAARRFATQPANSSLRDSSPNWSNRPPKETILLDGCDFEHWLVVMEPPPGDGANPDVTRDEIIDGYIKTLAQVVGSEDEARMKIYSVSTRHYFAFGALVSEELSYKLKELPKVRWVLPDSYLDVRNKDYGGEPFIDGQAVPYDPKYHEEWVRNNARANERSRRNDRPRNFDRSRNFERRRENTQAYQSGPPNQMPPHDAAPPSRGAQGPPPPSGAPPNYQPHAPNPQAGYAAGGGPNYPNAPPPPGYRGAPAPGYQAXNQGYQGNPGGNMHNGXGPAYHSNNPGYQGGXPGGNPXXPXAGGNQPPPYXGGGPSYGGGAPDYQGQPGGNPGYQGGGNYXNAAPPPXEGRDGPGRNYQ

SEQ ID NO: 63306 - protein, 312 aa, Triticum aestivum
  peptide (1)..(312): Ceres Seq. ID no. 15220177
  misc_feature (140)..(284): Pfam Name: DivIVA protein Pfam Description: DivIVA protein
  misc_feature (1)..(140): Homolog of NCBI NO: 15226108 NR Description: plastid protein [Arabidopsis thaliana]
  misc_feature (1)..(138): Homolog of NCBI NO: 15226934 NR Description: expressed protein [Arabidopsis thaliana]
  misc_feature (1)..(117): Homolog of NCBI NO: 15218508 NR Description: DAG-related protein [Arabidopsis thaliana]
  misc_feature (1)..(140): Homolog of NCBI NO: 2440029 NR Description: DAL1 protein [Arabidopsis thaliana]
  misc_feature (1)..(143): Homolog of NCBI NO: 38344141 NR Description: OSJNBa0041A02.8 [Oryza sativa (japonica
  misc_feature (1)..(282): Homolog of NCBI NO: 15235263 NR Description: putative DAG protein [Arabidopsis thaliana]
  misc_feature (1)..(146): Homolog of NCBI NO: 15230785 NR Description: DAG protein -related [Arabidopsis thaliana]
  misc_feature (1)..(146): Homolog of NCBI NO: 27754695 NR Description: putative DAG protein [Arabidopsis thaliana]
  misc_feature (9)..(299): Homolog of NCBI NO: 15219250 NR Description: hypothetical protein [Arabidopsis thaliana]
  misc_feature (1)..(312): Homolog of NCBI NO: 18400602 NR Description: expressed protein [Arabidopsis thaliana]
  misc_feature (214)..(214): Xaa is any aa, unknown or other
  misc_feature (230)..(230): Xaa is any aa, unknown or other
  misc_feature (245)..(245): Xaa is any aa, unknown or other
  misc_feature (251)..(251): Xaa is any aa, unknown or other
  misc_feature (252)..(252): Xaa is any aa, unknown or other
  misc_feature (254)..(254): Xaa is any aa, unknown or other
  misc_feature (264)..(264): Xaa is any aa, unknown or other
  misc_feature (294)..(294): Xaa is any aa, unknown or other
  misc_feature (301)..(301): Xaa is any aa, unknown or other
MEPPPGDGANPDVTRDEIIDGYIKTLAQVVGSEDEARMKIYSVSTRHYFAFGALVSEELSYKLKELPKVRWVLPDSYLDVRNKDYGGEPFIDGQAVPYDPKYHEEWVRNNARANERSRRNDRPRNFDRSRNFERRRENTQAYQSGPPNQMPPHDAAPPSRGAQGPPPPSGAPPNYQPHAPNPQAGYAAGGGPNYPNAPPPPGYRGAPAPGYQAXNQGYQGNPGGNMHNGXGPAYHSNNPGYQGGXPGGNPXXPXAGGNQPPPYXGGGPSYGGGAPDYQGQPGGNPGYQGGGNYXNAAPPPXEGRDGPGRNYQ

SEQ ID NO: 63307 - DNA, 1500 bp, Triticum aestivum
  misc_feature (1)..(1500): Ceres Seq. ID no. 13655302
acaggtagacgcttgccccgctaccattccaagcacatattcccgcgggcatcccgccacctaaccgcctaccttgcaccgcaattcatcccccattcagcaaacccaaaatagtggagcagccccgattggaatcgtgttatacagatacggatacgggcgtagccggatacagctagctagctggaggcgccatggtgggggtgaggatggtgtgcaatgggaaggctgtggcggcgctgactgcggtgtttgtcgtctgcgccggggtggtctcgccggcggcggcgagcgggcgcgaggaggcccaccaggtgccggcggtctacgtgttcggcgactccacggtggacgtgggcaacaaccagtacctgccggggaacgccgcgctgcagctcccctacggcatcgacttcccgcagtcgcggcccaccgggaggttcagcaacgggttcaacgtcgccgactccatctcgaggctgttgggcttcaagaggagcccgccggcgtacctgtcgctgacgccggagacgagccgccagatcgtcagaggctaccgtggcgtcaactacgcctccggtggatccggcattctcgacaccaccgggaacaccctcacgttgactaagcaggtggagtacttcgcggccaccaagtcaaagatgacggagaagagccctggcatcgacgcgctgctgtccaagtcgctcttcctcatcagcgacggcggcaacgactttttcgccttcctccggcagaacctgacggccagcgacgcgccgtccttctacgcggacatgctgaccaaactacacgaagcacgtgcagacgctgtaccagctgggagcgcggcggttcgggatcgtcgacgtgccgcccatcggctgcgtgccggcggtgcgggtcacctccccggacggcgagaccgcgtgcgtcgaggccgccaacgccctcgccagggggttcaacgacgcgctggggaaggcgatggccaggctcgccgccgcgctgcccgggatgaggtactccgtggggagctcctacaacctgataacgttcatcacggtgcacccgcaggccgccgggttcaaggacgtggccagcgcgtgctgcggcggcgggaggctcggcgcgcagacatggtgcggggcgcccaacgccacctactgcgccgaccgcaacgacaatgtctactgggacgaggtgcacggcacccaggccacctccagcaagggcgccaaggccatcttcgccgcccccgtgaagctcggcttcgccgcgcccatcaacttcaagcagctggtttcttcttgatcgccggtcgaggcattgcaccggacggacacgatctgttgtcagctcttaatttagttgcgagtgttcaccctttgattaagggaggggaaaagaatgggtagcacactttttgattcttttgtagatcggtgaagatgcaatagaatcatagagagggtgcagtgatgcatgcgattttatgtt

SEQ ID NO: 63308 - protein, 407 aa, Triticum aestivum
  peptide (1)..(407): Ceres Seq. ID no. 15219734
  misc_feature (44)..(208): Pfam Name: GDSL-like Lipase/Acylhydrolase Pfam Description: GDSL-like Lipase/Acylhydrolase
  misc_feature (36)..(203): Homolog of NCBI NO: 15241626 NR Description: GDSL-motif lipase/hydrolase protein [Arabidopsis
  misc_feature (38)..(182): Homolog of NCBI NO: 15228189 NR Description: GDSL-motif lipase/hydrolase protein [Arabidopsis
  misc_feature (45)..(190): Homolog of NCBI NO: 38345537 NR Description: OSJNBa0020J04.12 [Oryza sativa (japonica
  misc_feature (41)..(205): Homolog of NCBI NO: 30693763 NR Description: GDSL-motif lipase/hydrolase protein [Arabidopsis
  misc_feature (40)..(203): Homolog of NCBI NO: 15224005 NR Description: GDSL-motif lipase/hydrolase protein [Arabidopsis
  misc_feature (13)..(203): Homolog of NCBI NO: 13174242 NR Description: putative proline-rich protein [Oryza sativa]
  misc_feature (31)..(208): Homolog of NCBI NO: 15240452 NR Description: GDSL-motif lipase/hydrolase protein [Arabidopsis
  misc_feature (14)..(208): Homolog of NCBI NO: 34899288 NR Description: similar to GDSL-motif lipase/hydrolase
  misc_feature (6)..(192): Homolog of NCBI NO: 29837765 NR Description: putative GDSL-like lipase/acylhydrolase
  misc_feature (18)..(218): Homolog of NCBI NO: 38345853 NR Description: OSJNBa0084K11.17 [Oryza sativa (japonica
MVGVRMVCNGKAVAALTAVFVVCAGVVSPAAASGREEAHQVPAVYVFGDSTVDVGNNQYLPGNAALQLPYGIDFPQSRPTGRFSNGFNVADSISRLLGFKRSPPAYLSLTPETSRQIVRGYRGVNYASGGSGILDTTGNTLTLTKQVEYFAATKSKMTEKSPGIDALLSKSLFLISDGGNDFFAFLRQNLTASDAPSFYADMLTKLHEARADAVPAGSAAVRDRRRAAHRLRAGGAGHLPGRRDRVRRGRQRPRQGVQRRAGEGDGQARRRAARDEVLRGELLQPDNVHHGAPAGRRVQGRGQRVLRRREARRADMVRGAQRHLLRRPQRQCLLGRGARHPGHLQQGRQGHLRRPREARLRRAHQLQAAGFFLIAGRGIAPDGHDLLSALNLVASVHPLIKGGEKNG

SEQ ID NO: 63309 - protein, 402 aa, Triticum aestivum
  peptide (1)..(402): Ceres Seq. ID no. 15219735
  misc_feature (39)..(203): Pfam Name: GDSL-like Lipase/Acylhydrolase Pfam Description: GDSL-like Lipase/Acylhydrolase
  misc_feature (31)..(198): Homolog of NCBI NO: 15241626 NR Description: GDSL-motif lipase/hydrolase protein [Arabidopsis
  misc_feature (33)..(177): Homolog of NCBI NO: 15228189 NR Description: GDSL-motif lipase/hydrolase protein [Arabidopsis
  misc_feature (40)..(185): Homolog of NCBI NO: 38345537 NR Description: OSJNBa0020J04.12 [Oryza sativa (japonica
  misc_feature (36)..(200): Homolog of NCBI NO: 30693763 NR Description: GDSL-motif lipase/hydrolase protein [Arabidopsis
  misc_feature (35)..(198): Homolog of NCBI NO: 15224005 NR Description: GDSL-motif lipase/hydrolase protein [Arabidopsis
  misc_feature (8)..(198): Homolog of NCBI NO: 13174242 NR Description: putative proline-rich protein [Oryza sativa]
  misc_feature (26)..(203): Homolog of NCBI NO: 15240452 NR Description: GDSL-motif lipase/hydrolase protein [Arabidopsis
  misc_feature (9)..(203): Homolog of NCBI NO: 34899288 NR Description: similar to GDSL-motif lipase/hydrolase
  misc_feature (1)..(187): Homolog of NCBI NO: 29837765 NR Description: putative GDSL-like lipase/acylhydrolase
  misc_feature (13)..(213): Homolog of NCBI NO: 38345853 NR Description: OSJNBa0084K11.17 [Oryza sativa (japonica
MVCNGKAVAALTAVFVVCAGVVSPAAASGREEAHQVPAVYVFGDSTVDVGNNQYLPGNAALQLPYGIDFPQSRPTGRFSNGFNVADSISRLLGFKRSPPAYLSLTPETSRQIVRGYRGVNYASGGSGILDTTGNTLTLTKQVEYFAATKSKMTEKSPGIDALLSKSLFLISDGGNDFFAFLRQNLTASDAPSFYADMLTKLHEARADAVPAGSAAVRDRRRAAHRLRAGGAGHLPGRRDRVRRGRQRPRQGVQRRAGEGDGQARRRAARDEVLRGELLQPDNVHHGAPAGRRVQGRGQRVLRRREARRADMVRGAQRHLLRRPQRQCLLGRGARHPGHLQQGRQGHLRRPREARLRRAHQLQAAGFFLIAGRGIAPDGHDLLSALNLVASVHPLIKGGEKNG

SEQ ID NO: 63310 - protein, 251 aa, Triticum aestivum
  peptide (1)..(251): Ceres Seq. ID no. 15219736
  misc_feature (1)..(52): Pfam Name: GDSL-like Lipase/Acylhydrolase Pfam Description: GDSL-like Lipase/Acylhydrolase
  misc_feature (1)..(47): Homolog of NCBI NO: 15241626 NR Description: GDSL-motif lipase/hydrolase protein [Arabidopsis
  misc_feature (1)..(26): Homolog of NCBI NO: 15228189 NR Description: GDSL-motif lipase/hydrolase protein [Arabidopsis
  misc_feature (1)..(34): Homolog of NCBI NO: 38345537 NR Description: OSJNBa0020J04.12 [Oryza sativa (japonica
  misc_feature (1)..(49): Homolog of NCBI NO: 30693763 NR Description: GDSL-motif lipase/hydrolase protein [Arabidopsis
  misc_feature (1)..(47): Homolog of NCBI NO: 15224005 NR Description: GDSL-motif lipase/hydrolase protein [Arabidopsis
  misc_feature (1)..(47): Homolog of NCBI NO: 13174242 NR Description: putative proline-rich protein [Oryza sativa]
  misc_feature (1)..(52): Homolog of NCBI NO: 15240452 NR Description: GDSL-motif lipase/hydrolase protein [Arabidopsis
  misc_feature (1)..(52): Homolog of NCBI NO: 34899288 NR Description: similar to GDSL-motif lipase/hydrolase
  misc_feature (1)..(36): Homolog of NCBI NO: 29837765 NR Description: putative GDSL-like lipase/acylhydrolase
  misc_feature (1)..(62): Homolog of NCBI NO: 38345853 NR Description: OSJNBa0084K11.17 [Oryza sativa (japonica
MTEKSPGIDALLSKSLFLISDGGNDFFAFLRQNLTASDAPSFYADMLTKLHEARADAVPAGSAAVRDRRRAAHRLRAGGAGHLPGRRDRVRRGRQRPRQGVQRRAGEGDGQARRRAARDEVLRGELLQPDNVHHGAPAGRRVQGRGQRVLRRREARRADMVRGAQRHLLRRPQRQCLLGRGARHPGHLQQGRQGHLRRPREARLRRAHQLQAAGFFLIAGRGIAPDGHDLLSALNLVASVHPLIKGGEKNG

SEQ ID NO: 63311 - DNA, 1695 bp, Triticum aestivum
  misc_feature (1)..(1695): Ceres Seq. ID no. 13597146
accattaaccagtccacaggcaggcaccggtcgtgaggcagagagagaaccagagccagacatgcagcgcctcgcctcctcccggaggctcctccgggccgccctcgcccccggccgggcgcattccagcctctccgcggccgcggtcgccgccgcgccggagaatggcgccggcgcccccaagatgccgccgttcgcgtacacgccgccgccgtacgacgggccgcgggtggcggagatcgcccagaagcgcgcccagttcctcagcccctcgctcttccacttctacgaccgccctttgaacatagtcgatggaaagatgcagtacctgttcgatgaggatggccgccgctacctggacgctttcggtggcattgcgaccgtttgttgcgggcactgccatcctgatgtgattgaagccatagtcaaccaggcaaagaagatacagcactccacagttctgtatctgaaccatgcaattgccgactttgctgaggctctggcgtccaaaatgcctggtgatctgaaggttgttttcttcacaaattctggcacagaggcaaatgagcttgcactgatgatcgctcggctttacacgggttcccatgacattatttcacttaggaatggataccatgggaatgcagctgcaacaatgggtgccactgctcaatccaactggaaatttaatgttgtccagaccggagtgcaccatgctcttaatccagacccatacagaggcgctttcgggtcagacggagagaaatatgccagagatattcaggaaaccattgactatgggactacaggaagagttgcaggtttcatttcagaggccatacagggagttggtggaatagtggaattagcaccaggatacctgcctgcggcctatgatatggtaaggaaagctggtggcctgtgcatcgccgacgaagttcaggcgggggttgcgcgcactggaagccacttctggggattcgaagggcagggtgtcatccctgatatagtcactatggcaaagggcatagggaacggaataccgataggagcggtcgttaccacacctgagattgctaaggtgttaacccgcagaagctacttcaacaccttcggtggtaaccctgtcagcacagctgccggccacgctgttctcaaggtactggagaaggagaagctgcaggagaatgcgttcgttgttggctcctacctgaaggagaaacttaacgctctgaaagagaagcatgacattatcggcgacgttagggggaaaggcctccttctcggggttgagctggtgaccgatcgccagaagaaaactccggcgaaagctgagatcgcgcaggtcatgaaccacatgaaagatatgggcgtgctggtggggaagggcggtttcttcggcaatgtgttcagggtgacgcctccgttgtgcttctccaaggaggactccgactacatgatcgaggtgatggacattgcgctgtcgaagctgtgaagaggcactgctctcatcgataaataagagacgatctgcgaaacagcacctcgttgtctcgtgttctgtcttgcaaacccatgatgcgcacatgcgatctgcgcctcctgaacattagtatgatgtgctgagtaggagctctatgtgaccaataagttcttcgtaataagatattcagatgtgctatggcagcttttatg

SEQ ID NO: 63312 - protein, 497 aa, Triticum aestivum
  peptide (1)..(497): Ceres Seq. ID no. 13597147
  misc_feature (90)..(497): Pfam Name: Aminotransferase class-III Pfam Description: Aminotransferase class-III
  misc_feature (24)..(250): Homolog of NCBI NO: 16198011 NR Description: LD24726p [Drosophila melanogaster]
  misc_feature (253)..(496): Homolog of NCBI NO: 28574759 NR Description: CG11241-PA [Drosophila melanogaster]
  misc_feature (253)..(496): Homolog of NCBI NO: 16198011 NR Description: LD24726p [Drosophila melanogaster]
  misc_feature (24)..(235): Homolog of NCBI NO: 7434175 NR Description: hypothetical protein T19P19.50 - Arabidopsis
  misc_feature (266)..(483): Homolog of NCBI NO: 7434175 NR Description: hypothetical protein T19P19.50 - Arabidopsis
  misc_feature (24)..(497): Homolog of NCBI NO: 18420498 NR Description: alanine--glyoxylate aminotransferase
  misc_feature (24)..(497): Homolog of NCBI NO: 5731259 NR Description: alanine:glyoxylate aminotransferase 2 homolog
  misc_feature (21)..(497): Homolog of NCBI NO: 15028237 NR Description: putative beta-alanine-pyruvate aminotransferase
  misc_feature (21)..(497): Homolog of NCBI NO: 15224499 NR Description: alanine--glyoxylate aminotransferase
  misc_feature (21)..(497): Homolog of NCBI NO: 15231974 NR Description: alanine--glyoxylate aminotransferase
PLTSPQAGTGREAEREPEPDMQRLASSRRLLRAALAPGRAHSSLSAAAVAAAPENGAGAPKMPPFAYTPPPYDGPRVAEIAQKRAQFLSPSLFHFYDRPLNIVDGKMQYLFDEDGRRYLDAFGGIATVCCGHCHPDVIEAIVNQAKKIQHSTVLYLNHAIADFAEALASKMPGDLKVVFFTNSGTEANELALMIARLYTGSHDIISLRNGYHGNAAATMGATAQSNWKFNVVQTGVHHALNPDPYRGAFGSDGEKYARDIQETIDYGTTGRVAGFISEAIQGVGGIVELAPGYLPAAYDMVRKAGGLCIADEVQAGVARTGSHFWGFEGQGVIPDIVTMAKGIGNGIPIGAVVTTPEIAKVLTRRSYFNTFGGNPVSTAAGHAVLKVLEKEKLQENAFVVGSYLKEKLNALKEKHDIIGDVRGKGLLLGVELVTDRQKKTPAKAEIAQVMNHMKDMGVLVGKGGFFGNVFRVTPPLCFSKEDSDYMIEVMDIALSKL

SEQ ID NO: 63313 - protein, 477 aa, Triticum aestivum
  peptide (1)..(477): Ceres Seq. ID no. 13597148
  misc_feature (70)..(477): Pfam Name: Aminotransferase class-III Pfam Description: Aminotransferase class-III
  misc_feature (4)..(230): Homolog of NCBI NO: 16198011 NR Description: LD24726p [Drosophila melanogaster]
  misc_feature (233)..(476): Homolog of NCBI NO: 28574759 NR Description: CG11241-PA [Drosophila melanogaster]
  misc_feature (233)..(476): Homolog of NCBI NO: 16198011 NR Description: LD24726p [Drosophila melanogaster]
  misc_feature (4)..(215): Homolog of NCBI NO: 7434175 NR Description: hypothetical protein T19P19.50 - Arabidopsis
  misc_feature (246)..(463): Homolog of NCBI NO: 7434175 NR Description: hypothetical protein T19P19.50 - Arabidopsis
  misc_feature (4)..(477): Homolog of NCBI NO: 18420498 NR Description: alanine--glyoxylate aminotransferase
  misc_feature (4)..(477): Homolog of NCBI NO: 5731259 NR Description: alanine:glyoxylate aminotransferase 2 homolog
  misc_feature (1)..(477): Homolog of NCBI NO: 15028237 NR Description: putative beta-alanine-pyruvate aminotransferase
  misc_feature (1)..(477): Homolog of NCBI NO: 15224499 NR Description: alanine--glyoxylate aminotransferase
  misc_feature (1)..(477): Homolog of NCBI NO: 15231974 NR Description: alanine--glyoxylate aminotransferase
MQRLASSRRLLRAALAPGRAHSSLSAAAVAAAPENGAGAPKMPPFAYTPPPYDGPRVAEIAQKRAQFLSPSLFHFYDRPLNIVDGKMQYLFDEDGRRYLDAFGGIATVCCGHCHPDVIEAIVNQAKKIQHSTVLYLNHAIADFAEALASKMPGDLKVVFFTNSGTEANELALMIARLYTGSHDIISLRNGYHGNAAATMGATAQSNWKFNVVQTGVHHALNPDPYRGAFGSDGEKYARDIQETIDYGTTGRVAGFISEAIQGVGGIVELAPGYLPAAYDMVRKAGGLCIADEVQAGVARTGSHFWGFEGQGVIPDIVTMAKGIGNGIPIGAVVTTPEIAKVLTRRSYFNTFGGNPVSTAAGHAVLKVLEKEKLQENAFVVGSYLKEKLNALKEKHDIIGDVRGKGLLLGVELVTDRQKKTPAKAEIAQVMNHMKDMGVLVGKGGFFGNVFRVTPPLCFSKEDSDYMIEVMDIALSKL

SEQ ID NO: 63314 - protein, 436 aa, Triticum aestivum
  peptide (1)..(436): Ceres Seq. ID no. 13597149
  misc_feature (29)..(436): Pfam Name: Aminotransferase class-III Pfam Description: Aminotransferase class-III
  misc_feature (1)..(189): Homolog of NCBI NO: 16198011 NR Description: LD24726p [Drosophila melanogaster]
  misc_feature (192)..(435): Homolog of NCBI NO: 28574759 NR Description: CG11241-PA [Drosophila melanogaster]
  misc_feature (192)..(435): Homolog of NCBI NO: 16198011 NR Description: LD24726p [Drosophila melanogaster]
  misc_feature (1)..(174): Homolog of NCBI NO: 7434175 NR Description: hypothetical protein T19P19.50 - Arabidopsis
  misc_feature (205)..(422): Homolog of NCBI NO: 7434175 NR Description: hypothetical protein T19P19.50 - Arabidopsis
  misc_feature (1)..(436): Homolog of NCBI NO: 18420498 NR Description: alanine--glyoxylate aminotransferase
  misc_feature (1)..(436): Homolog of NCBI NO: 5731259 NR Description: alanine:glyoxylate aminotransferase 2 homolog
  misc_feature (1)..(436): Homolog of NCBI NO: 15028237 NR Description: putative beta-alanine-pyruvate aminotransferase
  misc_feature (1)..(436): Homolog of NCBI NO: 15224499 NR Description: alanine--glyoxylate aminotransferase
  misc_feature (1)..(436): Homolog of NCBI NO: 15231974 NR Description: alanine--glyoxylate aminotransferase
MPPFAYTPPPYDGPRVAEIAQKRAQFLSPSLFHFYDRPLNIVDGKMQYLFDEDGRRYLDAFGGIATVCCGHCHPDVIEAIVNQAKKIQHSTVLYLNHAIADFAEALASKMPGDLKVVFFTNSGTEANELALMIARLYTGSHDIISLRNGYHGNAAATMGATAQSNWKFNVVQTGVHHALNPDPYRGAFGSDGEKYARDIQETIDYGTTGRVAGFISEAIQGVGGIVELAPGYLPAAYDMVRKAGGLCIADEVQAGVARTGSHFWGFEGQGVIPDIVTMAKGIGNGIPIGAVVTTPEIAKVLTRRSYFNTFGGNPVSTAAGHAVLKVLEKEKLQENAFVVGSYLKEKLNALKEKHDIIGDVRGKGLLLGVELVTDRQKKTPAKAEIAQVMNHMKDMGVLVGKGGFFGNVFRVTPPLCFSKEDSDYMIEVMDIALSKL

SEQ ID NO: 63315 - DNA, 1272 bp, Triticum aestivum
  misc_feature (1)..(1272): Ceres Seq. ID no. 12625392
agacacagaccagagtccacagcacagcagagcaccaccactactaccacccccagtggcaaccctgacaaggctctagcagcttagctgaagatggccgggctactctctgtcaaggccgtcgcgctcgccgccgtgcttgctgccgcgtatgcctcttgcgccgccgccgagcagccgggggcggcggacctcgacgcctccgccgtgtcttacagctccgcgtggcttccggccagagcgacctggtacggagcgcccaacggcgccgggcccgacgacaacggcggcgcgtgcggcttcaagcacgtgaaccagtaccccttctcctccatgacctcctgcggcaaccagcccctgttcaaggacggcaagggctgcggctcctgctaccagatacggtgcagcggcgacaaatcctgctccggcaaaatcgagacggtgatgatcacggacatgaactactacccggtggcgcagtaccacttcgacctgagcggcacggccttcggcgcgctggccaagccggggctcaacgagaagctgcgccactcgggcatcatcgacatccagttccggcgggtgccctgcaacttcccgggcctcaagatcaacttccacgtggtggacggctccaacgcggtgtacctggcggtgctgatcgagtacgaggacatggacggcgacgtgatccaggtggacatgaaggaggccaactccgggtcgtggacgccgatgcgcgagtcctggggctccatctggcggatggactccaaccatcgcctccaggggcccttctccatgcgcatcaccagcgactccggcaagaagctggtggccaacaacgtcatcccggccaactggaggcccaacaccgactaccgctccttcgtccagttcagctgatccgagtccgaccggcccatgggcggccacgtgcggctgcatcatgcgtgcatgcgctctggcggtctggcccctctgctggctacgtacaattaatcgctcggccgatcgaaatcatttgccttattttattttttgtatttgcttgggatcaaggagctcgagatgccgtctgtctggtgtcatatgtggggtcgtcgtcgtctagcgtcttgagcatgtgtgggaaatgcgggagggcatagtttgcatgtgctctcccgcccactgactctgtgtagagtaccatacatgagatgacactaccggtttgtaagcaaatccaagttattataaattatatacgtacagttttttctactactc

SEQ ID NO: 63316 - protein, 270 aa, Triticum aestivum
  peptide (1)..(270): Ceres Seq. ID no. 12625393
  misc_feature (173)..(254): Pfam Name: Pollen allergen Pfam Description: Pollen allergen
  misc_feature (29)..(269): Homolog of NCBI NO: 8118432 NR Description: beta-expansin [Oryza sativa]
  misc_feature (4)..(269): Homolog of NCBI NO: 14193773 NR Description: beta-expansin 7 [Zea mays]
  misc_feature (1)..(269): Homolog of NCBI NO: 14193771 NR Description: beta-expansin 6 [Zea mays]
  misc_feature (3)..(270): Homolog of NCBI NO: 14193775 NR Description: beta-expansin 8 [Zea mays]
  misc_feature (6)..(270): Homolog of NCBI NO: 8118425 NR Description: beta-expansin [Oryza sativa]
  misc_feature (6)..(270): Homolog of NCBI NO: 37536762 NR Description: beta-expansin EXPB4 [Oryza sativa (japonica
  misc_feature (1)..(270): Homolog of NCBI NO: 37536760 NR Description: beta-expansin EXPB3 [Oryza sativa (japonica
  misc_feature (1)..(270): Homolog of NCBI NO: 14330330 NR Description: beta expansin B3 [Festuca pratensis]
  misc_feature (1)..(270): Homolog of NCBI NO: 37536756 NR Description: beta-expansin EXPB6 [Oryza sativa (japonica
  misc_feature (1)..(270): Homolog of NCBI NO: 14330328 NR Description: beta expansin B2 [Festuca pratensis]
MAGLLSVKAVALAAVLAAAYASCAAAEQPGAADLDASAVSYSSAWLPARATWYGAPNGAGPDDNGGACGFKHVNQYPFSSMTSCGNQPLFKDGKGCGSCYQIRCSGDKSCSGKIETVMITDMNYYPVAQYHFDLSGTAFGALAKPGLNEKLRHSGIIDIQFRRVPCNFPGLKINFHVVDGSNAVYLAVLIEYEDMDGDVIQVDMKEANSGSWTPMRESWGSIWRMDSNHRLQGPFSMRITSDSGKKLVANNVIPANWRPNTDYRSFVQFS

SEQ ID NO: 63317 - protein, 190 aa, Triticum aestivum
  peptide (1)..(190): Ceres Seq. ID no. 12625394
  misc_feature (93)..(174): Pfam Name: Pollen allergen Pfam Description: Pollen allergen
  misc_feature (1)..(189): Homolog of NCBI NO: 8118432 NR Description: beta-expansin [Oryza sativa]
  misc_feature (1)..(189): Homolog of NCBI NO: 14193773 NR Description: beta-expansin 7 [Zea mays]
  misc_feature (1)..(189): Homolog of NCBI NO: 14193771 NR Description: beta-expansin 6 [Zea mays]
  misc_feature (1)..(190): Homolog of NCBI NO: 14193775 NR Description: beta-expansin 8 [Zea mays]
  misc_feature (1)..(190): Homolog of NCBI NO: 8118425 NR Description: beta-expansin [Oryza sativa]
  misc_feature (1)..(190): Homolog of NCBI NO: 37536762 NR Description: beta-expansin EXPB4 [Oryza sativa (japonica
  misc_feature (1)..(190): Homolog of NCBI NO: 37536760 NR Description: beta-expansin EXPB3 [Oryza sativa (japonica
  misc_feature (1)..(190): Homolog of NCBI NO: 14330330 NR Description: beta expansin B3 [Festuca pratensis]
  misc_feature (1)..(190): Homolog of NCBI NO: 37536756 NR Description: beta-expansin EXPB6 [Oryza sativa (japonica
  misc_feature (1)..(190): Homolog of NCBI NO: 14330328 NR Description: beta expansin B2 [Festuca pratensis]
MTSCGNQPLFKDGKGCGSCYQIRCSGDKSCSGKIETVMITDMNYYPVAQYHFDLSGTAFGALAKPGLNEKLRHSGIIDIQFRRVPCNFPGLKINFHVVDGSNAVYLAVLIEYEDMDGDVIQVDMKEANSGSWTPMRESWGSIWRMDSNHRLQGPFSMRITSDSGKKLVANNVIPANWRPNTDYRSFVQFS

SEQ ID NO: 63318 - protein, 153 aa, Triticum aestivum
  peptide (1)..(153): Ceres Seq. ID no. 12625395
  misc_feature (56)..(137): Pfam Name: Pollen allergen Pfam Description: Pollen allergen
  misc_feature (1)..(152): Homolog of NCBI NO: 8118432 NR Description: beta-expansin [Oryza sativa]
  misc_feature (1)..(152): Homolog of NCBI NO: 14193773 NR Description: beta-expansin 7 [Zea mays]
  misc_feature (1)..(152): Homolog of NCBI NO: 14193771 NR Description: beta-expansin 6 [Zea mays]
  misc_feature (1)..(153): Homolog of NCBI NO: 14193775 NR Description: beta-expansin 8 [Zea mays]
  misc_feature (1)..(153): Homolog of NCBI NO: 8118425 NR Description: beta-expansin [Oryza sativa]
  misc_feature (1)..(153): Homolog of NCBI NO: 37536762 NR Description: beta-expansin EXPB4 [Oryza sativa (japonica
  misc_feature (1)..(153): Homolog of NCBI NO: 37536760 NR Description: beta-expansin EXPB3 [Oryza sativa (japonica
  misc_feature (1)..(153): Homolog of NCBI NO: 14330330 NR Description: beta expansin B3 [Festuca pratensis]
  misc_feature (1)..(153): Homolog of NCBI NO: 37536756 NR Description: beta-expansin EXPB6 [Oryza sativa (japonica
  misc_feature (1)..(153): Homolog of NCBI NO: 14330328 NR Description: beta expansin B2 [Festuca pratensis]
MITDMNYYPVAQYHFDLSGTAFGALAKPGLNEKLRHSGIIDIQFRRVPCNFPGLKINFHVVDGSNAVYLAVLIEYEDMDGDVIQVDMKEANSGSWTPMRESWGSIWRMDSNHRLQGPFSMRITSDSGKKLVANNVIPANWRPNTDYRSFVQFS

SEQ ID NO: 63319 - DNA, 1184 bp, Triticum aestivum
  misc_feature (1)..(1184): Ceres Seq. ID no. 13596958
accaccaccacaccacacttgctcgtctccctctgcccctccccttcctcctatagcaatcaaaccaccagctccactcccccctccccttcctccgtcctcaccctccccctcctgctactccccagttcatgtcctgctgcttcccatgtcgccgcctctcgagctcgactacataggcctctcggccgccgccggcggccgcccggacgacgacctgaaaggcaccgagctccgcctcggacttcccggctgcgagtcgcccgaccgccgcccggtcgccgccaccaccacactggagctgctgcccgccaagggggccaagcgagggttttcggacgaggtcgtgccgcctgcgccgatttccgccgccgggaaaggcaaggaggcgtccggggatgagaaggacaagaaggtcgccgccccgccgcagcctgctgccaaggctcaggtggtgggatggccaccagtccgcagctaccgcaagaacacgatggcaaccaccaccaaccagctgaagagcagcaaggaggattctgacacgaagcaggggcaagagtttctgtatgtcaaggtcagcatggatgggtgcgccttacctgaggaaggttgacctcaagacatacaaganctataaggacatggttgtggcgctagggaaaatgttcattggcttcaggaccgggaaggatggtgcatctgagaacagaaaggatggtgaatatgtgatgacttacgaagacaaggatggagactggatgctggttggtgacgtcccatgggagatgttcaccgaggcttgccggaggatcagggtcatgaaaagttcagatgtagttgggcttggagttacaagggcaggggttaagtccaagaataagaactaaaacggtcgctgcccacggtttgaagacgaggtcgcacatgccgtctgtactactgcatggttttcctatcccacaagtaaaatcacccgttactctaccgtttaagatttgcgacatctcctagagacttatgctctatattttgttgtgcccacgttgttgtacgcgtgttatttccatccgtgtaaatggttggtaagcagtgcgagagctactgctgtgtttgatgactcctatgtattttgccactcttgtcctgaaccggtcgttcgtcgtaaatgtgaaggttgcaagcct

SEQ ID NO: 63320 - protein, 203 aa, Triticum aestivum
  peptide (1)..(203): Ceres Seq. ID no. 13596959
  misc_feature (72)..(196): Pfam Name: AUX/IAA family Pfam Description: AUX/IAA family
  misc_feature (135)..(196): Homolog of NCBI NO: 15235556 NR Description: AUX/IAA family [Arabidopsis thaliana]
  misc_feature (72)..(146): Homolog of NCBI NO: 15235556 NR Description: AUX/IAA family [Arabidopsis thaliana]
  misc_feature (50)..(196): Homolog of NCBI NO: 34911088 NR Description: OJ1117_G01.11 [Oryza sativa (japonica
  misc_feature (42)..(135): Homolog of NCBI NO: 34904314 NR Description: unnamed protein product [Oryza sativa (japonica
  misc_feature (29)..(196): Homolog of NCBI NO: 34904314 NR Description: unnamed protein product [Oryza sativa (japonica
PPPHHTCSSPSAPPLPPIAIKPPAPLPPPLPPSSPSPSCYSPVHVLLLPMSPPLELDYIGLSAAAGGRPDDDLKGTELRLGLPGCESPDRRPVAATTTLELLPAKGAKRGFSDEVVPPAPISAAGKGKEASGDEKDKKVAAPPQPAAKAQVVGWPPVRSYRKNTMATTTNQLKSSKEDSDTKQGQEFLYVKVSMDGCALPEEG

SEQ ID NO: 63321 - protein, 154 aa, Triticum aestivum
  peptide (1)..(154): Ceres Seq. ID no. 13596960
  misc_feature (23)..(147): Pfam Name: AUX/IAA family Pfam Description: AUX/IAA family
  misc_feature (86)..(147): Homolog of NCBI NO: 15235556 NR Description: AUX/IAA family [Arabidopsis thaliana]
  misc_feature (23)..(97): Homolog of NCBI NO: 15235556 NR Description: AUX/IAA family [Arabidopsis thaliana]
  misc_feature (1)..(147): Homolog of NCBI NO: 34911088 NR Description: OJ1117_G01.11 [Oryza sativa (japonica
  misc_feature (1)..(86): Homolog of NCBI NO: 34904314 NR Description: unnamed protein product [Oryza sativa (japonica
  misc_feature (1)..(147): Homolog of NCBI NO: 34904314 NR Description: unnamed protein product [Oryza sativa (japonica
MSPPLELDYIGLSAAAGGRPDDDLKGTELRLGLPGCESPDRRPVAATTTLELLPAKGAKRGFSDEVVPPAPISAAGKGKEASGDEKDKKVAAPPQPAAKAQVVGWPPVRSYRKNTMATTTNQLKSSKEDSDTKQGQEFLYVKVSMDGCALPEEG

SEQ ID NO: 63322 - protein, 133 aa, Triticum aestivum
  peptide (1)..(133): Ceres Seq. ID no. 13596961
TTTTPHLLVSLCPSPSSYSNQTTSSTPPSPSSVLTLPLLLLPSSCPAASHVAASRARLHRPLGRRRRPPGRRPERHRAPPRTSRLRVARPPPGRRHHHTGAAARQGGQARVFGRGRAACADFRRRERQGGVRG

SEQ ID NO: 63323 - DNA, 1603 bp, Triticum aestivum
  misc_feature (1)..(1603): Ceres Seq. ID no. 13596962
gtcgtataactcggggtccaatttgcaaagagacagacgcccgttcttttactgcgagacctccgcgctcgtgggcaacggcggcggcgatggcggcatcggcgagcacgtccggcgagtggctgaagggcgccctgcaggaactgaggggccgcacggggagcgccctggagctcgacgacggcctcatctccggcctcgtctccttctgcgagctcgcgcctccgcccgacgcggccgactacctcgcgaatattgttggagcagaagctgcgcaggacctcattcaggagtacttgcagaggaggggctacattgacccctcaaaaggagctggaagctcgcagtcgtctaatcttcagccttatttgaagccatctgctgatgcagcaactgcccaaacaaagaaacagacacgtacacaaaaagatccagcatcttcttctagtcagagttccaagagtcaatcagatgctgctgacacccatgctgcctccaagagaggtccaaaaaagaagggaggaaaggccatctcccttgctgaggcagcaaagggctctattgtcttcaagcaggggaaaccttgttcatgccaagcacggctgcacaatcttgttagcaactgtttatcatgtggaaaaattgtgtgtgaacaagagggcgagggaccatgtagtttctgtggctcacttgtcttgatggaaggtagtacatatgcgggtttaagtgatgttggagttcctctttcggacacagaagttgcagctgaagcttatgcaaagaggcttgttgactatgacagaaactctgcggcaagaactaaagtttatgatgaccaaagtgactattttgaaatggaaggaaatagctggctctcatctaaggaaaagacaaacctaaagaaggtgcacgacgaagctcaggatgcagctgaaaaacaaaaggggaaagtgacggtcacatttgatttggtgggccgtaaggtaattttgaacaaggacgaagccgcagagtcggaatctgaccaagggatcatgagaccactagaacagaagcatcaggttcaacgcatacagcccagcccctcgatcagagagcaaccagtcttcgttgaaacaggacctgtgaagccgagaaccgacagggtaaaacagagcaagaaactcggaaagaatggcttgtgcctggaggtaaccggaagggtgcagcatgatgacaaggatccccagagctttcttggtggcaagatgaagaagggtgatcatctcgcgtacagttcctccggtgaagttcgtgaaggtgatgactacgagtgctcccttgattttgattgagcgttactgcaaattttgatgcgctcgagtgccttcacattgtacttgcttatcccatttcatacgggttggattgtggtctggtcaagtttccagctagaggtattttggaaaggtttgcttcgggatcatatcattcaactaaagttgtcaggccgggtaggctttgagggtcttgaacatattaagtaaaagattaagcacggagcttaaaaaattatgatcctgaaaaaaaaaaaaaaaaaagcttatcgataccgtcgacctcg

SEQ ID NO: 63324 - protein, 443 aa, Triticum aestivum
  peptide (1)..(443): Ceres Seq. ID no. 13596963
  misc_feature (191)..(241): Pfam Name: Putative zinc finger motif, C2HC5-type Pfam Description: Putative zinc finger motif, C2HC5-type
  misc_feature (208)..(340): Homolog of NCBI NO: 9790043 NR Description: thyroid hormone receptor interactor 4
  misc_feature (208)..(340): Homolog of NCBI NO: 26332983 NR Description: unnamed protein product [Mus musculus]
  misc_feature (208)..(340): Homolog of NCBI NO: 703112 NR Description: thyroid receptor interactor
  misc_feature (167)..(348): Homolog of NCBI NO: 20129087 NR Description: CG11710-PB [Drosophila melanogaster]
  misc_feature (167)..(348): Homolog of NCBI NO: 24643521 NR Description: CG11710-PA [Drosophila melanogaster]
  misc_feature (126)..(231): Homolog of NCBI NO: 34864260 NR Description: similar to ASC-1 [Rattus norvegicus]
  misc_feature (208)..(374): Homolog of NCBI NO: 34864260 NR Description: similar to ASC-1 [Rattus norvegicus]
  misc_feature (208)..(329): Homolog of NCBI NO: 37606133 NR Description: SI:dZ221I3.1 (novel protein similar to human and
  misc_feature (77)..(231): Homolog of NCBI NO: 37606133 NR Description: SI:dZ221I3.1 (novel protein similar to human and
  misc_feature (38)..(443): Homolog of NCBI NO: 15228204 NR Description: expressed protein [Arabidopsis thaliana]
RITRGPICKETDARSFTARPPRSWATAAAMAASASTSGEWLKGALQELRGRTGSALELDDGLISGLVSFCELAPPPDAADYLANIVGAEAAQDLIQEYLQRRGYIDPSKGAGSSQSSNLQPYLKPSADAATAQTKKQTRTQKDPASSSSQSSKSQSDAADTHAASKRGPKKKGGKAISLAEAAKGSIVFKQGKPCSCQARLHNLVSNCLSCGKIVCEQEGEGPCSFCGSLVLMEGSTYAGLSDVGVPLSDTEVAAEAYAKRLVDYDRNSAARTKVYDDQSDYFEMEGNSWLSSKEKTNLKKVHDEAQDAAEKQKGKVTVTFDLVGRKVILNKDEAAESESDQGIMRPLEQKHQVQRIQPSPSIREQPVFVETGPVKPRTDRVKQSKKLGKNGLCLEVTGRVQHDDKDPQSFLGGKMKKGDHLAYSSSGEVREGDDYECSLDFD

SEQ ID NO: 63325 - protein, 414 aa, Triticum aestivum
  peptide (1)..(414): Ceres Seq. ID no. 13596964
  misc_feature (162)..(212): Pfam Name: Putative zinc finger motif, C2HC5-type Pfam Description: Putative zinc finger motif, C2HC5-type
  misc_feature (179)..(311): Homolog of NCBI NO: 9790043 NR Description: thyroid hormone receptor interactor 4
  misc_feature (179)..(311): Homolog of NCBI NO: 26332983 NR Description: unnamed protein product [Mus musculus]
  misc_feature (179)..(311): Homolog of NCBI NO: 703112 NR Description: thyroid receptor interactor
  misc_feature (138)..(319): Homolog of NCBI NO: 20129087 NR Description: CG11710-PB [Drosophila melanogaster]
  misc_feature (138)..(319): Homolog of NCBI NO: 24643521 NR Description: CG11710-PA [Drosophila melanogaster]
  misc_feature (97)..(202): Homolog of NCBI NO: 34864260 NR Description: similar to ASC-1 [Rattus norvegicus]
  misc_feature (179)..(345): Homolog of NCBI NO: 34864260 NR Description: similar to ASC-1 [Rattus norvegicus]
  misc_feature (179)..(300): Homolog of NCBI NO: 37606133 NR Description: SI:dZ221I3.1 (novel protein similar to human and
  misc_feature (48)..(202): Homolog of NCBI NO: 37606133 NR Description: SI:dZ221I3.1 (novel protein similar to human and
  misc_feature (9)..(414): Homolog of NCBI NO: 15228204 NR Description: expressed protein [Arabidopsis thaliana]
MAASASTSGEWLKGALQELRGRTGSALELDDGLISGLVSFCELAPPPDAADYLANIVGAEAAQDLIQEYLQRRGYIDPSKGAGSSQSSNLQPYLKPSADAATAQTKKQTRTQKDPASSSSQSSKSQSDAADTHAASKRGPKKKGGKAISLAEAAKGSIVFKQGKPCSCQARLHNLVSNCLSCGKIVCEQEGEGPCSFCGSLVLMEGSTYAGLSDVGVPLSDTEVAAEAYAKRLVDYDRNSAARTKVYDDQSDYFEMEGNSWLSSKEKTNLKKVHDEAQDAAEKQKGKVTVTFDLVGRKVILNKDEAAESESDQGIMRPLEQKHQVQRIQPSPSIREQPVFVETGPVKPRTDRVKQSKKLGKNGLCLEVTGRVQHDDKDPQSFLGGKMKKGDHLAYSSSGEVREGDDYECSLDFD

SEQ ID NO: 63326 - DNA, 1774 bp, Triticum aestivum
  misc_feature (1)..(1774): Ceres Seq. ID no. 12625335
aacctctcgcataggcataggcagagcagacccacccgctgcagacctggaccaccggtcacgaggccacgcgtcagggaaacaccctctccctctccggcagaaaacggaggtggacgtcgtccacctttgccggccccgttcttaatgccgcgcggtaatcgccgcgagcttctactacagtcaccggaggtccggaggccggagcgcactgtgaggcgtcacatgggatgggcttgtacgtacgtacgctagctggcactccacatttattacggcagtcggcaggttgcccatcccctcccatcccctcccgtcgcggccgccgtcccttcccttctcgcctccaggtccaggtcccggcccgctttaaatccgcccctggcctcccttccggcctccctccctccctcgctcgccgctgcttagtggagtagtataatcagtacagataattattggcagccagatattttcgtccgctcagttcagttcaccacccgcggtggccgccagtgcccggatcgccgatcgacagatggacgcggccatatccgccgcccacgaagcgccgcccgctgtcgtcctcgtctccgccggcgccagccactccgtcgccctcctcgcgggcaatgtgctgtgcacgtggggcaggggagaggacgggcagctgggccacggggacgccgaggaccgcctcgtgccgacggtgatcagcggcttcgacgcgccggggatcacgtccgtcatctgcggggcggaccacaccaccgcctactccgaggacgagcaccaggtctacagctggggttggggggatttcgggaggctggggcacggcaactccaccgacgtgttcacgccccagccggtcaaggcgctgcaggggataaagatcaagcagctcgcctgtggggatagccactgtctggccgtcaccatggccggtgaagtgctcagctgggggcgtaaccaaaatggccagcttggtcttggaactactgaagattcgctgctcccacaaacgattcaagcttttgagggtatttctgtgaacatgattgctgctggtgccgaacatactgctgcagtaactgaagatggcgaaatctatggatggggctggggtcggtacggaaacttgggtcttggtgatcggaatgaccgatttgttcctgaaaaagtatcttcggtgtccctggcgccttcacccccacctgcagcaatcagcatgtaccaggcttcattactcaggccgaggagctcaaagccaagggtgtagatgagatcctgcttgtcagcgttaatgacccctttgtcatgaaagcatgggcgaagacatacccagacaacaagcatgtgaagttccttgctgatggagcggcagcatacacaaaagcacttggtcttgagcttgatcttacggagaaaggattgggtcttcgttcgaggcggtttgctctccttgctgacgacctcaaggtcaccgtcgcaaacgtcgaggaaggtggccagttcacaatctctggtgccgaggagatcctcaaggcactgtaggagcttcagcgcttcggaatcgcagcgatcacccaaaccttgtgtcatatcgatgtagtttgaacttgtctgccgaactactagtgggaataaattgtcaatgtgcatttcttcatgtactttatgtgcggtgcaagtgacttcagagttttccggtcaaattgttggttgtgttgcaaacattctgagattgttcaaggaaaatggtgtgggtggt

SEQ ID NO: 63327 - protein, 247 aa, Triticum aestivum
  peptide (1)..(247): Ceres Seq. ID no. 12625336
  misc_feature (137)..(185): Pfam Name: Regulator of chromosome condensation (RCC1) Pfam Description: Regulator of chromosome condensation (RCC1)
  misc_feature (15)..(221): Homolog of NCBI NO: 15237540 NR Description: UVB-resistance protein UVR8 (gb|AAD43920.1)
  misc_feature (8)..(221): Homolog of NCBI NO: 11358913 NR Description: UVB-resistance protein UVR8 [imported] -
  misc_feature (19)..(219): Homolog of NCBI NO: 27923092 NR Description: HERC2 [Homo sapiens]
  misc_feature (1)..(220): Homolog of NCBI NO: 11358913 NR Description: UVB-resistance protein UVR8 [imported] -
  misc_feature (1)..(220): Homolog of NCBI NO: 15237540 NR Description: UVB-resistance protein UVR8 (gb|AAD43920.1)
  misc_feature (18)..(216): Homolog of NCBI NO: 15237540 NR Description: UVB-resistance protein UVR8 (gb|AAD43920.1)
  misc_feature (18)..(216): Homolog of NCBI NO: 11358913 NR Description: UVB-resistance protein UVR8 [imported] -
  misc_feature (7)..(218): Homolog of NCBI NO: 15237540 NR Description: UVB-resistance protein UVR8 (gb|AAD43920.1)
  misc_feature (7)..(218): Homolog of NCBI NO: 11358913 NR Description: UVB-resistance protein UVR8 [imported] -
  misc_feature (2)..(219): Homolog of NCBI NO: 21741206 NR Description: OSJNBb0086G13.1 [Oryza sativa (japonica
MDAAISAAHEAPPAVVLVSAGASHSVALLAGNVLCTWGRGEDGQLGHGDAEDRLVPTVISGFDAPGITSVICGADHTTAYSEDEHQVYSWGWGDFGRLGHGNSTDVFTPQPVKALQGIKIKQLACGDSHCLAVTMAGEVLSWGRNQNGQLGLGTTEDSLLPQTIQAFEGISVNMIAAGAEHTAAVTEDGEIYGWGWGRYGNLGLGDRNDRFVPEKVSSVSLAPSPPPAAISMYQASLLRPRSSKPRV

SEQ ID NO: 63328 - DNA, 462 bp, Triticum aestivum
  misc_feature (1)..(462): Ceres Seq. ID no. 13655305
gcactcccgcctctcccaaatcctagggtttctcgatccacccctccctcacaccccgccgccgccgccgccgccgtcgccgtccgccgcactcccgagggtttctcgatccacccccgcccccttcgcgccccgccgccgccggcccccgcccgcccgcgaagatgttggagctgaggctggtgcaggggagcctgctgaagaaggtgctggaggcgatcaaggagctggtgacggacgccaacttcgactgctccgggacgggcttctcgctgcaggccatggactcctcccacgtcgcgctcgtcgccctgctcctccgctccgagggattcgagcactaccgctgcgaccgcaacctctccatgggcatgaacctcggcaacatggccaagatgctccgctgcgcgggcaacgacgacatcatcaccatcaaggccgacgacggctccgacaccgtca

SEQ ID NO: 63329 - protein, 153 aa, Triticum aestivum
  peptide (1)..(153): Ceres Seq. ID no. 13655306
  misc_feature (16)..(80): Pfam Name: TT viral ORF2 Pfam Description: TT viral ORF2
HSRLSQILGFLDPPLPHTPPPPPPPSPSAALPRVSRSTPAPFAPRRRRPPPAREDVGAEAGAGEPAEEGAGGDQGAGDGRQLRLLRDGLLAAGHGLLPRRARRPAPPLRGIRALPLRPQPLHGHEPRQHGQDAPLRGQRRHHHHQGRRRLRHR

SEQ ID NO: 63330 - protein, 99 aa, Triticum aestivum
  peptide (1)..(99): Ceres Seq. ID no. 13655307
  misc_feature (1)..(98): Pfam Name: Proliferating cell nuclear antigen, N-terminal domain Pfam Description: Proliferating cell nuclear antigen, N-terminal
  misc_feature (1)..(98): Homolog of NCBI NO: 129692 NR Description: PROLIFERATING CELL NUCLEAR ANTIGEN (PCNA) (CYCLIN)
  misc_feature (1)..(98): Homolog of NCBI NO: 100160 NR Description: proliferating cell nuclear antigen (clone 4.10) -
  misc_feature (1)..(98): Homolog of NCBI NO: 15227564 NR Description: proliferating cell nuclear antigen, PCNA -related
  misc_feature (1)..(98): Homolog of NCBI NO: 4406225 NR Description: proliferating cell nuclear antigen II [Nicotiana
  misc_feature (1)..(98): Homolog of NCBI NO: 3947727 NR Description: proliferating cell nuclear antigen [Nicotiana
  misc_feature (1)..(98): Homolog of NCBI NO: 3608175 NR Description: proliferating cell nuclear antigen [Pisum
  misc_feature (1)..(98): Homolog of NCBI NO: 10946427 NR Description: proliferating cell nuclear antigen [Nicotiana
  misc_feature (1)..(98): Homolog of NCBI NO: 2499442 NR Description: PROLIFERATING CELL NUCLEAR ANTIGEN (PCNA)
  misc_feature (1)..(98): Homolog of NCBI NO: 4099508 NR Description: proliferating cell nuclear antigen [Zea mays]
  misc_feature (1)..(98): Homolog of NCBI NO: 129697 NR Description: PROLIFERATING CELL NUCLEAR ANTIGEN (PCNA)
MLELRLVQGSLLKKVLEAIKELVTDANFDCSGTGFSLQAMDSSHVALVALLLRSEGFEHYRCDRNLSMGMNLGNMAKMLRCAGNDDIITIKADDGSDTV

SEQ ID NO: 63331 - DNA, 1146 bp, Triticum aestivum
  misc_feature (1)..(1146): Ceres Seq. ID no. 12616093
atcgcctcgtcatccgcagctccactttccagtccgcagtgaccgccgccgccgccacctccacccgctcctcacctaccccggcggcgaccccccaggtacaccccgaatggcgacggcggtcacggcgtcggccaccgcggcgacccgcttcacgcgcctggcgggcgtcgccctccggcgcagcagctgccgcccccgcaccgcggtgcgcttccagcgcccggggctcaccaccaccgcgctcctcaggcccaccgagctcaagcccaaggaccagggccagcccgagacgctcgactaccgcgtcttcctcgtcgacggcgccgaccgcaaggtgtccccgtggcacgacgtgccgctccgcgccggggacggggcgttccacttcatcgtggagatccccaaggagagcagcgccaagatggaggtcgccaccgacgaggcctacacgcccatcaagcaggacaccaagaagggcaaccttcgttactacccgtacaacatcaactggaactacgggttacttccccagacatgggaggacccgacagctgcaaatgctgatgttgaaggagcacttggagacaatgatcctgttgatgttgtcgagattggtgaaagacgggccaatattggggatgttcttagggtgaaaccattggcagctttagcaatgatcgacgagggagagcttgactggaaaattgtggccatctctctggatgatcccaaagcatctcttgtgaatgatgtagatgatgtcgaggagcattttccgggaacattgactgcaatcagagactggttcagagactacaagataccagacggaaagcccgccaacagattcggcctcggcaacaagcccacaagcaaggaatatgccctgaaggtgatagaagaaaccaacgagtcatgggagaaattggtgaagaggaaaatcccggcgggagagctctcgctagcctagccttttacaggcccatgagaagccaacaacacattctttcagtgacatactactccctcctaagcgtgctgctctttcgtgacgtgtacctacgaacaagcttcttcatctgcagaacattccgtgtgcctgttaaaacaggaataaaaatgaataacctggttgtggagcgg

SEQ ID NO: 63332 - protein, 323 aa, Triticum aestivum
  peptide (1)..(323): Ceres Seq. ID no. 12616094
  misc_feature (129)..(309): Pfam Name: Inorganic pyrophosphatase Pfam Description: Inorganic pyrophosphatase
  misc_feature (91)..(314): Homolog of NCBI NO: 585322 NR Description: Inorganic pyrophosphatase (Pyrophosphate
  misc_feature (91)..(314): Homolog of NCBI NO: 27754065 NR Description: RIKEN cDNA 2010317E03 [Mus musculus]
  misc_feature (91)..(314): Homolog of NCBI NO: 34852506 NR Description: similar to RIKEN cDNA 2010317E03 [Rattus
  misc_feature (94)..(314): Homolog of NCBI NO: 26353394 NR Description: unnamed protein product [Mus musculus]
  misc_feature (92)..(317): Homolog of NCBI NO: 25290351 NR Description: protein C47E12.4 [imported] - Caenorhabditis
  misc_feature (34)..(317): Homolog of NCBI NO: 39585749 NR Description: Hypothetical protein CBG03439 [Caenorhabditis
  misc_feature (34)..(317): Homolog of NCBI NO: 17539266 NR Description: Inorganic pyrophosphatase [Caenorhabditis
  misc_feature (54)..(322): Homolog of NCBI NO: 14571671 NR Description: inorganic pyrophosphatase precursor
  misc_feature (38)..(322): Homolog of NCBI NO: 21592878 NR Description: inorganic pyrophosphatase-like protein
  misc_feature (38)..(322): Homolog of NCBI NO: 15242465 NR Description: inorganic pyrophosphatase - like protein
SPRHPQLHFPVRSDRRRRHLHPLLTYPGGDPPGTPRMATAVTASATAATRFTRLAGVALRRSSCRPRTAVRFQRPGLTTTALLRPTELKPKDQGQPETLDYRVFLVDGADRKVSPWHDVPLRAGDGAFHFIVEIPKESSAKMEVATDEAYTPIKQDTKKGNLRYYPYNINWNYGLLPQTWEDPTAANADVEGALGDNDPVDVVEIGERRANIGDVLRVKPLAALAMIDEGELDWKIVAISLDDPKASLVNDVDDVEEHFPGTLTAIRDWFRDYKIPDGKPANRFGLGNKPTSKEYALKVIEETNESWEKLVKRKIPAGELSLA

SEQ ID NO: 63333 - protein, 287 aa, Triticum aestivum
  peptide (1)..(287): Ceres Seq. ID no. 12616095
  misc_feature (93)..(273): Pfam Name: Inorganic pyrophosphatase Pfam Description: Inorganic pyrophosphatase
  misc_feature (55)..(278): Homolog of NCBI NO: 585322 NR Description: Inorganic pyrophosphatase (Pyrophosphate
  misc_feature (55)..(278): Homolog of NCBI NO: 27754065 NR Description: RIKEN cDNA 2010317E03 [Mus musculus]
  misc_feature (55)..(278): Homolog of NCBI NO: 34852506 NR Description: similar to RIKEN cDNA 2010317E03 [Rattus
  misc_feature (58)..(278): Homolog of NCBI NO: 26353394 NR Description: unnamed protein product [Mus musculus]
  misc_feature (56)..(281): Homolog of NCBI NO: 25290351 NR Description: protein C47E12.4 [imported] - Caenorhabditis
  misc_feature (1)..(281): Homolog of NCBI NO: 39585749 NR Description: Hypothetical protein CBG03439 [Caenorhabditis
  misc_feature (1)..(281): Homolog of NCBI NO: 17539266 NR Description: Inorganic pyrophosphatase [Caenorhabditis
  misc_feature (18)..(286): Homolog of NCBI NO: 14571671 NR Description: inorganic pyrophosphatase precursor
  misc_feature (2)..(286): Homolog of NCBI NO: 21592878 NR Description: inorganic pyrophosphatase-like protein
  misc_feature (2)..(286): Homolog of NCBI NO: 15242465 NR Description: inorganic pyrophosphatase - like protein
MATAVTASATAATRFTRLAGVALRRSSCRPRTAVRFQRPGLTTTALLRPTELKPKDQGQPETLDYRVFLVDGADRKVSPWHDVPLRAGDGAFHFIVEIPKESSAKMEVATDEAYTPIKQDTKKGNLRYYPYNINWNYGLLPQTWEDPTAANADVEGALGDNDPVDVVEIGERRANIGDVLRVKPLAALAMIDEGELDWKIVAISLDDPKASLVNDVDDVEEHFPGTLTAIRDWFRDYKIPDGKPANRFGLGNKPTSKEYALKVIEETNESWEKLVKRKIPAGELSLA

SEQ ID NO: 63334 - protein, 217 aa, Triticum aestivum
  peptide (1)..(217): Ceres Seq. ID no. 12616096
  misc_feature (24)..(149): Pfam Name: Progesterone receptor Pfam Description: Progesterone receptor
  misc_feature (7)..(173): Homolog of NCBI NO: 28828093 NR Description: similar to Dictyostelium discoideum (Slime mold).
  misc_feature (7)..(173): Homolog of NCBI NO: 134780 NR Description: SPORE COAT PROTEIN SP96
  misc_feature (22)..(160): Homolog of NCBI NO: 25143299 NR Description: pre-mRNA splicing SR protein related RSR-1 (68.2
  misc_feature (11)..(173): Homolog of NCBI NO: 11360494 NR Description: antifreeze glycopeptide AFGP polyprotein
  misc_feature (5)..(172): Homolog of NCBI NO: 11360318 NR Description: probable mucin DKFZp434C196.1 - human (fragment)
  misc_feature (5)..(173): Homolog of NCBI NO: 11360494 NR Description: antifreeze glycopeptide AFGP polyprotein
  misc_feature (16)..(172): Homolog of NCBI NO: 11360318 NR Description: probable mucin DKFZp434C196.1 - human (fragment)
  misc_feature (5)..(184): Homolog of NCBI NO: 11360318 NR Description: probable mucin DKFZp434C196.1 - human (fragment)
  misc_feature (11)..(182): Homolog of NCBI NO: 25143299 NR Description: pre-mRNA splicing SR protein related RSR-1 (68.2
  misc_feature (6)..(183): Homolog of NCBI NO: 23510008 NR Description: hypothetical protein [Plasmodium falciparum 3D7]
RLVIRSSTFQSAVTAAAATSTRSSPTPAATPQVHPEWRRRSRRRPPRRPASRAWRASPSGAAAAAPAPRCASSARGSPPPRSSGPPSSSPRTRASPRRSTTASSSSTAPTARCPRGTTCRSAPGTGRSTSSWRSPRRAAPRWRSPPTRPTRPSSRTPRRATFVTTRTTSTGTTGYFPRHGRTRQLQMLMLKEHLETMILLMLSRLVKDGPILGMFLG

SEQ ID NO: 63335 - DNA, 1230 bp, Triticum aestivum
  misc_feature (1)..(1230): Ceres Seq. ID no. 13655519
aggttttactagggtttttgctagtttgcgccgtcgatcgccgccgacccccgccacccgccgacgcatccctccttcccggcacagcgtacgggccatgagagacctccacctcccgctgaaccagacccagagggtccgcctcgaggccgcgctccacgagctccagacccttgcccccgcggccgcgtccgccgccgccgtcaccgtcgcggacaacatccccgtcaaccacgaggacaacatcctcaaagggcatggtacgacggatcaggatggggaggtggtggcgacgctgtgcggcgtggtggagcgggtcaacaagctcgtctacgtgaggacgctccgggctaggtataagccagaggttggtgatatcatagttggccgtgtcatcgagattgctccaaagcgctggcggttggagataaactttagccaagatgctgttttaatgctttcttcaatgaatttgcctgatggaattcagagaagaagaactgcggttgatgagcttaatatgcggagtatatttgaagaaaatgatgtcgtctgcgctgaagttcgtggtttccaacatgatggatctcttcatctacaagcaaggagtcaaaaatatggaaagcttcagagaggtcaattgctcacggtgcctgcgtatctggtaaaacgccggaagctgcatttccatcatctagagcagtatgacgtcgacctgatccttggctgcaacggtttcatctgggtcggtgagcacgtcgtggtgcgtgaaattgctgatttgaaggaagacgaacagaagctgagcgccgaagcggagacttttaccccaatagaaacaaggagacacatttgccgtcttgccaatgctgcacgcttgctttcagccctaggattcactctgactgttgagctgataattcagactgcggaagcgagcgtatcatcaaatgtcgagataaacgacatgctcggggctgaattctatgtccagacggcggagggagaggctaagcgtcgaggtgacctcctgggaaagaagaggtaatcatcttggccctgcctgcctggtttgctgtaaactgaaaatgctgacatgtacgggatatgtaaaaggaggtaatgccacccggtgcccttgtagcatacgacgattttgagattttggagcttgctccactgtagtgtgcattcgttttaagatggtattaagatatctgttattctgtc

SEQ ID NO: 63336 - protein, 348 aa, Triticum aestivum
  peptide (1)..(348): Ceres Seq. ID no. 13655520
  misc_feature (79)..(249): Homolog of NCBI NO: 24762324 NR Description: CG3931-PA [Drosophila melanogaster]
  misc_feature (79)..(249): Homolog of NCBI NO: 21428348 NR Description: GM02257p [Drosophila melanogaster]
  misc_feature (83)..(323): Homolog of NCBI NO: 17544090 NR Description: Ribosomal RNA processing like (34.1 kD)
  misc_feature (83)..(322): Homolog of NCBI NO: 39584168 NR Description: Hypothetical protein CBG05449 [Caenorhabditis
  misc_feature (76)..(327): Homolog of NCBI NO: 19923403 NR Description: homolog of Yeast RRP4 (ribosomal RNA processing
  misc_feature (76)..(327): Homolog of NCBI NO: 21450259 NR Description: homolog of Yeast RRP4 (ribosomal RNA processing
  misc_feature (45)..(311): Homolog of NCBI NO: 20378673 NR Description: exonuclease [Phytophthora sojae]
  misc_feature (76)..(319): Homolog of NCBI NO: 19113896 NR Description: conserved hypothetical protein
  misc_feature (33)..(340): Homolog of NCBI NO: 15218790 NR Description: expressed protein [Arabidopsis thaliana]
  misc_feature (33)..(347): Homolog of NCBI NO: 21741863 NR Description: OSJNBa0019D11.5 [Oryza sativa (japonica
GFTRVFASLRRRSPPTPATRRRIPPSRHSVRAMRDLHLPLNQTQRVRLEAALHELQTLAPAAASAAAVTVADNIPVNHEDNILKGHGTTDQDGEVVATLCGVVERVNKLVYVRTLRARYKPEVGDIIVGRVIEIAPKRWRLEINFSQDAVLMLSSMNLPDGIQRRRTAVDELNMRSIFEENDVVCAEVRGFQHDGSLHLQARSQKYGKLQRGQLLTVPAYLVKRRKLHFHHLEQYDVDLILGCNGFIWVGEHVVVREIADLKEDEQKLSAEAETFTPIETRRHICRLANAARLLSALGFTLTVELIIQTAEASVSSNVEINDMLGAEFYVQTAEGEAKRRGDLLGKKR

SEQ ID NO: 63337 - protein, 316 aa, Triticum aestivum
  peptide (1)..(316): Ceres Seq. ID no. 13655521
  misc_feature (47)..(217): Homolog of NCBI NO: 24762324 NR Description: CG3931-PA [Drosophila melanogaster]
  misc_feature (47)..(217): Homolog of NCBI NO: 21428348 NR Description: GM02257p [Drosophila melanogaster]
  misc_feature (51)..(291): Homolog of NCBI NO: 17544090 NR Description: Ribosomal RNA processing like (34.1 kD)
  misc_feature (51)..(290): Homolog of NCBI NO: 39584168 NR Description: Hypothetical protein CBG05449 [Caenorhabditis
  misc_feature (44)..(295): Homolog of NCBI NO: 19923403 NR Description: homolog of Yeast RRP4 (ribosomal RNA processing
  misc_feature (44)..(295): Homolog of NCBI NO: 21450259 NR Description: homolog of Yeast RRP4 (ribosomal RNA processing
  misc_feature (13)..(279): Homolog of NCBI NO: 20378673 NR Description: exonuclease [Phytophthora sojae]
  misc_feature (44)..(287): Homolog of NCBI NO: 19113896 NR Description: conserved hypothetical protein
  misc_feature (1)..(308): Homolog of NCBI NO: 15218790 NR Description: expressed protein [Arabidopsis thaliana]
  misc_feature (1)..(315): Homolog of NCBI NO: 21741863 NR Description: OSJNBa0019D11.5 [Oryza sativa (japonica
MRDLHLPLNQTQRVRLEAALHELQTLAPAAASAAAVTVADNIPVNHEDNILKGHGTTDQDGEVVATLCGVVERVNKLVYVRTLRARYKPEVGDIIVGRVIEIAPKRWRLEINFSQDAVLMLSSMNLPDGIQRRRTAVDELNMRSIFEENDVVCAEVRGFQHDGSLHLQARSQKYGKLQRGQLLTVPAYLVKRRKLHFHHLEQYDVDLILGCNGFIWVGEHVVVREIADLKEDEQKLSAEAETFTPIETRRHICRLANAARLLSALGFTLTVELIIQTAEASVSSNVEINDMLGAEFYVQTAEGEAKRRGDLLGKKR

SEQ ID NO: 63338 - protein, 197 aa, Triticum aestivum
  peptide (1)..(197): Ceres Seq. ID no. 13655522
  misc_feature (1)..(98): Homolog of NCBI NO: 24762324 NR Description: CG3931-PA [Drosophila melanogaster]
  misc_feature (1)..(98): Homolog of NCBI NO: 21428348 NR Description: GM02257p [Drosophila melanogaster]
  misc_feature (1)..(172): Homolog of NCBI NO: 17544090 NR Description: Ribosomal RNA processing like (34.1 kD)
  misc_feature (1)..(171): Homolog of NCBI NO: 39584168 NR Description: Hypothetical protein CBG05449 [Caenorhabditis
  misc_feature (1)..(176): Homolog of NCBI NO: 19923403 NR Description: homolog of Yeast RRP4 (ribosomal RNA processing
  misc_feature (1)..(176): Homolog of NCBI NO: 21450259 NR Description: homolog of Yeast RRP4 (ribosomal RNA processing
  misc_feature (1)..(160): Homolog of NCBI NO: 20378673 NR Description: exonuclease [Phytophthora sojae]
  misc_feature (1)..(168): Homolog of NCBI NO: 19113896 NR Description: conserved hypothetical protein
  misc_feature (1)..(189): Homolog of NCBI NO: 15218790 NR Description: expressed protein [Arabidopsis thaliana]
  misc_feature (1)..(196): Homolog of NCBI NO: 21741863 NR Description: OSJNBa0019D11.5 [Oryza sativa (japonica
MLSSMNLPDGIQRRRTAVDELNMRSIFEENDVVCAEVRGFQHDGSLHLQARSQKYGKLQRGQLLTVPAYLVKRRKLHFHHLEQYDVDLILGCNGFIWVGEHVVVREIADLKEDEQKLSAEAETFTPIETRRHICRLANAARLLSALGFTLTVELIIQTAEASVSSNVEINDMLGAEFYVQTAEGEAKRRGDLLGKKR

SEQ ID NO: 63339 - DNA, 2174 bp, Triticum aestivum
  misc_feature (1)..(2174): Ceres Seq. ID no. 12616176
aaaaacccctaaacccccaaaaaatggcggcgccgccggcacacctccgccgcctcctcctgccgcacctccgccggaaccgcctcttctccgcgctgaccgacaccccctcgcccccgccgcccgccccgacctcagacgccatcctctactcgctccgcggcctcgccaaggacccgccgcaggcgctctccctcttccggcgcgcggcggccgcgggccacccgctcggccccgcggcttacaacctcatgctccgcacgctcgcctccaccccggccgccgcgcgggcccacttctggcccttcctccgcgacatggacgccgccggccactccgtcgaccagggcacctacctcgccgccctcgcctccttcaagcgcgccagcctcgccaccgactacgccaccctctccgcccgcctcgccaagtcccgggacgaccacgccgcccaggccgccgccggcggcacccccgtcacctccctcgccgacgccgtccgcgggctcgacctcgaccagccgggggctgacgaggcgctcgaggagaagctggagggcgtcgccgagcagctgctgccgctcacggaggcggccgtggccggggtgctgcgggaggcgagggacgtcccggccaaggcgctcgctttcttccggtgggccggcaggcagaacggctacgagcacgggtccgtcgcctacaacgcgatggcgagggtgctcggccgggaggagtcgctgcgggagttctgggagctgatccaggagatgaagaccggcgagctgcacatcgacatcgacacctacatgaagctgtccaggcagttccagaagcgccacatgatgaccgaggccgtggagctctacgagctcatgatggacggcccctacaagcccgcgcagcaggacgggccgctgctcctccggcgcatcgccatggggccggagcccgacctcgagctggtgtaccgcgtcgtgaggaagttcgaggccgtctatgagttcaagaccaagaatgtgtttgacgggatccacagggcgctcaccagcaatggcaggttcgacgaggccgcggagatcgtggagaggatgagagccgctggccaccagccggacaacatcacgtatagccagctggtctttgggctgtgcaaggccaccaagtgcgatgaagctcgccaggtgctcgatgaaatggaggctgagggttgcacgccggacctgaagacctggaccatgttgatccaagggcactgtgccgccggggaggtggacaaggctctgcagtacttgacagagatgatcgagaaggacttggaagcagacgccgatttgctggatgtgatggtgaaaggtctgtgcaaacaggaaaagattgacgcggcttacactttgtttgttgagatggtggacactgccaagttgaacccttggcaaggaacttacaagcatatcattgccgagttgctgagggtgaagaaactcgaggaggcactgggccttcttaaatcaatgaaagcccgcaagtttccaccttttgcagaccccttcccttcaaacatcgctgaatacgggacgcttgaagatgccagggactttctgaaggccttgaaaggatcatctaataactatccgcagccccctgtctatgtgcagatgttcaaggcattctttgcagaggggagatactcagaagctcaggatttactctataaatgccccatccatatccgcaggcatcatgacatcaccgagctgtttgaaccaaaaaaagttcaggctactgcttgactgaagaacaataaattgttgagacggacttcctgcgcgatcggatgaaaactatgtggaagacgctgcctggaaggcatatccgatgtggtggtttctgacggagtttggcatgatagggattggcaacagaaacaagtcatatgttgataggtaggtagatatgctccctgcctgggaagatgcttcgtgcatcccacacgctagtactattatccgcagaatgtttatcacatgggcatcttgataattttatatatcctttattatacggttggaaatgtaacagtttatattctggaaagcgagagcacttggttgctgtcaaatttttacaacgcctttgctgcagttagaacttgcaggccttctgctggcagtgtc

SEQ ID NO: 63340 - protein, 595 aa, Triticum aestivum
  peptide (1)..(595): Ceres Seq. ID no. 12616177
  misc_feature (266)..(300): Pfam Name: PPR repeat Pfam Description: PPR repeat
  misc_feature (190)..(570): Homolog of NCBI NO: 15233383 NR Description: putative protein; protein id: At4g20740.1
  misc_feature (183)..(565): Homolog of NCBI NO: 15229604 NR Description: putative protein; protein id: At3g49730.1
  misc_feature (212)..(520): Homolog of NCBI NO: 32488707 NR Description: OSJNBa0088H09.8 [Oryza sativa (japonica
  misc_feature (194)..(531): Homolog of NCBI NO: 15237375 NR Description: salt-inducible protein-like; protein id:
  misc_feature (183)..(567): Homolog of NCBI NO: 15239161 NR Description: putative protein; protein id: At5g65820.1
  misc_feature (44)..(595): Homolog of NCBI NO: 22326834 NR Description: putative protein
  misc_feature (44)..(595): Homolog of NCBI NO: 11357571 NR Description: hypothetical protein F1N13_120 - Arabidopsis
  misc_feature (52)..(590): Homolog of NCBI NO: 15232917 NR Description: unknown protein; protein id: At3g02490.1
  misc_feature (39)..(586): Homolog of NCBI NO: 15228363 NR Description: putative protein; protein id: At3g48250.1
  misc_feature (24)..(593): Homolog of NCBI NO: 34905990 NR Description: P0518C01.6 [Oryza sativa (japonica
KPLNPQKMAAPPAHLRRLLLPHLRRNRLFSALTDTPSPPPPAPTSDAILYSLRGLAKDPPQALSLFRRAAAAGHPLGPAAYNLMLRTLASTPAAARAHFWPFLRDMDAAGHSVDQGTYLAALASFKRASLATDYATLSARLAKSRDDHAAQAAAGGTPVTSLADAVRGLDLDQPGADEALEEKLEGVAEQLLPLTEAAVAGVLREARDVPAKALAFFRWAGRQNGYEHGSVAYNAMARVLGREESLREFWELIQEMKTGELHIDIDTYMKLSRQFQKRHMMTEAVELYELMMDGPYKPAQQDGPLLLRRIAMGPEPDLELVYRVVRKFEAVYEFKTKNVFDGIHRALTSNGRFDEAAEIVERMRAAGHQPDNITYSQLVFGLCKATKCDEARQVLDEMEAEGCTPDLKTWTMLIQGHCAAGEVDKALQYLTEMIEKDLEADADLLDVMVKGLCKQEKIDAAYTLFVEMVDTAKLNPWQGTYKHIIAELLRVKKLEEALGLLKSMKARKFPPFADPFPSNIAEYGTLEDARDFLKALKGSSNNYPQPPVYVQMFKAFFAEGRYSEAQDLLYKCPIHIRRHHDITELFEPKKVQATA

SEQ ID NO: 63341 - protein, 588 aa, Triticum aestivum
  peptide (1)..(588): Ceres Seq. ID no. 12616178
  misc_feature (259)..(293): Pfam Name: PPR repeat Pfam Description: PPR repeat
  misc_feature (183)..(563): Homolog of NCBI NO: 15233383 NR Description: putative protein; protein id: At4g20740.1
  misc_feature (176)..(558): Homolog of NCBI NO: 15229604 NR Description: putative protein; protein id: At3g49730.1
  misc_feature (205)..(513): Homolog of NCBI NO: 32488707 NR Description: OSJNBa0088H09.8 [Oryza sativa (japonica
  misc_feature (187)..(524): Homolog of NCBI NO: 15237375 NR Description: salt-inducible protein-like; protein id:
  misc_feature (176)..(560): Homolog of NCBI NO: 15239161 NR Description: putative protein; protein id: At5g65820.1
  misc_feature (37)..(588): Homolog of NCBI NO: 22326834 NR Description: putative protein
  misc_feature (37)..(588): Homolog of NCBI NO: 11357571 NR Description: hypothetical protein F1N13_120 - Arabidopsis
  misc_feature (45)..(583): Homolog of NCBI NO: 15232917 NR Description: unknown protein; protein id: At3g02490.1
  misc_feature (32)..(579): Homolog of NCBI NO: 15228363 NR Description: putative protein; protein id: At3g48250.1
  misc_feature (17)..(586): Homolog of NCBI NO: 34905990 NR Description: P0518C01.6 [Oryza sativa (japonica
MAAPPAHLRRLLLPHLRRNRLFSALTDTPSPPPPAPTSDAILYSLRGLAKDPPQALSLFRRAAAAGHPLGPAAYNLMLRTLASTPAAARAHFWPFLRDMDAAGHSVDQGTYLAALASFKRASLATDYATLSARLAKSRDDHAAQAAAGGTPVTSLADAVRGLDLDQPGADEALEEKLEGVAEQLLPLTEAAVAGVLREARDVPAKALAFFRWAGRQNGYEHGSVAYNAMARVLGREESLREFWELIQEMKTGELHIDIDTYMKLSRQFQKRHMMTEAVELYELMMDGPYKPAQQDGPLLLRRIAMGPEPDLELVYRVVRKFEAVYEFKTKNVFDGIHRALTSNGRFDEAAEIVERMRAAGHQPDNITYSQLVFGLCKATKCDEARQVLDEMEAEGCTPDLKTWTMLIQGHCAAGEVDKALQYLTEMIEKDLEADADLLDVMVKGLCKQEKIDAAYTLFVEMVDTAKLNPWQGTYKHIIAELLRVKKLEEALGLLKSMKARKFPPFADPFPSNIAEYGTLEDARDFLKALKGSSNNYPQPPVYVQMFKAFFAEGRYSEAQDLLYKCPIHIRRHHDITELFEPKKVQATA

SEQ ID NO: 63342 - protein, 512 aa, Triticum aestivum
  peptide (1)..(512): Ceres Seq. ID no. 12616179
  misc_feature (183)..(217): Pfam Name: PPR repeat Pfam Description: PPR repeat
  misc_feature (107)..(487): Homolog of NCBI NO: 15233383 NR Description: putative protein; protein id: At4g20740.1
  misc_feature (100)..(482): Homolog of NCBI NO: 15229604 NR Description: putative protein; protein id: At3g49730.1
  misc_feature (129)..(437): Homolog of NCBI NO: 32488707 NR Description: OSJNBa0088H09.8 [Oryza sativa (japonica
  misc_feature (111)..(448): Homolog of NCBI NO: 15237375 NR Description: salt-inducible protein-like; protein id:
  misc_feature (100)..(484): Homolog of NCBI NO: 15239161 NR Description: putative protein; protein id: At5g65820.1
  misc_feature (1)..(512): Homolog of NCBI NO: 22326834 NR Description: putative protein
  misc_feature (1)..(512): Homolog of NCBI NO: 11357571 NR Description: hypothetical protein F1N13_120 - Arabidopsis
  misc_feature (1)..(507): Homolog of NCBI NO: 15232917 NR Description: unknown protein; protein id: At3g02490.1
  misc_feature (1)..(503): Homolog of NCBI NO: 15228363 NR Description: putative protein; protein id: At3g48250.1
  misc_feature (1)..(510): Homolog of NCBI NO: 34905990 NR Description: P0518C01.6 [Oryza sativa (japonica
MLRTLASTPAAARAHFWPFLRDMDAAGHSVDQGTYLAALASFKRASLATDYATLSARLAKSRDDHAAQAAAGGTPVTSLADAVRGLDLDQPGADEALEEKLEGVAEQLLPLTEAAVAGVLREARDVPAKALAFFRWAGRQNGYEHGSVAYNAMARVLGREESLREFWELIQEMKTGELHIDIDTYMKLSRQFQKRHMMTEAVELYELMMDGPYKPAQQDGPLLLRRIAMGPEPDLELVYRVVRKFEAVYEFKTKNVFDGIHRALTSNGRFDEAAEIVERMRAAGHQPDNITYSQLVFGLCKATKCDEARQVLDEMEAEGCTPDLKTWTMLIQGHCAAGEVDKALQYLTEMIEKDLEADADLLDVMVKGLCKQEKIDAAYTLFVEMVDTAKLNPWQGTYKHIIAELLRVKKLEEALGLLKSMKARKFPPFADPFPSNIAEYGTLEDARDFLKALKGSSNNYPQPPVYVQMFKAFFAEGRYSEAQDLLYKCPIHIRRHHDITELFEPKKVQATA

SEQ ID NO: 63343 - DNA, 1444 bp, Triticum aestivum
  misc_feature (1)..(1444): Ceres Seq. ID no. 12616181
accgcctcagaagttacgcaactgctctgctgcccaaaacctaaccatggcgcgagtccgcagcaatgggcggcgtgccggcggcagtggaggtggaggcggccgcggcggcaagggcaaaggaaaaggaaaaggcccgggcaagtggaagatgccgttgtcggtggcgcggaagcagcaggcggtgctggcgaacgtggaccaggtcaccggcgagaggatccccaagagcttcgtcttctcgcgcggcaagctcccctccacgcttcgtcacctacagcaggacctccgcaagctcatgctcccctacaccgccctcaagctcaaggagaagaagaggaacaacctcaaggacttcgtcaacgttgccagcccattgggtgttacgcatttcttgatcctctcgaacccaaagagcttgccgcacttgcgcttcgccaagtcaccgcagggcccaacctacacttgtcagattttagaatacgctcttgcggctgacatcgcaaactcccaaaagcggccaaggtgtcctgcagagatattcaaaaactcgcctctggtcgtgctcagtggtttcaatggcctgggcgagcctttcaagagttttgttaccttctttaggcatttggtccctgctattgacacagatactgttaagttatcaacctgtcaaagattattattgctacagtatgacaaagagacggaggctatcgatttccggcattactccatcaagctacagcctgttggggtcagccgcaagattagaaaactcatgcagaacaatcaagtgccagacctaagggatcttaaagatgttagtgattatgtgacaaaagctggatatggatcagaaagtgaaccagacgatgaagcagcgactgtaagtctagcaagtgatatagacaaattgaacagagcatcccgaaaaagtgccgtcagactccaagagatcggaccaagaatgaccatgcgcttagttaaggttgaatctgggctatgctcgggcgacatcttgtacccacaatctgttggaaaagaagatgtgaaggagggacaagaggaagaagagatagaagatgctgaggatatgatggagctggatgatgggacggaggaggacgactcggttgacgaagagtagcctagatgagctcgagaggtgctgagcagcagcctatgatgattgctaaaaatgtgaagcaactggtgtattgcgactaacattatgagtttagttgatccttgagaaagcatattctgagaaagcatatccttaacagaagtcactcttgaaaaagagagggataaatctcttgcagtgataatccttattttggtcgaatccgaatggtttttagccctgtaacatgatacatattctgtatttacctaagttttgccttaggagggtgcatataagcactagctgctgcgttcg

SEQ ID NO: 63344 - protein, 381 aa, Triticum aestivum
  peptide (1)..(381): Ceres Seq. ID no. 12616182
  misc_feature (75)..(351): Homolog of NCBI NO: 31209775 NR Description: ENSANGP00000012208 [Anopheles gambiae]
  misc_feature (58)..(349): Homolog of NCBI NO: 11877243 NR Description: SSF1/P2Y11 chimeric protein [Homo sapiens]
  misc_feature (58)..(349): Homolog of NCBI NO: 9910566 NR Description: peter pan homolog (Drosophila)
  misc_feature (57)..(374): Homolog of NCBI NO: 28277332 NR Description: Similar to peter pan homolog (Drosophila)
  misc_feature (46)..(381): Homolog of NCBI NO: 28422433 NR Description: Similar to peter pan homolog (Drosophila)
  misc_feature (57)..(381): Homolog of NCBI NO: 39794499 NR Description: Unknown (protein for MGC:76273) [Silurana
  misc_feature (58)..(349): Homolog of NCBI NO: 26332985 NR Description: unnamed protein product [Mus musculus]
  misc_feature (58)..(349): Homolog of NCBI NO: 21704228 NR Description: similar to peter pan homolog (Drosophila)
  misc_feature (55)..(381): Homolog of NCBI NO: 30697573 NR Description: Peter Pan - like protein [Arabidopsis thaliana]
  misc_feature (55)..(381): Homolog of NCBI NO: 30697571 NR Description: Peter Pan - like protein [Arabidopsis thaliana]
PPQKLRNCSAAQNLTMARVRSNGRRAGGSGGGGGRGGKGKGKGKGPGKWKMPLSVARKQQAVLANVDQVTGERIPKSFVFSRGKLPSTLRHLQQDLRKLMLPYTALKLKEKKRNNLKDFVNVASPLGVTHFLILSNPKSLPHLRFAKSPQGPTYTCQILEYALAADIANSQKRPRCPAEIFKNSPLVVLSGFNGLGEPFKSFVTFFRHLVPAIDTDTVKLSTCQRLLLLQYDKETEAIDFRHYSIKLQPVGVSRKIRKLMQNNQVPDLRDLKDVSDYVTKAGYGSESEPDDEAATVSLASDIDKLNRASRKSAVRLQEIGPRMTMRLVKVESGLCSGDILYPQSVGKEDVKEGQEEEEIEDAEDMMELDDGTEEDDSVDEE

SEQ ID NO: 63345 - protein, 366 aa, Triticum aestivum
  peptide (1)..(366): Ceres Seq. ID no. 12616183
  misc_feature (60)..(336): Homolog of NCBI NO: 31209775 NR Description: ENSANGP00000012208 [Anopheles gambiae]
  misc_feature (43)..(334): Homolog of NCBI NO: 11877243 NR Description: SSF1/P2Y11 chimeric protein [Homo sapiens]
  misc_feature (43)..(334): Homolog of NCBI NO: 9910566 NR Description: peter pan homolog (Drosophila)
  misc_feature (42)..(359): Homolog of NCBI NO: 28277332 NR Description: Similar to peter pan homolog (Drosophila)
  misc_feature (31)..(366): Homolog of NCBI NO: 28422433 NR Description: Similar to peter pan homolog (Drosophila)
  misc_feature (42)..(366): Homolog of NCBI NO: 39794499 NR Description: Unknown (protein for MGC:76273) [Silurana
  misc_feature (43)..(334): Homolog of NCBI NO: 26332985 NR Description: unnamed protein product [Mus musculus]
  misc_feature (43)..(334): Homolog of NCBI NO: 21704228 NR Description: similar to peter pan homolog (Drosophila)
  misc_feature (40)..(366): Homolog of NCBI NO: 30697573 NR Description: Peter Pan - like protein [Arabidopsis thaliana]
  misc_feature (40)..(366): Homolog of NCBI NO: 30697571 NR Description: Peter Pan - like protein [Arabidopsis thaliana]
MARVRSNGRRAGGSGGGGGRGGKGKGKGKGPGKWKMPLSVARKQQAVLANVDQVTGERIPKSFVFSRGKLPSTLRHLQQDLRKLMLPYTALKLKEKKRNNLKDFVNVASPLGVTHFLILSNPKSLPHLRFAKSPQGPTYTCQILEYALAADIANSQKRPRCPAEIFKNSPLVVLSGFNGLGEPFKSFVTFFRHLVPAIDTDTVKLSTCQRLLLLQYDKETEAIDFRHYSIKLQPVGVSRKIRKLMQNNQVPDLRDLKDVSDYVTKAGYGSESEPDDEAATVSLASDIDKLNRASRKSAVRLQEIGPRMTMRLVKVESGLCSGDILYPQSVGKEDVKEGQEEEEIEDAEDMMELDDGTEEDDSVDEE

SEQ ID NO: 63346 - protein, 331 aa, Triticum aestivum
  peptide (1)..(331): Ceres Seq. ID no. 12616184
  misc_feature (25)..(301): Homolog of NCBI NO: 31209775 NR Description: ENSANGP00000012208 [Anopheles gambiae]
  misc_feature (8)..(299): Homolog of NCBI NO: 11877243 NR Description: SSF1/P2Y11 chimeric protein [Homo sapiens]
  misc_feature (8)..(299): Homolog of NCBI NO: 9910566 NR Description: peter pan homolog (Drosophila)
  misc_feature (7)..(324): Homolog of NCBI NO: 28277332 NR Description: Similar to peter pan homolog (Drosophila)
  misc_feature (1)..(331): Homolog of NCBI NO: 28422433 NR Description: Similar to peter pan homolog (Drosophila)
  misc_feature (7)..(331): Homolog of NCBI NO: 39794499 NR Description: Unknown (protein for MGC:76273) [Silurana
  misc_feature (8)..(299): Homolog of NCBI NO: 26332985 NR Description: unnamed protein product [Mus musculus]
  misc_feature (8)..(299): Homolog of NCBI NO: 21704228 NR Description: similar to peter pan homolog (Drosophila)
  misc_feature (5)..(331): Homolog of NCBI NO: 30697573 NR Description: Peter Pan - like protein [Arabidopsis thaliana]
  misc_feature (5)..(331): Homolog of NCBI NO: 30697571 NR Description: Peter Pan - like protein [Arabidopsis thaliana]
MPLSVARKQQAVLANVDQVTGERIPKSFVFSRGKLPSTLRHLQQDLRKLMLPYTALKLKEKKRNNLKDFVNVASPLGVTHFLILSNPKSLPHLRFAKSPQGPTYTCQILEYALAADIANSQKRPRCPAEIFKNSPLVVLSGFNGLGEPFKSFVTFFRHLVPAIDTDTVKLSTCQRLLLLQYDKETEAIDFRHYSIKLQPVGVSRKIRKLMQNNQVPDLRDLKDVSDYVTKAGYGSESEPDDEAATVSLASDIDKLNRASRKSAVRLQEIGPRMTMRLVKVESGLCSGDILYPQSVGKEDVKEGQEEEEIEDAEDMMELDDGTEEDDSVDEE

SEQ ID NO: 63347 - DNA, 1742 bp, Triticum aestivum
  misc_feature (1)..(1742): Ceres Seq. ID no. 13655375
atccatatagaaatacctcgtctccctccccgcccctgattcgcaaggccaaagcaagaggggcaggagcgccaccgcgaatcccatcccatccccgcaccgccgccgatcccgcccgcccgcccctccgcagatctccccgacattgcccgctccccggccggattcgcccagatccaccgacgcggcgcgcggtgctcccggcggcgtggtccggtcggtctgatcgggaaggcttgatcttttttgttggtgctgttgtctggagggtggtggcagcggagatgggcgtcggaggggagaagttccagctggggacggtgggggcgctgggcctctccgtggtgtcctccgtgtccattgtcatctgcaacaaggccctcatgagctccctcggcttcaccttcgctaccaccttgacgagctggcatctcctggtcactttctgctcccttcatgtggcactatggatgaagttttttgagcacaaggcttttgattcgagaactgtcatgggattcggagtactcaatggcatctccattgggctcctcaatctgagtcttggtttcaattctgttggcttttaccagatgacaaagctggccatcatcccctgcactgttattttggagactcttttcttcaggaagaagttcagccggactatccagatctccctttccgtgcttcttttgggtgtcggtgttgcaaccatgactgatttgcaactcaatgctgtggggtccatactgtccttgctggccattatcacgacttgcatcgctcaaatcatgacaaacactattcagaagaaattcaaggtttcttcaacccagctgctatatcagtcttgtccttaccagtcattgacactgtttcttatcggcccgttccttgatggattcctgactaaccaaaacgtctttgctttcaattacacatctaacgttgtgtttttcatcgtcttgtcgtgtttgatatcggtctcagtaaacttcagcacctttcttgtgatcggaaagacatctcctgttacttaccaagtcctgggccatcttaaaacatgcctagttttgaccttcggctacgttttgcttcatgatccgtttagctggagaaacatacttggcatcctaattgcggttgttgggatggtactatattcatacttctgctcaacagagactcaaccaaaaaataccgatgtctccgcacagcagtcaaaagaaggtgactcggcacctttgatctctgattctttgagcaaagttgaaaatggaggtgatgacgatgagcctttgaaggtaccgatgtggagctcaaagtactcaagggcgtgagaattttgtctcttagacggcggatggcattatacaggattcaatttagtaggcagatagtagggttggaagccaactttccaacccaagtaatgaagcaatggacatttcagttacaattaaaatgatctgattctttggagggttttaccttccaaaattgcagatcgaccatgaaactagatagcagatattgtaaaattgtatctggatatggtccaaatcttctcactgtaacttcacgttgggacactggtctgcagatagactccattctttttgtaccaaaggtcccgaggtcaagaattgtgcaagactttaaagtatttataggttcaagtttgtaactgtactttcagatttaccttggaccatagtaatgcaagtgatgtacatttc

SEQ ID NO: 63348 - protein, 446 aa, Triticum aestivum
  peptide (1)..(446): Ceres Seq. ID no. 13655376
  misc_feature (107)..(397): Homolog of NCBI NO: 15238957 NR Description: transporter-related [Arabidopsis thaliana]
  misc_feature (99)..(176): Homolog of NCBI NO: 37535412 NR Description: putative
  misc_feature (198)..(434): Homolog of NCBI NO: 37535412 NR Description: putative
  misc_feature (198)..(441): Homolog of NCBI NO: 25406945 NR Description: hypothetical protein [imported] - Arabidopsis
  misc_feature (99)..(434): Homolog of NCBI NO: 13384378 NR Description: putative phosphate translocator
  misc_feature (100)..(417): Homolog of NCBI NO: 30683853 NR Description: transporter-related [Arabidopsis thaliana]
  misc_feature (100)..(441): Homolog of NCBI NO: 27311731 NR Description: putative integral membrane protein [Arabidopsis
  misc_feature (99)..(441): Homolog of NCBI NO: 22329373 NR Description: transporter-related [Arabidopsis thaliana]
  misc_feature (95)..(446): Homolog of NCBI NO: 34896140 NR Description: P0701D05.25 [Oryza sativa (japonica
  misc_feature (95)..(446): Homolog of NCBI NO: 13699188 NR Description: putative glucose-6-phosphate/phosphate-tranlocat
PYRNTSSPSPPLIRKAKARGAGAPPRIPSHPRTAADPARPPLRRSPRHCPLPGRIRPDPPTRRAVLPAAWSGRSDREGLIFFVGAVVWRVVAAEMGVGGEKFQLGTVGALGLSVVSSVSIVICNKALMSSLGFTFATTLTSWHLLVTFCSLHVALWMKFFEHKAFDSRTVMGFGVLNGISIGLLNLSLGFNSVGFYQMTKLAIIPCTVILETLFFRKKFSRTIQISLSVLLLGVGVATMTDLQLNAVGSILSLLAIITTCIAQIMTNTIQKKFKVSSTQLLYQSCPYQSLTLFLIGPFLDGFLTNQNVFAFNYTSNVVFFIVLSCLISVSVNFSTFLVIGKTSPVTYQVLGHLKTCLVLTFGYVLLHDPFSWRNILGILIAVVGMVLYSYFCSTETQPKNTDVSAQQSKEGDSAPLISDSLSKVENGGDDDEPLKVPMWSSKYSRA

SEQ ID NO: 63349 - protein, 352 aa, Triticum aestivum
  peptide (1)..(352): Ceres Seq. ID no. 13655377
  misc_feature (13)..(303): Homolog of NCBI NO: 15238957 NR Description: transporter-related [Arabidopsis thaliana]
  misc_feature (5)..(82): Homolog of NCBI NO: 37535412 NR Description: putative
  misc_feature (104)..(340): Homolog of NCBI NO: 37535412 NR Description: putative
  misc_feature (104)..(347): Homolog of NCBI NO: 25406945 NR Description: hypothetical protein [imported] - Arabidopsis
  misc_feature (5)..(340): Homolog of NCBI NO: 13384378 NR Description: putative phosphate translocator
  misc_feature (6)..(323): Homolog of NCBI NO: 30683853 NR Description: transporter-related [Arabidopsis thaliana]
  misc_feature (6)..(347): Homolog of NCBI NO: 27311731 NR Description: putative integral membrane protein [Arabidopsis
  misc_feature (5)..(347): Homolog of NCBI NO: 22329373 NR Description: transporter-related [Arabidopsis thaliana]
  misc_feature (1)..(352): Homolog of NCBI NO: 34896140 NR Description: P0701D05.25 [Oryza sativa (japonica
  misc_feature (1)..(352): Homolog of NCBI NO: 13699188 NR Description: putative glucose-6-phosphate/phosphate-tranlocat
MGVGGEKFQLGTVGALGLSVVSSVSIVICNKALMSSLGFTFATTLTSWHLLVTFCSLHVALWMKFFEHKAFDSRTVMGFGVLNGISIGLLNLSLGFNSVGFYQMTKLAIIPCTVILETLFFRKKFSRTIQISLSVLLLGVGVATMTDLQLNAVGSILSLLAIITTCIAQIMTNTIQKKFKVSSTQLLYQSCPYQSLTLFLIGPFLDGFLTNQNVFAFNYTSNVVFFIVLSCLISVSVNFSTFLVIGKTSPVTYQVLGHLKTCLVLTFGYVLLHDPFSWRNILGILIAVVGMVLYSYFCSTETQPKNTDVSAQQSKEGDSAPLISDSLSKVENGGDDDEPLKVPMWSSKYSRA

SEQ ID NO: 63350 - protein, 319 aa, Triticum aestivum
  peptide (1)..(319): Ceres Seq. ID no. 13655378
  misc_feature (1)..(270): Homolog of NCBI NO: 15238957 NR Description: transporter-related [Arabidopsis thaliana]
  misc_feature (1)..(49): Homolog of NCBI NO: 37535412 NR Description: putative
  misc_feature (71)..(307): Homolog of NCBI NO: 37535412 NR Description: putative
  misc_feature (71)..(314): Homolog of NCBI NO: 25406945 NR Description: hypothetical protein [imported] - Arabidopsis
  misc_feature (1)..(307): Homolog of NCBI NO: 13384378 NR Description: putative phosphate translocator
  misc_feature (1)..(290): Homolog of NCBI NO: 30683853 NR Description: transporter-related [Arabidopsis thaliana]
  misc_feature (1)..(314): Homolog of NCBI NO: 27311731 NR Description: putative integral membrane protein [Arabidopsis
  misc_feature (1)..(314): Homolog of NCBI NO: 22329373 NR Description: transporter-related [Arabidopsis thaliana]
  misc_feature (1)..(319): Homolog of NCBI NO: 34896140 NR Description: P0701D05.25 [Oryza sativa (japonica
  misc_feature (1)..(319): Homolog of NCBI NO: 13699188 NR Description: putative glucose-6-phosphate/phosphate-tranlocat
MSSLGFTFATTLTSWHLLVTFCSLHVALWMKFFEHKAFDSRTVMGFGVLNGISIGLLNLSLGFNSVGFYQMTKLAIIPCTVILETLFFRKKFSRTIQISLSVLLLGVGVATMTDLQLNAVGSILSLLAIITTCIAQIMTNTIQKKFKVSSTQLLYQSCPYQSLTLFLIGPFLDGFLTNQNVFAFNYTSNVVFFIVLSCLISVSVNFSTFLVIGKTSPVTYQVLGHLKTCLVLTFGYVLLHDPFSWRNILGILIAVVGMVLYSYFCSTETQPKNTDVSAQQSKEGDSAPLISDSLSKVENGGDDDEPLKVPMWSSKYSRA

SEQ ID NO: 63351 - DNA, 1087 bp, Triticum aestivum
  misc_feature (1)..(1087): Ceres Seq. ID no. 13597142
gtccacctcctccctcctgttccttcagccaccgtgagcaatggcgcccaagcggaagggtggcaacggccggaagaagaccgtcctcctctcgatcgtcaaggaggacgcccgccatgtatgcttctcaaagcgcaagcggggcctgttcagcaagaccagcgcgctgtccctgctcacgggcgcccaggtggccgccgtcatcttctcgcccggcggcaaggtcttctccttcggccacccctccgtcgacgccgtcgtcaaccgcttcatggcgggggacgccgcggtggtccaggccgccgccgacgacaacgggttgcagacgctgcagctgcagcacggcgacatgcgcaccgagctggcggaccagaagaagcggaagaagcgcgctgaggaggccctggacaaggagcgcgctgggggggaccagattgcctcgtggctccaccccgacgtgcgcgacatggggcatgacgacatggcggccttcgccgccgcgctcttgcaggtccaggccgccgtctccggacgcgccaaccaggttctcgtcgaggcctttcgcgtcgacatcagccgtatgctccaggtgcccccgccgccgccgcctccgctccagctcttcggtgccagcaccattgagttcggtagtagcagcagcagcgccaacgccgggatggagatgcaacagatgcagatggttatggagatgccaccgccgcctgacttccccgcagtgatggggatgcagcagttggttatggagatgccaccacagccaaggttcgaggcagcgatggagatgacgccgctgcaggagttcgtcgccgggatgcagaaggtgcagcggcaggggctcgggccgaacgccgacttcccctactgaggagaagaaagacaccagacagagtccgaccgagtccgagtctcagttactatattctaaataaatcgttcagatccatgtaagatccatctacgtaggtccaagatctatgcattagttggttcaattatcttagtagcaattaaatttatggcattgtaatcttttttgtatcggtagtacaatggctggaaattcgtg

SEQ ID NO: 63352 - protein, 281 aa, Triticum aestivum
  peptide (1)..(281): Ceres Seq. ID no. 13597143
  misc_feature (19)..(67): Pfam Name: SRF-type transcription factor (DNA-binding and Pfam Description: SRF-type transcription factor (DNA-binding and
  misc_feature (10)..(142): Homolog of NCBI NO: 15230767 NR Description: MADS-box protein [Arabidopsis thaliana]
  misc_feature (1)..(142): Homolog of NCBI NO: 15218684 NR Description: MADS-box protein [Arabidopsis thaliana]
  misc_feature (10)..(127): Homolog of NCBI NO: 15218647 NR Description: MADS-box protein [Arabidopsis thaliana]
  misc_feature (10)..(180): Homolog of NCBI NO: 15226309 NR Description: MADS-box protein [Arabidopsis thaliana]
  misc_feature (6)..(168): Homolog of NCBI NO: 32402436 NR Description: MADS-box protein AGL62 [Arabidopsis thaliana]
  misc_feature (6)..(168): Homolog of NCBI NO: 15239333 NR Description: MADS-box protein [Arabidopsis thaliana]
  misc_feature (4)..(186): Homolog of NCBI NO: 25412255 NR Description: probable MADS-box protein [imported] -
  misc_feature (1)..(186): Homolog of NCBI NO: 30682571 NR Description: MADS-box protein [Arabidopsis thaliana]
  misc_feature (10)..(159): Homolog of NCBI NO: 15234456 NR Description: MADS-box protein [Arabidopsis thaliana]
  misc_feature (2)..(176): Homolog of NCBI NO: 34906076 NR Description: P0459B04.16 [Oryza sativa (japonica
MAPKRKGGNGRKKTVLLSIVKEDARHVCFSKRKRGLFSKTSALSLLTGAQVAAVIFSPGGKVFSFGHPSVDAVVNRFMAGDAAVVQAAADDNGLQTLQLQHGDMRTELADQKKRKKRAEEALDKERAGGDQIASWLHPDVRDMGHDDMAAFAAALLQVQAAVSGRANQVLVEAFRVDISRMLQVPPPPPPPLQLFGASTIEFGSSSSSANAGMEMQQMQMVMEMPPPPDFPAVMGMQQLVMEMPPQPRFEAAMEMTPLQEFVAGMQKVQRQGLGPNADFPY

SEQ ID NO: 63353 - protein, 245 aa, Triticum aestivum
  peptide (1)..(245): Ceres Seq. ID no. 13597144
  misc_feature (4)..(221): Homolog of NCBI NO: 13592175 NR Description: ppg3 [Leishmania major]
  misc_feature (70)..(202): Homolog of NCBI NO: 7248459 NR Description: arabinogalactan protein [Zea mays]
  misc_feature (3)..(221): Homolog of NCBI NO: 13592175 NR Description: ppg3 [Leishmania major]
  misc_feature (4)..(221): Homolog of NCBI NO: 13592175 NR Description: ppg3 [Leishmania major]
  misc_feature (4)..(221): Homolog of NCBI NO: 13592175 NR Description: ppg3 [Leishmania major]
  misc_feature (4)..(221): Homolog of NCBI NO: 13592175 NR Description: ppg3 [Leishmania major]
  misc_feature (4)..(221): Homolog of NCBI NO: 13592175 NR Description: ppg3 [Leishmania major]
  misc_feature (4)..(221): Homolog of NCBI NO: 13592175 NR Description: ppg3 [Leishmania major]
  misc_feature (4)..(221): Homolog of NCBI NO: 13592175 NR Description: ppg3 [Leishmania major]
  misc_feature (4)..(223): Homolog of NCBI NO: 11359723 NR Description: proteophosphoglycan, membrane-associated
PPPPSCSFSHREQWRPSGRVATAGRRPSSSRSSRRTPAMYASQSASGACSARPARCPCSRAPRWPPSSSRPAARSSPSATPPSTPSSTASWRGTPRWSRPPPTTTGCRRCSCSTATCAPSWRTRRSGRSALRRPWTRSALGGTRLPRGSTPTCATWGMTTWRPSPPRSCRSRPPSPDAPTRFSSRPFASTSAVCSRCPRRRRLRSSSSVPAPLSSVVAAAAPTPGWRCNRCRWLWRCHRRLTSPQ

SEQ ID NO: 63354 - protein, 207 aa, Triticum aestivum
  peptide (1)..(207): Ceres Seq. ID no. 13597145
  misc_feature (1)..(183): Homolog of NCBI NO: 13592175 NR Description: ppg3 [Leishmania major]
  misc_feature (32)..(164): Homolog of NCBI NO: 7248459 NR Description: arabinogalactan protein [Zea mays]
  misc_feature (1)..(183): Homolog of NCBI NO: 13592175 NR Description: ppg3 [Leishmania major]
  misc_feature (1)..(183): Homolog of NCBI NO: 13592175 NR Description: ppg3 [Leishmania major]
  misc_feature (1)..(183): Homolog of NCBI NO: 13592175 NR Description: ppg3 [Leishmania major]
  misc_feature (1)..(183): Homolog of NCBI NO: 13592175 NR Description: ppg3 [Leishmania major]
  misc_feature (1)..(183): Homolog of NCBI NO: 13592175 NR Description: ppg3 [Leishmania major]
  misc_feature (1)..(183): Homolog of NCBI NO: 13592175 NR Description: ppg3 [Leishmania major]
  misc_feature (1)..(183): Homolog of NCBI NO: 13592175 NR Description: ppg3 [Leishmania major]
  misc_feature (1)..(185): Homolog of NCBI NO: 11359723 NR Description: proteophosphoglycan, membrane-associated
MYASQSASGACSARPARCPCSRAPRWPPSSSRPAARSSPSATPPSTPSSTASWRGTPRWSRPPPTTTGCRRCSCSTATCAPSWRTRRSGRSALRRPWTRSALGGTRLPRGSTPTCATWGMTTWRPSPPRSCRSRPPSPDAPTRFSSRPFASTSAVCSRCPRRRRLRSSSSVPAPLSSVVAAAAPTPGWRCNRCRWLWRCHRRLTSPQ

SEQ ID NO: 63355 - DNA, 1356 bp, Triticum aestivum
  misc_feature (1)..(1356): Ceres Seq. ID no. 14301482
tttttctccccccaccttccgcgtcccccctctccacctagcaagctccggccgtccgcccgcgcccgtcccgtccgtccacgagcgagccggccgggcgccgccgccgacgccgatgaagaagccgggcaagctcgcgctgccctcccaggactccaccatcggcaagttcctgacgcagagcgggaccttcaaggacggcgacctgctcgtcaacaaggacggcctccgcatcgtcccgcagagcgaggaaggcgaggctcctcctatcaagcctttggataataatcatcagttgagcatagacgatctagattcaatcaaagtgatcgggaaaggtaatagcgggaccgtgcaattggtgcgccacaaatggactggccagttttttgctctcaaggttatacagctcaatattcaggagagcatacgcaagcagatggcccaggagttgaaaataagcttgtttacacagtgccagtatgttgtcacgtgctatcagtgtttctatgtcaatggtgttatttctattgctttggagtacatggatggtggctctctcgctgatttcctcaaggctgttagaaccgttccagaggcctacctggctgcaatttgtaagcaggtgttgaaaggactgatgtacttgcatcatgagaagcgcgttatacaccgagatctgaaaccatcgaatatattgataaatcataggggtgaagtaaagatatcagattttggtgttagtgccatcatttctagttcttctgcacagcgagatacatttactggcacatttaactacatggcgcctgaaagaatcagtgggcagaaacatggtcatctgagtgatatctggagcttgggcctagttatgctggaatgtgccactggcaatttcccatatcctcctcgtgaaagcttttatgaacttcttgaagctgttgtcgaccaaccatcaccttctgcaccatcagaccagttttcaccagagttctgttcattcatttctgcttgtatccaaaaaaatgctgcagataggtcatctgcccaaaccctatcagctcatccattcctgagcatgtacgacgacctgaatatcgatctgtctgactacttcacgactgcaggatcaccgcttgccaccttcaagcaaatcgcgttgtgagacgacaaatgctcaaccatgtgtcatgagctggagctaactgaagcaagtgaatggagttatttttcttttcctgttattcatgaactgggctttgatgatatctttgaaccaaatatgatacaattggcttcataattatacaaatacaagtctgtaaagcatcagcgagcatcgaagttttgcctgtc

SEQ ID NO: 63356 - protein, 387 aa, Triticum aestivum
  peptide (1)..(387): Ceres Seq. ID no. 14301483
  misc_feature (104)..(358): Pfam Name: Protein kinase domain Pfam Description: Protein kinase domain
  misc_feature (38)..(379): Homolog of NCBI NO: 12718822 NR Description: NQK1 MAPKK [Nicotiana tabacum]
  misc_feature (42)..(380): Homolog of NCBI NO: 15236108 NR Description: mitogen-activated protein kinase kinase
  misc_feature (39)..(386): Homolog of NCBI NO: 11259772 NR Description: mitogen-activated protein kinase kinase (EC
  misc_feature (39)..(386): Homolog of NCBI NO: 15233715 NR Description: mitogen-activated protein kinase kinase
  misc_feature (44)..(385): Homolog of NCBI NO: 7682432 NR Description: MAP kinase kinase [Nicotiana tabacum]
  misc_feature (44)..(381): Homolog of NCBI NO: 15528441 NR Description: MAP kinase kinase [Medicago sativa subsp. x varia]
  misc_feature (44)..(385): Homolog of NCBI NO: 7434316 NR Description: protein kinase MEK1 - tomato
  misc_feature (44)..(385): Homolog of NCBI NO: 9843771 NR Description: MAP kinase kinase [Lycopersicon esculentum]
  misc_feature (91)..(387): Homolog of NCBI NO: 22797196 NR Description: putative mitogen-activated protein kinase kinase
  misc_feature (44)..(382): Homolog of NCBI NO: 37625027 NR Description: putative mitogen-activated protein kinase kinase
FSPPTFRVPPLHLASSGRPPAPVPSVHERAGRAPPPTPMKKPGKLALPSQDSTIGKFLTQSGTFKDGDLLVNKDGLRIVPQSEEGEAPPIKPLDNNHQLSIDDLDSIKVIGKGNSGTVQLVRHKWTGQFFALKVIQLNIQESIRKQMAQELKISLFTQCQYVVTCYQCFYVNGVISIALEYMDGGSLADFLKAVRTVPEAYLAAICKQVLKGLMYLHHEKRVIHRDLKPSNILINHRGEVKISDFGVSAIISSSSAQRDTFTGTFNYMAPERISGQKHGHLSDIWSLGLVMLECATGNFPYPPRESFYELLEAVVDQPSPSAPSDQFSPEFCSFISACIQKNAADRSSAQTLSAHPFLSMYDDLNIDLSDYFTTAGSPLATFKQIAL

SEQ ID NO: 63357 - protein, 349 aa, Triticum aestivum
  peptide (1)..(349): Ceres Seq. ID no. 14301484
  misc_feature (66)..(320): Pfam Name: Protein kinase domain Pfam Description: Protein kinase domain
  misc_feature (1)..(341): Homolog of NCBI NO: 12718822 NR Description: NQK1 MAPKK [Nicotiana tabacum]
  misc_feature (4)..(342): Homolog of NCBI NO: 15236108 NR Description: mitogen-activated protein kinase kinase
  misc_feature (1)..(348): Homolog of NCBI NO: 11259772 NR Description: mitogen-activated protein kinase kinase (EC
  misc_feature (1)..(348): Homolog of NCBI NO: 15233715 NR Description: mitogen-activated protein kinase kinase
  misc_feature (6)..(347): Homolog of NCBI NO: 7682432 NR Description: MAP kinase kinase [Nicotiana tabacum]
  misc_feature (6)..(343): Homolog of NCBI NO: 15528441 NR Description: MAP kinase kinase [Medicago sativa subsp. x varia]
  misc_feature (6)..(347): Homolog of NCBI NO: 7434316 NR Description: protein kinase MEK1 - tomato
  misc_feature (6)..(347): Homolog of NCBI NO: 9843771 NR Description: MAP kinase kinase [Lycopersicon esculentum]
  misc_feature (53)..(349): Homolog of NCBI NO: 22797196 NR Description: putative mitogen-activated protein kinase kinase
  misc_feature (6)..(344): Homolog of NCBI NO: 37625027 NR Description: putative mitogen-activated protein kinase kinase
MKKPGKLALPSQDSTIGKFLTQSGTFKDGDLLVNKDGLRIVPQSEEGEAPPIKPLDNNHQLSIDDLDSIKVIGKGNSGTVQLVRHKWTGQFFALKVIQLNIQESIRKQMAQELKISLFTQCQYVVTCYQCFYVNGVISIALEYMDGGSLADFLKAVRTVPEAYLAAICKQVLKGLMYLHHEKRVIHRDLKPSNILINHRGEVKISDFGVSAIISSSSAQRDTFTGTFNYMAPERISGQKHGHLSDIWSLGLVMLECATGNFPYPPRESFYELLEAVVDQPSPSAPSDQFSPEFCSFISACIQKNAADRSSAQTLSAHPFLSMYDDLNIDLSDYFTTAGSPLATFKQIAL

SEQ ID NO: 63358 - protein, 241 aa, Triticum aestivum
  peptide (1)..(241): Ceres Seq. ID no. 14301485
  misc_feature (1)..(212): Pfam Name: Protein kinase domain Pfam Description: Protein kinase domain
  misc_feature (1)..(233): Homolog of NCBI NO: 12718822 NR Description: NQK1 MAPKK [Nicotiana tabacum]
  misc_feature (1)..(234): Homolog of NCBI NO: 15236108 NR Description: mitogen-activated protein kinase kinase
  misc_feature (1)..(240): Homolog of NCBI NO: 11259772 NR Description: mitogen-activated protein kinase kinase (EC
  misc_feature (1)..(240): Homolog of NCBI NO: 15233715 NR Description: mitogen-activated protein kinase kinase
  misc_feature (1)..(239): Homolog of NCBI NO: 7682432 NR Description: MAP kinase kinase [Nicotiana tabacum]
  misc_feature (1)..(235): Homolog of NCBI NO: 15528441 NR Description: MAP kinase kinase [Medicago sativa subsp. x varia]
  misc_feature (1)..(239): Homolog of NCBI NO: 7434316 NR Description: protein kinase MEK1 - tomato
  misc_feature (1)..(239): Homolog of NCBI NO: 9843771 NR Description: MAP kinase kinase [Lycopersicon esculentum]
  misc_feature (1)..(241): Homolog of NCBI NO: 22797196 NR Description: putative mitogen-activated protein kinase kinase
  misc_feature (1)..(236): Homolog of NCBI NO: 37625027 NR Description: putative mitogen-activated protein kinase kinase
MAQELKISLFTQCQYVVTCYQCFYVNGVISIALEYMDGGSLADFLKAVRTVPEAYLAAICKQVLKGLMYLHHEKRVIHRDLKPSNILINHRGEVKISDFGVSAIISSSSAQRDTFTGTFNYMAPERISGQKHGHLSDIWSLGLVMLECATGNFPYPPRESFYELLEAVVDQPSPSAPSDQFSPEFCSFISACIQKNAADRSSAQTLSAHPFLSMYDDLNIDLSDYFTTAGSPLATFKQIAL

SEQ ID NO: 63359 - DNA, 1359 bp, Triticum aestivum
  misc_feature (1)..(1359): Ceres Seq. ID no. 13655381
aattttatcgattatcaggccggcactccgcccacaaatgctcgcctccatctcccgatctctcgctcgccgcctcccgcgccttccgcttgccaccgccgccgccacaacagccatgtcgtcgtccgacaccgccgggagcgtcgccgaccgtccgatctctcctgataccacacgcatcgggtgggtggggacgggcgtcatgggccagtccatggccggccacctcctcgccgccggctacgcgctcaccgtatacaaccgcacgccctccaaggcccagggcctcgtctctagcggcgcccgcctcgtggacagcccgcgcgccgccgcggccgtcgctgacgtcatcttcctcatggtcggcttcccctccgacgtccgctccacgtccctcgacccctccacgggcgctctcgccggcctcgccccaggcggcgtcctcgtcgacatgaccacctccgaccccaccctcgcggccgagatagctgcggccgcggcgggggccggctgcgccgcagtcgacgcccccgtgtcaggcggcgaccggggcgcccgcaacgcctgcctctcgatcttcgccggcggtgacgcggccgtggtggcccgcctggcgcccctcttcaagctgatgggcaacgccctctacatgggcgggccgggcgcggggcagcgcgcgaagctgggcaaccagatcgccatcgcgtccaccatggtgggactggtggagggcatggtgtacgcgcacaaggccgggctggacgtgggcaagtggctggaggccatctccacgggcgccgcggggtccaagtcgctggacctgtacgggaagcggatgctggagcgcgacatggcggccgggttctacgtccggcacttcgtcaaggacctcgggatctgcctgtccgagtgccagaccatggggctggcgctgccggggctcgcgctcgcgcaccagcthtacgtgtcgctgcttgcccacggcgagggcgggctcggcacgcaggcgctgatactggcagtcgagcggctcaacaacacctgccttgacaagaaaggggagtgaaactgtgaaagcctacgagagcttggttgatgcaatgcaacacgagagaattgtctcctgctgtgttcccttgtggatatgggacttctgcatgctctgtctgttcatgctttacagtgctctaaggttcaaataagattgcaaaaatggagtttttcacttgtattgataatattcaactactcctatagtcctatttggcaaatcagtctgtagtgattgtcgatcaacttggcagtgaaactagaatattgaatgtagctcaccctgtgttaacgggttatatttgccgc

SEQ ID NO: 63360 - protein, 354 aa, Triticum aestivum
  peptide (1)..(354): Ceres Seq. ID no. 15219737
  misc_feature (57)..(220): Pfam Name: NAD binding domain of 6-phosphogluconate dehydrogenase Pfam Description: NAD binding domain of 6-phosphogluconate
  misc_feature (53)..(337): Homolog of NCBI NO: 23113025 NR Description: hypothetical protein [Desulfitobacterium
  misc_feature (58)..(338): Homolog of NCBI NO: 15674197 NR Description: 3-hydroxyisobutyrate dehydrogenase
  misc_feature (59)..(338): Homolog of NCBI NO: 16800073 NR Description: similar to 3-hydroxyisobutyrate dehydrogenase (B.
  misc_feature (59)..(338): Homolog of NCBI NO: 16803045 NR Description: similar to 3-hydroxyisobutyrate dehydrogenase (B.
  misc_feature (53)..(345): Homolog of NCBI NO: 30698779 NR Description: dehydrogenase -related [Arabidopsis thaliana]
  misc_feature (53)..(345): Homolog of NCBI NO: 25283629 NR Description: probable dehydrogenase F23N20.17
  misc_feature (53)..(345): Homolog of NCBI NO: 18409781 NR Description: dehydrogenase -related [Arabidopsis thaliana]
  misc_feature (59)..(345): Homolog of NCBI NO: 32472744 NR Description: 3-hydroxyisobutyrate dehydrogenase [Pirellula
  misc_feature (25)..(346): Homolog of NCBI NO: 15233455 NR Description: expressed protein [Arabidopsis thaliana]
  misc_feature (39)..(354): Homolog of NCBI NO: 34909392 NR Description: putative dehydrogenase [Oryza sativa (japonica
  misc_feature (320)..(320): Xaa is any aa, unknown or other
ILSIIRPALRPQMLASISRSLARRLPRLPLATAAATTAMSSSDTAGSVADRPISPDTTRIGWVGTGVMGQSMAGHLLAAGYALTVYNRTPSKAQGLVSSGARLVDSPRAAAAVADVIFLMVGFPSDVRSTSLDPSTGALAGLAPGGVLVDMTTSDPTLAAEIAAAAAGAGCAAVDAPVSGGDRGARNACLSIFAGGDAAVVARLAPLFKLMGNALYMGGPGAGQRAKLGNQIAIASTMVGLVEGMVYAHKAGLDVGKWLEAISTGAAGSKSLDLYGKRMLERDMAAGFYVRHFVKDLGICLSECQTMGLALPGLALAHQXYVSLLAHGEGGLGTQALILAVERLNNTCLDKKGE

SEQ ID NO: 63361 - protein, 342 aa, Triticum aestivum
  peptide (1)..(342): Ceres Seq. ID no. 15219738
  misc_feature (45)..(208): Pfam Name: NAD binding domain of 6-phosphogluconate dehydrogenase Pfam Description: NAD binding domain of 6-phosphogluconate
  misc_feature (41)..(325): Homolog of NCBI NO: 23113025 NR Description: hypothetical protein [Desulfitobacterium
  misc_feature (46)..(326): Homolog of NCBI NO: 15674197 NR Description: 3-hydroxyisobutyrate dehydrogenase
  misc_feature (47)..(326): Homolog of NCBI NO: 16800073 NR Description: similar to 3-hydroxyisobutyrate dehydrogenase (B.
  misc_feature (47)..(326): Homolog of NCBI NO: 16803045 NR Description: similar to 3-hydroxyisobutyrate dehydrogenase (B.
  misc_feature (41)..(333): Homolog of NCBI NO: 30698779 NR Description: dehydrogenase -related [Arabidopsis thaliana]
  misc_feature (41)..(333): Homolog of NCBI NO: 25283629 NR Description: probable dehydrogenase F23N20.17
  misc_feature (41)..(333): Homolog of NCBI NO: 18409781 NR Description: dehydrogenase -related [Arabidopsis thaliana]
  misc_feature (47)..(333): Homolog of NCBI NO: 32472744 NR Description: 3-hydroxyisobutyrate dehydrogenase [Pirellula
  misc_feature (13)..(334): Homolog of NCBI NO: 15233455 NR Description: expressed protein [Arabidopsis thaliana]
  misc_feature (27)..(342): Homolog of NCBI NO: 34909392 NR Description: putative dehydrogenase [Oryza sativa (japonica
  misc_feature (308)..(308): Xaa is any aa, unknown or other
MLASISRSLARRLPRLPLATAAATTAMSSSDTAGSVADRPISPDTTRIGWVGTGVMGQSMAGHLLAAGYALTVYNRTPSKAQGLVSSGARLVDSPRAAAAVADVIFLMVGFPSDVRSTSLDPSTGALAGLAPGGVLVDMTTSDPTLAAEIAAAAAGAGCAAVDAPVSGGDRGARNACLSIFAGGDAAVVARLAPLFKLMGNALYMGGPGAGQRAKLGNQIAIASTMVGLVEGMVYAHKAGLDVGKWLEAISTGAAGSKSLDLYGKRMLERDMAAGFYVRHFVKDLGICLSECQTMGLALPGLALAHQXYVSLLAHGEGGLGTQALILAVERLNNTCLDKKGE

SEQ ID NO: 63362 - protein, 316 aa, Triticum aestivum
  peptide (1)..(316): Ceres Seq. ID no. 15219739
  misc_feature (19)..(182): Pfam Name: NAD binding domain of 6-phosphogluconate dehydrogenase Pfam Description: NAD binding domain of 6-phosphogluconate
  misc_feature (15)..(299): Homolog of NCBI NO: 23113025 NR Description: hypothetical protein [Desulfitobacterium
  misc_feature (20)..(300): Homolog of NCBI NO: 15674197 NR Description: 3-hydroxyisobutyrate dehydrogenase
  misc_feature (21)..(300): Homolog of NCBI NO: 16800073 NR Description: similar to 3-hydroxyisobutyrate dehydrogenase (B.
  misc_feature (21)..(300): Homolog of NCBI NO: 16803045 NR Description: similar to 3-hydroxyisobutyrate dehydrogenase (B.
  misc_feature (15)..(307): Homolog of NCBI NO: 30698779 NR Description: dehydrogenase -related [Arabidopsis thaliana]
  misc_feature (15)..(307): Homolog of NCBI NO: 25283629 NR Description: probable dehydrogenase F23N20.17
  misc_feature (15)..(307): Homolog of NCBI NO: 18409781 NR Description: dehydrogenase -related [Arabidopsis thaliana]
  misc_feature (21)..(307): Homolog of NCBI NO: 32472744 NR Description: 3-hydroxyisobutyrate dehydrogenase [Pirellula
  misc_feature (1)..(308): Homolog of NCBI NO: 15233455 NR Description: expressed protein [Arabidopsis thaliana]
  misc_feature (1)..(316): Homolog of NCBI NO: 34909392 NR Description: putative dehydrogenase [Oryza sativa (japonica
  misc_feature (282)..(282): Xaa is any aa, unknown or other
MSSSDTAGSVADRPISPDTTRIGWVGTGVMGQSMAGHLLAAGYALTVYNRTPSKAQGLVSSGARLVDSPRAAAAVADVIFLMVGFPSDVRSTSLDPSTGALAGLAPGGVLVDMTTSDPTLAAEIAAAAAGAGCAAVDAPVSGGDRGARNACLSIFAGGDAAVVARLAPLFKLMGNALYMGGPGAGQRAKLGNQIAIASTMVGLVEGMVYAHKAGLDVGKWLEAISTGAAGSKSLDLYGKRMLERDMAAGFYVRHFVKDLGICLSECQTMGLALPGLALAHQXYVSLLAHGEGGLGTQALILAVERLNNTCLDKKGE

SEQ ID NO: 63363 - DNA, 1273 bp, Triticum aestivum
  misc_feature (1)..(1273): Ceres Seq. ID no. 13596965
gtgttcttctcttcgaatcgagatcacgaccgcgagtggacagagaggcgacgcgaatcccccgaacctcatatttgccacccgccctcttccaaagatggctgcttcggcggccttcgcggcggtggcggtcatgatgctggtggcagcgcacttggccgttgcggcggcagctccggtgacggccccggcgttcctctgggcgcctgagaactatggttcccacgagactaaaggagtagtccactatcagacaatgccaccggcaagtctagcaaaatctgttcttgatgaaggtggctggtcaaacttggtgtgttcaagggagggctcttataagaatgttgacattgcagttgtttttcttggctcgaagctacaatcgtcagacatctctagagataagcaagctgatccatctttggctgacacactaaagctctccttcacaggctcagagttttccatggcattcccttatgttgctttgacagataatgacaaattggagagctcattgctatctggacttgctgagaattgtgacaatgattttcgcggaaaccacatcacatacacagacacgtgtactgtaagtggtgaagatctgaagaaacatcaaagcatggattctattcgcgacttagtgatgtcacggaagagaagcaatccaaggggaaagactgatctaattgtcttctgtaatggcggtttcaaggatttagataatgcaaaatcagaaggggagttgctttccgagctggtttctgtgctgaaaatgtctgaggccagatatacagttctttatgcttcccaaccctatggtttactggagaacccttccaacctaccattagccaggtatcttgcagagaagaccaacactactactaaatctggcctaggcaaatgtgatggggagtgcctagtaaaatcaagtcttctggaaggaacttttgttggactagtgctgctgatcattttgatatcaggactctgctgtatgatgggaatcgataccccctcgaggtttgaggctccccaggattaggtaggagagtacaaatcccattgaagcctgccagatatgaaagctcaaggcaggcgtgagaaatacaaatagtcaatttgcactgtggatataagttgcctcatatatgttaccaagacacgtgaccgattttttgtataatattattacatctcggacgtacgaccgaccagaaagatgtagctgagctcaaaacatattcttatgccaggcttgtgttat

SEQ ID NO: 63364 - protein, 349 aa, Triticum aestivum
  peptide (1)..(349): Ceres Seq. ID no. 13596966
  misc_feature (86)..(146): Homolog of NCBI NO: 25405838 NR Description: hypothetical protein T5A14.4 [imported] -
  misc_feature (149)..(349): Homolog of NCBI NO: 21618303 NR Description: unknown [Arabidopsis thaliana]
  misc_feature (41)..(349): Homolog of NCBI NO: 24417230 NR Description: unknown [Arabidopsis thaliana]
  misc_feature (41)..(349): Homolog of NCBI NO: 30682651 NR Description: expressed protein [Arabidopsis thaliana]
CSSLRIEITTASGQRGDANPPNLIFATRPLPKMAASAAFAAVAVMMLVAAHLAVAAAAPVTAPAFLWAPENYGSHETKGVVHYQTMPPASLAKSVLDEGGWSNLVCSREGSYKNVDIAVVFLGSKLQSSDISRDKQADPSLADTLKLSFTGSEFSMAFPYVALTDNDKLESSLLSGLAENCDNDFRGNHITYTDTCTVSGEDLKKHQSMDSIRDLVMSRKRSNPRGKTDLIVFCNGGFKDLDNAKSEGELLSELVSVLKMSEARYTVLYASQPYGLLENPSNLPLARYLAEKTNTTTKSGLGKCDGECLVKSSLLEGTFVGLVLLIILISGLCCMMGIDTPSRFEAPQD

SEQ ID NO: 63365 - protein, 317 aa, Triticum aestivum
  peptide (1)..(317): Ceres Seq. ID no. 13596967
  misc_feature (54)..(114): Homolog of NCBI NO: 25405838 NR Description: hypothetical protein T5A14.4 [imported] -
  misc_feature (117)..(317): Homolog of NCBI NO: 21618303 NR Description: unknown [Arabidopsis thaliana]
  misc_feature (9)..(317): Homolog of NCBI NO: 24417230 NR Description: unknown [Arabidopsis thaliana]
  misc_feature (9)..(317): Homolog of NCBI NO: 30682651 NR Description: expressed protein [Arabidopsis thaliana]
MAASAAFAAVAVMMLVAAHLAVAAAAPVTAPAFLWAPENYGSHETKGVVHYQTMPPASLAKSVLDEGGWSNLVCSREGSYKNVDIAVVFLGSKLQSSDISRDKQADPSLADTLKLSFTGSEFSMAFPYVALTDNDKLESSLLSGLAENCDNDFRGNHITYTDTCTVSGEDLKKHQSMDSIRDLVMSRKRSNPRGKTDLIVFCNGGFKDLDNAKSEGELLSELVSVLKMSEARYTVLYASQPYGLLENPSNLPLARYLAEKTNTTTKSGLGKCDGECLVKSSLLEGTFVGLVLLIILISGLCCMMGIDTPSRFEAPQD

SEQ ID NO: 63366 - protein, 305 aa, Triticum aestivum
  peptide (1)..(305): Ceres Seq. ID no. 13596968
  misc_feature (42)..(102): Homolog of NCBI NO: 25405838 NR Description: hypothetical protein T5A14.4 [imported] -
  misc_feature (105)..(305): Homolog of NCBI NO: 21618303 NR Description: unknown [Arabidopsis thaliana]
  misc_feature (1)..(305): Homolog of NCBI NO: 24417230 NR Description: unknown [Arabidopsis thaliana]
  misc_feature (1)..(305): Homolog of NCBI NO: 30682651 NR Description: expressed protein [Arabidopsis thaliana]
MMLVAAHLAVAAAAPVTAPAFLWAPENYGSHETKGVVHYQTMPPASLAKSVLDEGGWSNLVCSREGSYKNVDIAVVFLGSKLQSSDISRDKQADPSLADTLKLSFTGSEFSMAFPYVALTDNDKLESSLLSGLAENCDNDFRGNHITYTDTCTVSGEDLKKHQSMDSIRDLVMSRKRSNPRGKTDLIVFCNGGFKDLDNAKSEGELLSELVSVLKMSEARYTVLYASQPYGLLENPSNLPLARYLAEKTNTTTKSGLGKCDGECLVKSSLLEGTFVGLVLLIILISGLCCMMGIDTPSRFEAPQD

SEQ ID NO: 63367 - DNA, 978 bp, Triticum aestivum
  misc_feature (1)..(978): Ceres Seq. ID no. 12616101
aacacatctttgacatccccacgaccgcactcgagtagcagccgcagacagatctttctcgacacccaccggcggctaagcggatatggcggcctcaccggcaacatcgtccgcggccgcgagggcctccaccttcgcacggctatccaacgcgcccctgcgtgcgcccagagccgccgccgtctcgttcccgtctcccaactccgctcgtccggccgcgctggtcgcggatgctcgggcttcccggctccccgtcgtggccgcagccgccggagggcaccagcggctgatggggtcgctgaccaacaccgaggggctcaggttcggcgtggttgtggcacggttcaatgagatagtgaccaacttgcttctgcagggggctttagaggcattcgagcgatactctgtcaaagcagaaaatatcaccgttgttagtgttcctggcagctttgaaattcctgttgcagcacagaagcttgggaagtctggaaagtatgatgcaattttgtgcattggggctgtgattagaggtgacacaacccactatgatgctgttgcaaactctgctgcttcaggtgtactcaatgctggattgtctgctggcgtcccctgcgtatttggtgttctgacctgtgatgacatggaccaggcgctaaatcgtgctggtggcaaggctggaaacaaaggtgctgagaccgccataactgctattgagatggcctcgctgtttcggcatcacttagcctgatgacaccgaatgctatggtcggcgagccagcaagattttctcccctgttcgcggctatcggagtttttcccccacatttgttttaaaatttcttttttcttgctgcaggctagtgtttgacatgtcgtttctaaattattttggtctgtacgtatgtactctgattgcctgttcgcctttgcccgcaagaaacttgcaagtttagagcatgaataaactttttttcctgc

SEQ ID NO: 63368 - protein, 220 aa, Triticum aestivum
  peptide (1)..(220): Ceres Seq. ID no. 12616102
  misc_feature (76)..(218): Pfam Name: 6,7-dimethyl-8-ribityllumazine synthase Pfam Description: 6,7-dimethyl-8-ribityllumazine synthase
  misc_feature (68)..(216): Homolog of NCBI NO: 22549962 NR Description: 6,7-dimethyl-8-ribityllumazine synthase
  misc_feature (70)..(216): Homolog of NCBI NO: 15672978 NR Description: ribiflavin synthase beta chain (EC 2.5.1.9)
  misc_feature (70)..(216): Homolog of NCBI NO: 39996791 NR Description: riboflavin synthase, beta subunit [Geobacter
  misc_feature (70)..(217): Homolog of NCBI NO: 21402167 NR Description: DMRL_synthase, 6,7-dimethyl-8-ribityllumazine
  misc_feature (68)..(216): Homolog of NCBI NO: 2497762 NR Description: 6,7-dimethyl-8-ribityllumazine synthase (DMRL
  misc_feature (68)..(219): Homolog of NCBI NO: 9954974 NR Description: Chain A, Crystal Structures Of A Pentameric And An Icosahedral Plant Lumazine Synthase Reveals The Structural
  misc_feature (66)..(219): Homolog of NCBI NO: 5532608 NR Description: 6,7-dimethyl-8-ribityllumazine synthase precursor
  misc_feature (24)..(219): Homolog of NCBI NO: 20139859 NR Description: 6,7-dimethyl-8-ribityllumazine synthase,
  misc_feature (33)..(219): Homolog of NCBI NO: 15224809 NR Description: 6,7-dimethyl-8-ribityllumazine synthase precursor
  misc_feature (2)..(220): Homolog of NCBI NO: 38345388 NR Description: OSJNBa0067K08.17 [Oryza sativa (japonica
MAASPATSSAAARASTFARLSNAPLRAPRAAAVSFPSPNSARPAALVADARASRLPVVAAAAGGHQRLMGSLTNTEGLRFGVVVARFNEIVTNLLLQGALEAFERYSVKAENITVVSVPGSFEIPVAAQKLGKSGKYDAILCIGAVIRGDTTHYDAVANSAASGVLNAGLSAGVPCVFGVLTCDDMDQALNRAGGKAGNKGAETAITAIEMASLFRHHLA

SEQ ID NO: 63369 - protein, 152 aa, Triticum aestivum
  peptide (1)..(152): Ceres Seq. ID no. 12616103
  misc_feature (8)..(150): Pfam Name: 6,7-dimethyl-8-ribityllumazine synthase Pfam Description: 6,7-dimethyl-8-ribityllumazine synthase
  misc_feature (1)..(148): Homolog of NCBI NO: 22549962 NR Description: 6,7-dimethyl-8-ribityllumazine synthase
  misc_feature (2)..(148): Homolog of NCBI NO: 15672978 NR Description: ribiflavin synthase beta chain (EC 2.5.1.9)
  misc_feature (2)..(148): Homolog of NCBI NO: 39996791 NR Description: riboflavin synthase, beta subunit [Geobacter
  misc_feature (2)..(149): Homolog of NCBI NO: 21402167 NR Description: DMRL_synthase, 6,7-dimethyl-8-ribityllumazine
  misc_feature (1)..(148): Homolog of NCBI NO: 2497762 NR Description: 6,7-dimethyl-8-ribityllumazine synthase (DMRL
  misc_feature (1)..(151): Homolog of NCBI NO: 9954974 NR Description: Chain A, Crystal Structures Of A Pentameric And An Icosahedral Plant Lumazine Synthase Reveals The Structural
  misc_feature (1)..(151): Homolog of NCBI NO: 5532608 NR Description: 6,7-dimethyl-8-ribityllumazine synthase precursor
  misc_feature (1)..(151): Homolog of NCBI NO: 20139859 NR Description: 6,7-dimethyl-8-ribityllumazine synthase,
  misc_feature (1)..(151): Homolog of NCBI NO: 15224809 NR Description: 6,7-dimethyl-8-ribityllumazine synthase precursor
  misc_feature (1)..(152): Homolog of NCBI NO: 38345388 NR Description: OSJNBa0067K08.17 [Oryza sativa (japonica
MGSLTNTEGLRFGVVVARFNEIVTNLLLQGALEAFERYSVKAENITVVSVPGSFEIPVAAQKLGKSGKYDAILCIGAVIRGDTTHYDAVANSAASGVLNAGLSAGVPCVFGVLTCDDMDQALNRAGGKAGNKGAETAITAIEMASLFRHHLA

SEQ ID NO: 63370 - protein, 116 aa, Triticum aestivum
  peptide (1)..(116): Ceres Seq. ID no. 12616104
NTSLTSPRPHSSSSRRQIFLDTHRRLSGYGGLTGNIVRGREGLHLRTAIQRAPACAQSRRRLVPVSQLRSSGRAGRGCSGFPAPRRGRSRRRAPAADGVADQHRGAQVRRGCGTVQ

SEQ ID NO: 63371 - DNA, 1002 bp, Triticum aestivum
  misc_feature (1)..(1002): Ceres Seq. ID no. 13598416
actttattctacttctccgcccacgcccagcgagcacgagactgacgacgagacccgagagaggccgagacctggaagatccgaatccatcgccgctcccccacgcgacgagatgtcttcacccgcagagtactacaattcacttccaccagtaagcaaggcatatgggacattgtgtttctttaccacagtgctggttcagctccagatactagacccaggccttctttatttatcttatccccatgtgttcaagagttttcagatatggaggctatttacaagcttctttttcctcggcaagttctccatcaactttggtattcgccttctgatgatagcaagatatggtgtgcagttggagaagggttcatttgagaagcggacagcagatttcttgtggatgatgatatttggtgcaatctcgttactggtactgtctgctattccctatctcgagacttatttgttgggtattcctatggttagcatgcttctttatgtctggagccgagagtacccaaactctcagataagcatgtatggcctcgtccaattgaggtcattttatctaccatgggctatgcttggattggatgtgatatttggctctccaatattgcctggccttttgggcattatggttggacatctgtactacttctttacagtgttgtatccgctagctagcggaaagaactacctcaagactcctatgtgggtacacaagattgttgctcgattcaggttgggcgtgcaggcaaactctccagtccggccagctaacacaggccctactgccttcagaggaagaggctatagactcaatcagtagactgctgcgacgcctggcgatgtacaagaggcatgaacaggttaacatggattcgatctaaactctgtggcagctctaggaatctgggttgggatttttcccattgaatctgtaatgtcctcatcgaataactacagatgtgcacttgcattgtacctgcgaagtgc

SEQ ID NO: 63372 - protein, 277 aa, Triticum aestivum
  peptide (1)..(277): Ceres Seq. ID no. 15222337
  misc_feature (48)..(238): Pfam Name: Der1-like family Pfam Description: Der1-like family
  misc_feature (45)..(238): Homolog of NCBI NO: 15808990 NR Description: carcinoma related gene [Mus musculus]
  misc_feature (45)..(275): Homolog of NCBI NO: 16151831 NR Description: F-LANa [Mus musculus]
  misc_feature (48)..(241): Homolog of NCBI NO: 34852394 NR Description: similar to carcinoma related gene [Rattus
  misc_feature (48)..(238): Homolog of NCBI NO: 18859601 NR Description: RIKEN cDNA 1810063P04 [Mus musculus musculus]
  misc_feature (48)..(238): Homolog of NCBI NO: 13435738 NR Description: RIKEN cDNA 1810063P04 gene [Mus musculus]
  misc_feature (42)..(238): Homolog of NCBI NO: 35505512 NR Description: FLJ43842 protein [Homo sapiens]
  misc_feature (42)..(238): Homolog of NCBI NO: 15777933 NR Description: putative NADH oxidoreductase complex I subunit
  misc_feature (44)..(272): Homolog of NCBI NO: 25407607 NR Description: hypothetical protein AT4g29330 [imported] -
  misc_feature (38)..(272): Homolog of NCBI NO: 22329014 NR Description: expressed protein [Arabidopsis thaliana]
  misc_feature (44)..(277): Homolog of NCBI NO: 9187743 NR Description: putative NADH oxidoreductase [Zea mays]
LYSTSPPTPSEHETDDETRERPRPGRSESIAAPPRDEMSSPAEYYNSLPPVSKAYGTLCFFTTVLVQLQILDPGLLYLSYPHVFKSFQIWRLFTSFFFLGKFSINFGIRLLMIARYGVQLEKGSFEKRTADFLWMMIFGAISLLVLSAIPYLETYLLGIPMVSMLLYVWSREYPNSQISMYGLVQLRSFYLPWAMLGLDVIFGSPILPGLLGIMVGHLYYFFTVLYPLASGKNYLKTPMWVHKIVARFRLGVQANSPVRPANTGPTAFRGRGYRLNQ

SEQ ID NO: 63373 - protein, 240 aa, Triticum aestivum
  peptide (1)..(240): Ceres Seq. ID no. 15222338
  misc_feature (11)..(201): Pfam Name: Der1-like family Pfam Description: Der1-like family
  misc_feature (8)..(201): Homolog of NCBI NO: 15808990 NR Description: carcinoma related gene [Mus musculus]
  misc_feature (8)..(238): Homolog of NCBI NO: 16151831 NR Description: F-LANa [Mus musculus]
  misc_feature (11)..(204): Homolog of NCBI NO: 34852394 NR Description: similar to carcinoma related gene [Rattus
  misc_feature (11)..(201): Homolog of NCBI NO: 18859601 NR Description: RIKEN cDNA 1810063P04 [Mus musculus musculus]
  misc_feature (11)..(201): Homolog of NCBI NO: 13435738 NR Description: RIKEN cDNA 1810063P04 gene [Mus musculus]
  misc_feature (5)..(201): Homolog of NCBI NO: 35505512 NR Description: FLJ43842 protein [Homo sapiens]
  misc_feature (5)..(201): Homolog of NCBI NO: 15777933 NR Description: putative NADH oxidoreductase complex I subunit
  misc_feature (7)..(235): Homolog of NCBI NO: 25407607 NR Description: hypothetical protein AT4g29330 [imported] -
  misc_feature (1)..(235): Homolog of NCBI NO: 22329014 NR Description: expressed protein [Arabidopsis thaliana]
  misc_feature (7)..(240): Homolog of NCBI NO: 9187743 NR Description: putative NADH oxidoreductase [Zea mays]
MSSPAEYYNSLPPVSKAYGTLCFFTTVLVQLQILDPGLLYLSYPHVFKSFQIWRLFTSFFFLGKFSINFGIRLLMIARYGVQLEKGSFEKRTADFLWMMIFGAISLLVLSAIPYLETYLLGIPMVSMLLYVWSREYPNSQISMYGLVQLRSFYLPWAMLGLDVIFGSPILPGLLGIMVGHLYYFFTVLYPLASGKNYLKTPMWVHKIVARFRLGVQANSPVRPANTGPTAFRGRGYRLNQ

SEQ ID NO: 63374 - protein, 166 aa, Triticum aestivum
  peptide (1)..(166): Ceres Seq. ID no. 15222339
  misc_feature (1)..(127): Pfam Name: Der1-like family Pfam Description: Der1-like family
  misc_feature (1)..(127): Homolog of NCBI NO: 15808990 NR Description: carcinoma related gene [Mus musculus]
  misc_feature (1)..(164): Homolog of NCBI NO: 16151831 NR Description: F-LANa [Mus musculus]
  misc_feature (1)..(130): Homolog of NCBI NO: 34852394 NR Description: similar to carcinoma related gene [Rattus
  misc_feature (1)..(127): Homolog of NCBI NO: 18859601 NR Description: RIKEN cDNA 1810063P04 [Mus musculus musculus]
  misc_feature (1)..(127): Homolog of NCBI NO: 13435738 NR Description: RIKEN cDNA 1810063P04 gene [Mus musculus]
  misc_feature (1)..(127): Homolog of NCBI NO: 35505512 NR Description: FLJ43842 protein [Homo sapiens]
  misc_feature (1)..(127): Homolog of NCBI NO: 15777933 NR Description: putative NADH oxidoreductase complex I subunit
  misc_feature (1)..(161): Homolog of NCBI NO: 25407607 NR Description: hypothetical protein AT4g29330 [imported] -
  misc_feature (1)..(161): Homolog of NCBI NO: 22329014 NR Description: expressed protein [Arabidopsis thaliana]
  misc_feature (1)..(166): Homolog of NCBI NO: 9187743 NR Description: putative NADH oxidoreductase [Zea mays]
MIARYGVQLEKGSFEKRTADFLWMMIFGAISLLVLSAIPYLETYLLGIPMVSMLLYVWSREYPNSQISMYGLVQLRSFYLPWAMLGLDVIFGSPILPGLLGIMVGHLYYFFTVLYPLASGKNYLKTPMWVHKIVARFRLGVQANSPVRPANTGPTAFRGRGYRLNQ

SEQ ID NO: 63375 - DNA, 1241 bp, Triticum aestivum
  misc_feature (1)..(1241): Ceres Seq. ID no. 13596969
cgaaaaacccacagccacatttgtcctacttagagacccagctagatcaccatggcttcctcggctgctcgtctcctgcttgtcttcgcgacagctctggtgctgagctctgtgtctgcagcagcggtgggggctggtggctcgccgccgctggccaagggcctgtcgttcgagttctaccgcgccaggtgcccgcaggcggaggccatcgtcttcgccttcctcaaggacgccatccgcaaggacgtcggcctcgccgccgcgctcctccgcatccacttccacgactgcttcgtgcagggctgcgacggctccgtgctcctcgacaagaccaacggcgtcgacagcgagaaggtgtctcccccgaacgtcacgctgcgtccgtcggcgttcaaggccatcaacgccatccgcgcgctcctccagaaggcgtgcggcgggcccgtcgtctcctgcgccgacatcgccgcgctcgccgcccgcgactccgtccagctggccggcgggccgcggtacgccgtcccgctcggccgccgcgacgggctcgcccccgcttccctggacaccatcctgggcgcgctcccgccgccgacctccaaggtgcccgtgctcctcagcttcctcgccaagatcggcctcaacgccgacgacctggtggcgctctccggcgcgcacacgctcgggatcgcgcactgcggctccttcgaggagcggctgtttcccaaggtcgaccccaccatggacaagtttttcgccggccacctcaagctcacctgcccgcggctcaaggtggacaacttcaccgccaacgacatccgcacgcctgacgtgttcgacaacaagttctacgtcgacctgctcaaccggcagggtctcttcacctccgaccaggacctgcacaccgacgccaagaccaagcccatggtcaccaggttcgccgtcgaccaggccgccttcttcgaccagttcgtcaagtccatggtgaaaatggggcagatcaacgtgctcactggcaaccagggtcagatccgcacggactgctccattcccaacgccgcccgcagtgccggcgacgagctgccgtggtccgtcgtcgagaccgccgtggagagcttggtgttgtaggtagtagtagggtttagtccatggatctcaagcttgttttatgttttggcaaggtttggactttggaagtcagagtgcatgcgtgtttagtttgttgagcaagaccgaaccagttg

SEQ ID NO: 63376 - protein, 357 aa, Triticum aestivum
  peptide (1)..(357): Ceres Seq. ID no. 13596970
  misc_feature (54)..(298): Pfam Name: Peroxidase Pfam Description: Peroxidase
  misc_feature (1)..(336): Homolog of NCBI NO: 14031049 NR Description: peroxidase [Nicotiana tabacum]
  misc_feature (32)..(334): Homolog of NCBI NO: 2624498 NR Description: Crystal Structure Of Barley Grain Peroxidase 1
  misc_feature (1)..(356): Homolog of NCBI NO: 478409 NR Description: peroxidase (EC 1.11.1.7), cationic - adzuki bean
  misc_feature (11)..(355): Homolog of NCBI NO: 1389835 NR Description: peroxidase [Linum usitatissimum]
  misc_feature (9)..(353): Homolog of NCBI NO: 82410 NR Description: peroxidase (EC 1.11.1.7) BP1 precursor - barley
  misc_feature (3)..(336): Homolog of NCBI NO: 34905830 NR Description: putative peroxidase [Oryza sativa (japonica
  misc_feature (15)..(354): Homolog of NCBI NO: 22001285 NR Description: peroxidase 1 [Triticum aestivum]
  misc_feature (1)..(356): Homolog of NCBI NO: 34905838 NR Description: putative peroxidase [Oryza sativa (japonica
  misc_feature (2)..(357): Homolog of NCBI NO: 34905834 NR Description: putative peroxidase [Oryza sativa (japonica
  misc_feature (1)..(354): Homolog of NCBI NO: 34905826 NR Description: putative peroxidase [Oryza sativa (japonica
MASSAARLLLVFATALVLSSVSAAAVGAGGSPPLAKGLSFEFYRARCPQAEAIVFAFLKDAIRKDVGLAAALLRIHFHDCFVQGCDGSVLLDKTNGVDSEKVSPPNVTLRPSAFKAINAIRALLQKACGGPVVSCADIAALAARDSVQLAGGPRYAVPLGRRDGLAPASLDTILGALPPPTSKVPVLLSFLAKIGLNADDLVALSGAHTLGIAHCGSFEERLFPKVDPTMDKFFAGHLKLTCPRLKVDNFTANDIRTPDVFDNKFYVDLLNRQGLFTSDQDLHTDAKTKPMVTRFAVDQAAFFDQFVKSMVKMGQINVLTGNQGQIRTDCSIPNAARSAGDELPWSVVETAVESLVL

SEQ ID NO: 63377 - protein, 274 aa, Triticum aestivum
  peptide (1)..(274): Ceres Seq. ID no. 13596971
KNPQPHLSYLETQLDHHGFLGCSSPACLRDSSGAELCVCSSGGGWWLAAAGQGPVVRVLPRQVPAGGGHRLRLPQGRHPQGRRPRRRAPPHPLPRLLRAGLRRLRAPRQDQRRRQREGVSPERHAASVGVQGHQRHPRAPPEGVRRARRLLRRHRRARRPRLRPAGRRAAVRRPARPPRRARPRFPGHHPGRAPAADLQGARAPQLPRQDRPQRRRPGGALRRAHARDRALRLLRGAAVSQGRPHHGQVFRRPPQAHLPAAQGGQLHRQRHPHA

SEQ ID NO: 63378 - DNA, 1340 bp, Triticum aestivum
  misc_feature (1)..(1340): Ceres Seq. ID no. 13585282
cacacccgccgccgccgccgccgtctccctccctccctctctctcccccccgacgccgccggctccaagccacatcccaccccgccccgccgtcacccggtctctcgtctcctgcggcggtccgcctccattcgcctctcgttcgcttcgcagacgcgttcttccgtccgcctagcgggctcgctggggagagcggcagcagccatggccatcgggtctctcgtcgcagccgcgtccaggtccagccgccacgccctcgcctccgccgccatctcccaggcggcttacagggcgcgccagcacgccggagtgcctcctctgctctcgcggcttgcaccactcgcccgcgccttcagctcaagccctgcagcagccgatgtcgattcagatctccctgtcatggaagtgcagaaacggcgggtgggcaaaaaggccaagggcgcgaaaagcggaaaagccatgatgttcccactccatttccactatgaagatgtgttgcgtgaggatctgttgctcaaactgaaccacaccaacaccatggaggtccctggattgtttgagatccgactggtgcccaagtctaccaccggtgccaaaatccagtttgggaaactggccatggagattctgtgcggccagaggtgcatacaggcagaactgcctgcccatctgaaagggaaggcgaccaacgcatacctggggtcccagaaagacgccgtgtccctgaggcagagcatcatccgagggcacgggatgtacaacttcctggtcagggtcctgacggtgatgtctatgctggactccaaggtggcgatcgagcaggggaactgcgtaaagttcttcatggccacggagttctgcgagttctcccccgagatagaggaccactttgagatctttgagaccatcggagggttcaacgtgaccatcgtcaccacggcctgctcgaaggaggagacctcgctgctgtggagcggcttcttgctcaaggatgaaggtgagatcagctaagtaagatgctggatgagatcatgagcattgtgactaaagacaaactctggtggaagcttctatcgttttgtgatccgatctttgctagctagagtcaatggccagcttttctttctagagcaatcttgttccggaatgaaactgagttcccctgttatgtctatcttcagaagaggctcgtttttcttctgatatgcagagattcattggtttctacggtttcaaaaaaattctagatggtgatcctcctagttttgtatcctgataggctttggtcatcctcttcatgtgaagagaactaaataataatgcatttgattaaatctgcg

SEQ ID NO: 63379 - protein, 336 aa, Triticum aestivum
  peptide (1)..(336): Ceres Seq. ID no. 13585283
  misc_feature (178)..(228): Pfam Name: Ribosomal protein L5 Pfam Description: Ribosomal protein L5
  misc_feature (155)..(334): Homolog of NCBI NO: 13449308 NR Description: ribosomal protein L5 [Arabidopsis thaliana]
  misc_feature (155)..(334): Homolog of NCBI NO: 4164412 NR Description: ribosomal protein L5 [Pisum sativum]
  misc_feature (155)..(334): Homolog of NCBI NO: 421897 NR Description: ribosomal protein L5 - evening primrose
  misc_feature (155)..(334): Homolog of NCBI NO: 9838430 NR Description: ribosomal protein L5 [Beta vulgaris]
  misc_feature (155)..(334): Homolog of NCBI NO: 730588 NR Description: MITOCHONDRIAL 60S RIBOSOMAL PROTEIN L5
  misc_feature (155)..(334): Homolog of NCBI NO: 1173079 NR Description: MITOCHONDRIAL 60S RIBOSOMAL PROTEIN L5
  misc_feature (155)..(334): Homolog of NCBI NO: 37591117 NR Description: ribosomal protein L5 [Brassica napus]
  misc_feature (149)..(334): Homolog of NCBI NO: 30351950 NR Description: mitochondrial ribosomal protein L5 [Zea mays]
  misc_feature (154)..(334): Homolog of NCBI NO: 27803142 NR Description: ribosomal protein L5 [Triticum aestivum]
  misc_feature (155)..(334): Homolog of NCBI NO: 5688943 NR Description: ribosomal protein L5 [Oryza sativa (japonica
HTRRRRRRLPPSLSLPPDAAGSKPHPTPPRRHPVSRLLRRSASIRLSFASQTRSSVRLAGSLGRAAAAMAIGSLVAAASRSSRHALASAAISQAAYRARQHAGVPPLLSRLAPLARAFSSSPAAADVDSDLPVMEVQKRRVGKKAKGAKSGKAMMFPLHFHYEDVLREDLLLKLNHTNTMEVPGLFEIRLVPKSTTGAKIQFGKLAMEILCGQRCIQAELPAHLKGKATNAYLGSQKDAVSLRQSIIRGHGMYNFLVRVLTVMSMLDSKVAIEQGNCVKFFMATEFCEFSPEIEDHFEIFETIGGFNVTIVTTACSKEETSLLWSGFLLKDEGEIS

SEQ ID NO: 63380 - protein, 268 aa, Triticum aestivum
  peptide (1)..(268): Ceres Seq. ID no. 13585284
  misc_feature (110)..(160): Pfam Name: Ribosomal protein L5 Pfam Description: Ribosomal protein L5
  misc_feature (87)..(266): Homolog of NCBI NO: 13449308 NR Description: ribosomal protein L5 [Arabidopsis thaliana]
  misc_feature (87)..(266): Homolog of NCBI NO: 4164412 NR Description: ribosomal protein L5 [Pisum sativum]
  misc_feature (87)..(266): Homolog of NCBI NO: 421897 NR Description: ribosomal protein L5 - evening primrose
  misc_feature (87)..(266): Homolog of NCBI NO: 9838430 NR Description: ribosomal protein L5 [Beta vulgaris]
  misc_feature (87)..(266): Homolog of NCBI NO: 730588 NR Description: MITOCHONDRIAL 60S RIBOSOMAL PROTEIN L5
  misc_feature (87)..(266): Homolog of NCBI NO: 1173079 NR Description: MITOCHONDRIAL 60S RIBOSOMAL PROTEIN L5
  misc_feature (87)..(266): Homolog of NCBI NO: 37591117 NR Description: ribosomal protein L5 [Brassica napus]
  misc_feature (81)..(266): Homolog of NCBI NO: 30351950 NR Description: mitochondrial ribosomal protein L5 [Zea mays]
  misc_feature (86)..(266): Homolog of NCBI NO: 27803142 NR Description: ribosomal protein L5 [Triticum aestivum]
  misc_feature (87)..(266): Homolog of NCBI NO: 5688943 NR Description: ribosomal protein L5 [Oryza sativa (japonica
MAIGSLVAAASRSSRHALASAAISQAAYRARQHAGVPPLLSRLAPLARAFSSSPAAADVDSDLPVMEVQKRRVGKKAKGAKSGKAMMFPLHFHYEDVLREDLLLKLNHTNTMEVPGLFEIRLVPKSTTGAKIQFGKLAMEILCGQRCIQAELPAHLKGKATNAYLGSQKDAVSLRQSIIRGHGMYNFLVRVLTVMSMLDSKVAIEQGNCVKFFMATEFCEFSPEIEDHFEIFETIGGFNVTIVTTACSKEETSLLWSGFLLKDEGEIS

SEQ ID NO: 63381 - protein, 203 aa, Triticum aestivum
  peptide (1)..(203): Ceres Seq. ID no. 13585285
  misc_feature (45)..(95): Pfam Name: Ribosomal protein L5 Pfam Description: Ribosomal protein L5
  misc_feature (22)..(201): Homolog of NCBI NO: 13449308 NR Description: ribosomal protein L5 [Arabidopsis thaliana]
  misc_feature (22)..(201): Homolog of NCBI NO: 4164412 NR Description: ribosomal protein L5 [Pisum sativum]
  misc_feature (22)..(201): Homolog of NCBI NO: 421897 NR Description: ribosomal protein L5 - evening primrose
  misc_feature (22)..(201): Homolog of NCBI NO: 9838430 NR Description: ribosomal protein L5 [Beta vulgaris]
  misc_feature (22)..(201): Homolog of NCBI NO: 730588 NR Description: MITOCHONDRIAL 60S RIBOSOMAL PROTEIN L5
  misc_feature (22)..(201): Homolog of NCBI NO: 1173079 NR Description: MITOCHONDRIAL 60S RIBOSOMAL PROTEIN L5
  misc_feature (22)..(201): Homolog of NCBI NO: 37591117 NR Description: ribosomal protein L5 [Brassica napus]
  misc_feature (16)..(201): Homolog of NCBI NO: 30351950 NR Description: mitochondrial ribosomal protein L5 [Zea mays]
  misc_feature (21)..(201): Homolog of NCBI NO: 27803142 NR Description: ribosomal protein L5 [Triticum aestivum]
  misc_feature (22)..(201): Homolog of NCBI NO: 5688943 NR Description: ribosomal protein L5 [Oryza sativa (japonica
MEVQKRRVGKKAKGAKSGKAMMFPLHFHYEDVLREDLLLKLNHTNTMEVPGLFEIRLVPKSTTGAKIQFGKLAMEILCGQRCIQAELPAHLKGKATNAYLGSQKDAVSLRQSIIRGHGMYNFLVRVLTVMSMLDSKVAIEQGNCVKFFMATEFCEFSPEIEDHFEIFETIGGFNVTIVTTACSKEETSLLWSGFLLKDEGEIS

SEQ ID NO: 63382 - DNA, 1569 bp, Triticum aestivum
  misc_feature (1)..(1569): Ceres Seq. ID no. 13598460
caggtccgtttacgcgtgtgctgggtttgggcacctctgctccatagcgcgaagagcgaaaggcacggccgccgccacgcaccaccccccctgccgccaacacgctgtaggtccgccgccggcaacattgaaggggcaccacagcacacaaagcagagagtaatggcgtcaacaaccatatcgtcctgcgcatatcaggcagtgcaaggcgcccaccgattgaagatctgtcagtttagtcacggtattgttggcatggacgtcaatgctgatggtttcatccgctccagcaccttcagggttgggggattcgactgggctatcttgtactacccagagggttatggcgacgacagtgagggattcatatcagtttttgttgagttcatgagcaagtatgggaaggcgccagcggtcgtcgacataagactgattgatcaagtcactggaaagcccaaatcgttattgtcaagtgtattctttgaagaggatgaggagccatttcgattcaaatctgacagcttcgcagaggctacctggggtaaggagaggtgtataagaagggaggcgttggaggattcagtgtatgtccgagatgactgccttgtgatcgaatgtgtcatcactgttttaggccaattaagggtgtctgaaactaaaccattgtgtgaaattgatgtgccaccccctaacgcactacagcattttcgcaagatgttagaggatacgtccgcagcagatgtgaccttcgacgttcaacaagaaacatttgctgcccacagggcggtgcttgctgcgcggtcacctgtcttccggaagcagttcagcgaacccatgaaggagaagatgagccgcataaccatcaactctgtggaaccagcggttttcaaggctctcctccatttcatttacaccgattccttgcctgtgatggatgatttcactagagctgaaagcaatgctgttttccagcatctacttgcagctgcggatcaatatggtttagagaggttgaagcttatgtgtgcaggcaccttggttatgaaccttaatgtggagaatgtggctagtgcactatggctagctgataagtacaattgccagaagcttaaagaagcttgtgtcaattttatggccccttccaacagagtcgatgctgtggtggcaagccaagggtaccagcttctgaaaagaggttctccttctccattagcagatgtgtgggagaagaggagccgtgctcgccaaagctttctttagagcagatccaaaagctacaatgctagattatgagtgcttctgtcagcagaatgactggtatgatgaaagcagttccaccaaaatttattgtgcgtatctagatcctgtgctttgaaaaatcatctaagcagtccctggtaactctttagctttttgcgagaaactattaatgtcatgttggtcatgtatgtgtagctgtgaaatgttgatctttagatgcattcctgggtcaatttagcggatatgctccagcaagtatgttccgaatgatgtgtgatctgttgatttgcagcttgttttgatttgggc

SEQ ID NO: 63383 - protein, 419 aa, Triticum aestivum
  peptide (1)..(419): Ceres Seq. ID no. 13598461
  misc_feature (238)..(350): Pfam Name: BTB/POZ domain Pfam Description: BTB/POZ domain
  misc_feature (43)..(419): Homolog of NCBI NO: 18397497 NR Description: expressed protein [Arabidopsis thaliana]
  misc_feature (59)..(417): Homolog of NCBI NO: 21595740 NR Description: unknown [Arabidopsis thaliana]
  misc_feature (59)..(417): Homolog of NCBI NO: 18405153 NR Description: expressed protein [Arabidopsis thaliana]
  misc_feature (51)..(405): Homolog of NCBI NO: 24059967 NR Description: contains ESTs
  misc_feature (29)..(409): Homolog of NCBI NO: 23617108 NR Description: contains ESTs
  misc_feature (59)..(417): Homolog of NCBI NO: 38636858 NR Description: zinc finger POZ domain protein-like
  misc_feature (57)..(412): Homolog of NCBI NO: 38636861 NR Description: putative speckle-type POZ protein
  misc_feature (59)..(418): Homolog of NCBI NO: 29467523 NR Description: P0582D05.13 [Oryza sativa (japonica
  misc_feature (50)..(416): Homolog of NCBI NO: 38175683 NR Description: putative speckle-type POZ protein
  misc_feature (55)..(417): Homolog of NCBI NO: 29467516 NR Description: P0582D05.6 [Oryza sativa (japonica
QVRLRVCWVWAPLLHSAKSERHGRRHAPPPLPPTRCRSAAGNIEGAPQHTKQRVMASTTISSCAYQAVQGAHRLKICQFSHGIVGMDVNADGFIRSSTFRVGGFDWAILYYPEGYGDDSEGFISVFVEFMSKYGKAPAVVDIRLIDQVTGKPKSLLSSVFFEEDEEPFRFKSDSFAEATWGKERCIRREALEDSVYVRDDCLVIECVITVLGQLRVSETKPLCEIDVPPPNALQHFRKMLEDTSAADVTFDVQQETFAAHRAVLAARSPVFRKQFSEPMKEKMSRITINSVEPAVFKALLHFIYTDSLPVMDDFTRAESNAVFQHLLAAADQYGLERLKLMCAGTLVMNLNVENVASALWLADKYNCQKLKEACVNFMAPSNRVDAVVASQGYQLLKRGSPSPLADVWEKRSRARQSFL

SEQ ID NO: 63384 - protein, 365 aa, Triticum aestivum
  peptide (1)..(365): Ceres Seq. ID no. 13598462
  misc_feature (184)..(296): Pfam Name: BTB/POZ domain Pfam Description: BTB/POZ domain
  misc_feature (1)..(365): Homolog of NCBI NO: 18397497 NR Description: expressed protein [Arabidopsis thaliana]
  misc_feature (5)..(363): Homolog of NCBI NO: 21595740 NR Description: unknown [Arabidopsis thaliana]
  misc_feature (5)..(363): Homolog of NCBI NO: 18405153 NR Description: expressed protein [Arabidopsis thaliana]
  misc_feature (1)..(351): Homolog of NCBI NO: 24059967 NR Description: contains ESTs
  misc_feature (1)..(355): Homolog of NCBI NO: 23617108 NR Description: contains ESTs
  misc_feature (5)..(363): Homolog of NCBI NO: 38636858 NR Description: zinc finger POZ domain protein-like
  misc_feature (3)..(358): Homolog of NCBI NO: 38636861 NR Description: putative speckle-type POZ protein
  misc_feature (5)..(364): Homolog of NCBI NO: 29467523 NR Description: P0582D05.13 [Oryza sativa (japonica
  misc_feature (1)..(362): Homolog of NCBI NO: 38175683 NR Description: putative speckle-type POZ protein
  misc_feature (1)..(363): Homolog of NCBI NO: 29467516 NR Description: P0582D05.6 [Oryza sativa (japonica
MASTTISSCAYQAVQGAHRLKICQFSHGIVGMDVNADGFIRSSTFRVGGFDWAILYYPEGYGDDSEGFISVFVEFMSKYGKAPAVVDIRLIDQVTGKPKSLLSSVFFEEDEEPFRFKSDSFAEATWGKERCIRREALEDSVYVRDDCLVIECVITVLGQLRVSETKPLCEIDVPPPNALQHFRKMLEDTSAADVTFDVQQETFAAHRAVLAARSPVFRKQFSEPMKEKMSRITINSVEPAVFKALLHFIYTDSLPVMDDFTRAESNAVFQHLLAAADQYGLERLKLMCAGTLVMNLNVENVASALWLADKYNCQKLKEACVNFMAPSNRVDAVVASQGYQLLKRGSPSPLADVWEKRSRARQSFL

SEQ ID NO: 63385 - protein, 334 aa, Triticum aestivum
  peptide (1)..(334): Ceres Seq. ID no. 13598463
  misc_feature (153)..(265): Pfam Name: BTB/POZ domain Pfam Description: BTB/POZ domain
  misc_feature (1)..(334): Homolog of NCBI NO: 18397497 NR Description: expressed protein [Arabidopsis thaliana]
  misc_feature (1)..(332): Homolog of NCBI NO: 21595740 NR Description: unknown [Arabidopsis thaliana]
  misc_feature (1)..(332): Homolog of NCBI NO: 18405153 NR Description: expressed protein [Arabidopsis thaliana]
  misc_feature (1)..(320): Homolog of NCBI NO: 24059967 NR Description: contains ESTs
  misc_feature (1)..(324): Homolog of NCBI NO: 23617108 NR Description: contains ESTs
  misc_feature (1)..(332): Homolog of NCBI NO: 38636858 NR Description: zinc finger POZ domain protein-like
  misc_feature (1)..(327): Homolog of NCBI NO: 38636861 NR Description: putative speckle-type POZ protein
  misc_feature (1)..(333): Homolog of NCBI NO: 29467523 NR Description: P0582D05.13 [Oryza sativa (japonica
  misc_feature (1)..(331): Homolog of NCBI NO: 38175683 NR Description: putative speckle-type POZ protein
  misc_feature (1)..(332): Homolog of NCBI NO: 29467516 NR Description: P0582D05.6 [Oryza sativa (japonica
MDVNADGFIRSSTFRVGGFDWAILYYPEGYGDDSEGFISVFVEFMSKYGKAPAVVDIRLIDQVTGKPKSLLSSVFFEEDEEPFRFKSDSFAEATWGKERCIRREALEDSVYVRDDCLVIECVITVLGQLRVSETKPLCEIDVPPPNALQHFRKMLEDTSAADVTFDVQQETFAAHRAVLAARSPVFRKQFSEPMKEKMSRITINSVEPAVFKALLHFIYTDSLPVMDDFTRAESNAVFQHLLAAADQYGLERLKLMCAGTLVMNLNVENVASALWLADKYNCQKLKEACVNFMAPSNRVDAVVASQGYQLLKRGSPSPLADVWEKRSRARQSFL

SEQ ID NO: 63386 - DNA, 1778 bp, Triticum aestivum
  misc_feature (1)..(1778): Ceres Seq. ID no. 15170666
aactctcgtctcgttctagtattcttgctcccacacggcgacgtcgccatcgacatcgctgccgctctctcctcagcagcgctcctctaccaccacctcctctaggcaggggttagcggccgccccctccgcgtgcgccgtcccaaaccctagcatatccccctccccgactcctctgcgccggagcttccctccgaccgcgcagatcgccggcgatggggtccaaggaccaggacctggccgcgtcgtcgggcggtggcggaggcttcttctcctcgatcgccgcgggcgtgcgcagctggggcaccgccgtgcacaaatcggtcaacgggttggttggctatgaagggcttgaagttatcaacccagatggaggcacagacgatgcggaagcagaggctatgaaggggcgatggaaacaggaggatcgcgacagttactggaagatgatgaacaagtacataggatcagatgtaacgtcacttgttacacttccagtcatcatctttgagccgatgtcaatgcttcagaaaatggcagagttgatggaatattgtgacctgttagacaaagcagatgaatgtgaggatccacacatgcggatggtatatgcttctacatgggctttgtcagcctacctagcctaccaccgtacgtggaagcctttcaatcccatccttggagagacatatgagatggttaaccaccagggtattacatttattgctgagcaggtaagccatcatcctccgatgggtgcagctcactgtgagaatgatcattttacttacgacatcacatcaaagttgaagacaaagttcttgggaaactcagtggaagtgtatccagttggaaggactagagtgacacttaaaaaatccggtgtcgtgttggaactggtaccaccactgacgaaggtcaacaacttgatatttgggcgcacatgggttgactcttttggagagatggtcttgacaaatctgacaactggagacaaagctgtgctgtatttccagccatgcggctggtttggggctgggcgattcgaggtggatgggtatgtatatactgcagctgaagaaccgaaaataatgatgacaggaaaatggaacaagtccatgagttaccagccttgtgatcaagaaggtgatcctcttccagggacggagctaaaagaggtctggaaagctgctcctgctccaccgaatgacaagtaccagtatacatactttgcgcacaaaataaatagctttgatacagcacctaagaagctcttgccttcagactcccgattaaggcccgacagatatgcccttgagaagggcgacatgtctaaatctggggcacacaagagcaggcttgaagaacaacaaagagctgagaagaaaattcgggacaccaagggggagcaatttactccaaaatggttcaagatgacggaagacatctcccctaccccgtggggcgacctggaggtgtatgaatacaatggcagatacgccgagcaccgggctgcgatagacagctctagcgtcgctgccaaggagaaggacgtcagctccatcgagttcaacccgtggcagtatggcgacttgccttcccaatgatttcaaagggtctgaaaccacccatatattattttctcatcgaaaacgctttcaggccttgtgctgatgcataccggcggtttccgtgccttgtagtattacatgactttccaccttttctcttcgtgctgtgatacagttcaggatgtgattgtgtatttgatgtagtcc

SEQ ID NO: 63387 - protein, 463 aa, Triticum aestivum
  peptide (1)..(463): Ceres Seq. ID no. 15170667
  misc_feature (30)..(433): Pfam Name: Oxysterol-binding protein Pfam Description: Oxysterol-binding protein
  misc_feature (314)..(428): Homolog of NCBI NO: 17529997 NR Description: oxysterol-binding protein-like protein OSBPL1A
  misc_feature (74)..(306): Homolog of NCBI NO: 17529997 NR Description: oxysterol-binding protein-like protein OSBPL1A
  misc_feature (314)..(428): Homolog of NCBI NO: 19718746 NR Description: oxysterol-binding protein-like 1A isoform A
  misc_feature (74)..(306): Homolog of NCBI NO: 19718746 NR Description: oxysterol-binding protein-like 1A isoform A
  misc_feature (83)..(301): Homolog of NCBI NO: 38639321 NR Description: putative oxysterol-binding protein [Solanum
  misc_feature (17)..(463): Homolog of NCBI NO: 8885548 NR Description: oxysterol-binding protein [Arabidopsis thaliana]
  misc_feature (1)..(459): Homolog of NCBI NO: 38639323 NR Description: oxysterol-binding protein [Solanum tuberosum]
  misc_feature (15)..(460): Homolog of NCBI NO: 15241681 NR Description: expressed protein [Arabidopsis thaliana]
  misc_feature (17)..(463): Homolog of NCBI NO: 15238398 NR Description: oxysterol-binding protein - like [Arabidopsis
  misc_feature (10)..(460): Homolog of NCBI NO: 15232633 NR Description: oxysterol-binding protein -related [Arabidopsis
MGSKDQDLAASSGGGGGFFSSIAAGVRSWGTAVHKSVNGLVGYEGLEVINPDGGTDDAEAEAMKGRWKQEDRDSYWKMMNKYIGSDVTSLVTLPVIIFEPMSMLQKMAELMEYCDLLDKADECEDPHMRMVYASTWALSAYLAYHRTWKPFNPILGETYEMVNHQGITFIAEQVSHHPPMGAAHCENDHFTYDITSKLKTKFLGNSVEVYPVGRTRVTLKKSGVVLELVPPLTKVNNLIFGRTWVDSFGEMVLTNLTTGDKAVLYFQPCGWFGAGRFEVDGYVYTAAEEPKIMMTGKWNKSMSYQPCDQEGDPLPGTELKEVWKAAPAPPNDKYQYTYFAHKINSFDTAPKKLLPSDSRLRPDRYALEKGDMSKSGAHKSRLEEQQRAEKKIRDTKGEQFTPKWFKMTEDISPTPWGDLEVYEYNGRYAEHRAAIDSSSVAAKEKDVSSIEFNPWQYGDLPSQ

SEQ ID NO: 63388 - protein, 401 aa, Triticum aestivum
  peptide (1)..(401): Ceres Seq. ID no. 15170668
  misc_feature (1)..(371): Pfam Name: Oxysterol-binding protein Pfam Description: Oxysterol-binding protein
  misc_feature (252)..(366): Homolog of NCBI NO: 17529997 NR Description: oxysterol-binding protein-like protein OSBPL1A
  misc_feature (12)..(244): Homolog of NCBI NO: 17529997 NR Description: oxysterol-binding protein-like protein OSBPL1A
  misc_feature (252)..(366): Homolog of NCBI NO: 19718746 NR Description: oxysterol-binding protein-like 1A isoform A
  misc_feature (12)..(244): Homolog of NCBI NO: 19718746 NR Description: oxysterol-binding protein-like 1A isoform A
  misc_feature (21)..(239): Homolog of NCBI NO: 38639321 NR Description: putative oxysterol-binding protein [Solanum
  misc_feature (1)..(401): Homolog of NCBI NO: 8885548 NR Description: oxysterol-binding protein [Arabidopsis thaliana]
  misc_feature (1)..(397): Homolog of NCBI NO: 38639323 NR Description: oxysterol-binding protein [Solanum tuberosum]
  misc_feature (1)..(398): Homolog of NCBI NO: 15241681 NR Description: expressed protein [Arabidopsis thaliana]
  misc_feature (1)..(401): Homolog of NCBI NO: 15238398 NR Description: oxysterol-binding protein - like [Arabidopsis
  misc_feature (1)..(398): Homolog of NCBI NO: 15232633 NR Description: oxysterol-binding protein -related [Arabidopsis
MKGRWKQEDRDSYWKMMNKYIGSDVTSLVTLPVIIFEPMSMLQKMAELMEYCDLLDKADECEDPHMRMVYASTWALSAYLAYHRTWKPFNPILGETYEMVNHQGITFIAEQVSHHPPMGAAHCENDHFTYDITSKLKTKFLGNSVEVYPVGRTRVTLKKSGVVLELVPPLTKVNNLIFGRTWVDSFGEMVLTNLTTGDKAVLYFQPCGWFGAGRFEVDGYVYTAAEEPKIMMTGKWNKSMSYQPCDQEGDPLPGTELKEVWKAAPAPPNDKYQYTYFAHKINSFDTAPKKLLPSDSRLRPDRYALEKGDMSKSGAHKSRLEEQQRAEKKIRDTKGEQFTPKWFKMTEDISPTPWGDLEVYEYNGRYAEHRAAIDSSSVAAKEKDVSSIEFNPWQYGDLPSQ

SEQ ID NO: 63389 - protein, 386 aa, Triticum aestivum
  peptide (1)..(386): Ceres Seq. ID no. 15170669
  misc_feature (1)..(356): Pfam Name: Oxysterol-binding protein Pfam Description: Oxysterol-binding protein
  misc_feature (237)..(351): Homolog of NCBI NO: 17529997 NR Description: oxysterol-binding protein-like protein OSBPL1A
  misc_feature (1)..(229): Homolog of NCBI NO: 17529997 NR Description: oxysterol-binding protein-like protein OSBPL1A
  misc_feature (237)..(351): Homolog of NCBI NO: 19718746 NR Description: oxysterol-binding protein-like 1A isoform A
  misc_feature (1)..(229): Homolog of NCBI NO: 19718746 NR Description: oxysterol-binding protein-like 1A isoform A
  misc_feature (6)..(224): Homolog of NCBI NO: 38639321 NR Description: putative oxysterol-binding protein [Solanum
  misc_feature (1)..(386): Homolog of NCBI NO: 8885548 NR Description: oxysterol-binding protein [Arabidopsis thaliana]
  misc_feature (1)..(382): Homolog of NCBI NO: 38639323 NR Description: oxysterol-binding protein [Solanum tuberosum]
  misc_feature (1)..(383): Homolog of NCBI NO: 15241681 NR Description: expressed protein [Arabidopsis thaliana]
  misc_feature (1)..(386): Homolog of NCBI NO: 15238398 NR Description: oxysterol-binding protein - like [Arabidopsis
  misc_feature (1)..(383): Homolog of NCBI NO: 15232633 NR Description: oxysterol-binding protein -related [Arabidopsis
MMNKYIGSDVTSLVTLPVIIFEPMSMLQKMAELMEYCDLLDKADECEDPHMRMVYASTWALSAYLAYHRTWKPFNPILGETYEMVNHQGITFIAEQVSHHPPMGAAHCENDHFTYDITSKLKTKFLGNSVEVYPVGRTRVTLKKSGVVLELVPPLTKVNNLIFGRTWVDSFGEMVLTNLTTGDKAVLYFQPCGWFGAGRFEVDGYVYTAAEEPKIMMTGKWNKSMSYQPCDQEGDPLPGTELKEVWKAAPAPPNDKYQYTYFAHKINSFDTAPKKLLPSDSRLRPDRYALEKGDMSKSGAHKSRLEEQQRAEKKIRDTKGEQFTPKWFKMTEDISPTPWGDLEVYEYNGRYAEHRAAIDSSSVAAKEKDVSSIEFNPWQYGDLPSQ

SEQ ID NO: 63390 - DNA, 1239 bp, Triticum aestivum
  misc_feature (1)..(1239): Ceres Seq. ID no. 12616212
acccgttcacccccggcggcgccccttcgctcccccgacacatttccgcgagcagctggtgcgcgcgcggagcggaggccatggcgatggcgaaggccaaatccaccgccctctccgccgccgaaaagtgccggaacatcctgggcgccagttgggaagcccacctcaacaccatcaaagccgacgccaagggaagcaagggggaggtttacacgtcgagagtgcactacatggtccaaaagggcatgccctacttgatcgtgcccgagaacgacatgcacaacattaacattataatcgacgagcggggttctctctcggtgtccagtccagtcccaggtcgccttgccagcttgctcaagtcactcaacaagttgcctccccgggttgctatgaccggcgatgtcctgcgcatgaaggagacaaaggttccagttatagctgagagccttaagaaagctattctgaaggaacataaagctgctagcgaagctacttatggggtttcaacggtattgtcttccgcaagtgctacttgtaggtcgcgcagtgaaggtctccttagcttactcaatgaagagagctcctacaatatcttgaagtttgaaattggctcgtgtgtcttcatagattcaatggggagcagccataatatcaagttggatacttttgaaccaccaaaagccgacctgctattgccattctcttcgaggcttattgatggtatcaacaggagtgacccaaggcggagagcacttatacttttctgtttcgagtattttgatgtgactgccagagatgcactcttgctctccgttgatcaccatggatttgaggtgctcgccagggttcctgaaagagctaccgcacctgatgtccctcagcagtaccattggaaagagttcaggttcacattcaaggaagcagtcaaggatgttgaagacttctgccgcatgttggttgagctagaagaagaagctctgcacagcgtaaagagctatagcggattaggttgaaggggatagtagctctttctcaaaccaaagggcacaagattcagatcttcagttatgataatataaatcatctgaagaatataacttgaatccatttttgtagatggtttgcattgtaaactgacatcattcgattgagaatcaacagttaggtttgtatgtcaccataattttcagcctctgtttggtacttatttacaaatcagaaaggaaacttctctgc

SEQ ID NO: 63391 - protein, 337 aa, Triticum aestivum
  peptide (1)..(337): Ceres Seq. ID no. 12616213
  misc_feature (98)..(336): Homolog of NCBI NO: 15229211 NR Description: unknown protein; protein id: At3g04020.1
PFTPGGAPSLPRHISASSWCARGAEAMAMAKAKSTALSAAEKCRNILGASWEAHLNTIKADAKGSKGEVYTSRVHYMVQKGMPYLIVPENDMHNINIIIDERGSLSVSSPVPGRLASLLKSLNKLPPRVAMTGDVLRMKETKVPVIAESLKKAILKEHKAASEATYGVSTVLSSASATCRSRSEGLLSLLNEESSYNILKFEIGSCVFIDSMGSSHNIKLDTFEPPKADLLLPFSSRLIDGINRSDPRRRALILFCFEYFDVTARDALLLSVDHHGFEVLARVPERATAPDVPQQYHWKEFRFTFKEAVKDVEDFCRMLVELEEEALHSVKSYSGLG

SEQ ID NO: 63392 - protein, 311 aa, Triticum aestivum
  peptide (1)..(311): Ceres Seq. ID no. 12616214
  misc_feature (72)..(310): Homolog of NCBI NO: 15229211 NR Description: unknown protein; protein id: At3g04020.1
MAMAKAKSTALSAAEKCRNILGASWEAHLNTIKADAKGSKGEVYTSRVHYMVQKGMPYLIVPENDMHNINIIIDERGSLSVSSPVPGRLASLLKSLNKLPPRVAMTGDVLRMKETKVPVIAESLKKAILKEHKAASEATYGVSTVLSSASATCRSRSEGLLSLLNEESSYNILKFEIGSCVFIDSMGSSHNIKLDTFEPPKADLLLPFSSRLIDGINRSDPRRRALILFCFEYFDVTARDALLLSVDHHGFEVLARVPERATAPDVPQQYHWKEFRFTFKEAVKDVEDFCRMLVELEEEALHSVKSYSGLG

SEQ ID NO: 63393 - protein, 309 aa, Triticum aestivum
  peptide (1)..(309): Ceres Seq. ID no. 12616215
  misc_feature (70)..(308): Homolog of NCBI NO: 15229211 NR Description: unknown protein; protein id: At3g04020.1
MAKAKSTALSAAEKCRNILGASWEAHLNTIKADAKGSKGEVYTSRVHYMVQKGMPYLIVPENDMHNINIIIDERGSLSVSSPVPGRLASLLKSLNKLPPRVAMTGDVLRMKETKVPVIAESLKKAILKEHKAASEATYGVSTVLSSASATCRSRSEGLLSLLNEESSYNILKFEIGSCVFIDSMGSSHNIKLDTFEPPKADLLLPFSSRLIDGINRSDPRRRALILFCFEYFDVTARDALLLSVDHHGFEVLARVPERATAPDVPQQYHWKEFRFTFKEAVKDVEDFCRMLVELEEEALHSVKSYSGLG

SEQ ID NO: 63394 - DNA, 1593 bp, Triticum aestivum
  misc_feature (1)..(1593): Ceres Seq. ID no. 13655712
ctctcagtttctctctcacacacagctctctctctctctctctccttctctccctctctcaaatactccccatgcccatcgccgtcctcctttgaagaagccaatggccagcaatggcatggcgtcctctccctccgccttcttccctccgaatttcctcctccacatgcagcaagcaccaccgcagcatgacccccaagaacaccaccagcagcaccaccaccaccaccatgagcaccacctccctcctccccatccccagcacaaccccttcctcccctccccccaatgcccctccctccaggacttccgtggcggtctgtcgccaatgctggggaagcgcccggcgatgtacgggggcggcggcgacgggggctgcggcggcgacgaggtgaccggcggaggcgcgaacgaggaggagacgtcggacgacgggtcgcagctgggcggcgagaagaagcggcggctgaacgtggagcaggtgcggacgctggagaagaacttcgaggtggccaacaagctggagccggagcgcaagatgcagctggcccgcgcgctggggctgcagccgcggcaggtggccatctggttccagaaccgccgcgcccggtggaagacaaagcagctggagaaggactacgacgtgctcaagcgccagttcgacgccgtcaaggccgagaacgacgccctcctctcccacaacaagaagctccagtccgagatactgggactgaagggatgcagggaggcggcgtcggagctgatcaacctcaacaaggagacggaggcgtcctgcagcaaccgcagcgagaacagctccgagatcaacctcgacatctcgcgcacgccgccgtccgacggccccatggacgctccgccctcgcaccagcagggcggcgggggcgggggcatgatccccttctacccctccgtcgcgcgccccgcgggcgtcgacatcgaccatctcctccacgcctccgtccccaagatggagcaccaccacggcggccccgacacgcccagcttcggcaacctgctgtgcggcgtcgacgagccgccgccgttctggccgtgggcggatcaccagcagttcaactgatcgcccggtcggtcgatcgggacgatatatatctttgttgcagtcaatgacgtctgctttgcttgcatggtcagcaatgagcgtgcataaatattcgatgcgtttggattcttgatgaggacgtacgtacggtggagacggttgtacatgcatgtttgatgagaggcaagttcagttcatccatgaggtacctactgaagacgatggtgatgcgatttgagtcatggatcgatcgagttgatgatgaatagtggggctacgtgtaggggaataagtccggtgtgtgtgaagcgtgtgtaggtagattttggagttgaatagtacctacctttggtattcttattattttttcttgttttttcatttttcctcttccttttgttcccatacataaatttgtgaattgtgaggcggtgttgatccgttgttgtataggttaatggtgcatgtggtgcttattccccctatttatatatggattatgtgaagactgt

SEQ ID NO: 63395 - protein, 365 aa, Triticum aestivum
  peptide (1)..(365): Ceres Seq. ID no. 13655713
  misc_feature (152)..(206): Pfam Name: Homeobox domain Pfam Description: Homeobox domain
  misc_feature (341)..(365): Homolog of NCBI NO: 25386233 NR Description: hypothetical protein T2P11.15 - Arabidopsis
  misc_feature (63)..(294): Homolog of NCBI NO: 25386233 NR Description: hypothetical protein T2P11.15 - Arabidopsis
  misc_feature (152)..(365): Homolog of NCBI NO: 6175248 NR Description: jasmonic acid 1 [Lycopersicon esculentum]
  misc_feature (47)..(365): Homolog of NCBI NO: 7446243 NR Description: homeotic protein - carrot
  misc_feature (47)..(365): Homolog of NCBI NO: 1435022 NR Description: DNA-binding protein [Daucus carota]
  misc_feature (85)..(365): Homolog of NCBI NO: 21555784 NR Description: homeobox gene 13 protein [Arabidopsis thaliana]
  misc_feature (85)..(365): Homolog of NCBI NO: 15222452 NR Description: homeobox-leucine zipper protein ATHB-13 (HD-Zip
  misc_feature (78)..(365): Homolog of NCBI NO: 7446247 NR Description: homeotic protein - common sunflower
  misc_feature (35)..(323): Homolog of NCBI NO: 37534178 NR Description: putative homeotic protein
  misc_feature (35)..(336): Homolog of NCBI NO: 19071644 NR Description: putative DNA-binding protein
SQFLSHTQLSLSLSPSLPLSNTPHAHRRPPLKKPMASNGMASSPSAFFPPNFLLHMQQAPPQHDPQEHHQQHHHHHHEHHLPPPHPQHNPFLPSPQCPSLQDFRGGLSPMLGKRPAMYGGGGDGGCGGDEVTGGGANEEETSDDGSQLGGEKKRRLNVEQVRTLEKNFEVANKLEPERKMQLARALGLQPRQVAIWFQNRRARWKTKQLEKDYDVLKRQFDAVKAENDALLSHNKKLQSEILGLKGCREAASELINLNKETEASCSNRSENSSEINLDISRTPPSDGPMDAPPSHQQGGGGGGMIPFYPSVARPAGVDIDHLLHASVPKMEHHHGGPDTPSFGNLLCGVDEPPPFWPWADHQQFN

SEQ ID NO: 63396 - protein, 331 aa, Triticum aestivum
  peptide (1)..(331): Ceres Seq. ID no. 13655714
  misc_feature (118)..(172): Pfam Name: Homeobox domain Pfam Description: Homeobox domain
  misc_feature (307)..(331): Homolog of NCBI NO: 25386233 NR Description: hypothetical protein T2P11.15 - Arabidopsis
  misc_feature (29)..(260): Homolog of NCBI NO: 25386233 NR Description: hypothetical protein T2P11.15 - Arabidopsis
  misc_feature (118)..(331): Homolog of NCBI NO: 6175248 NR Description: jasmonic acid 1 [Lycopersicon esculentum]
  misc_feature (13)..(331): Homolog of NCBI NO: 7446243 NR Description: homeotic protein - carrot
  misc_feature (13)..(331): Homolog of NCBI NO: 1435022 NR Description: DNA-binding protein [Daucus carota]
  misc_feature (51)..(331): Homolog of NCBI NO: 21555784 NR Description: homeobox gene 13 protein [Arabidopsis thaliana]
  misc_feature (51)..(331): Homolog of NCBI NO: 15222452 NR Description: homeobox-leucine zipper protein ATHB-13 (HD-Zip
  misc_feature (44)..(331): Homolog of NCBI NO: 7446247 NR Description: homeotic protein - common sunflower
  misc_feature (1)..(289): Homolog of NCBI NO: 37534178 NR Description: putative homeotic protein
  misc_feature (1)..(302): Homolog of NCBI NO: 19071644 NR Description: putative DNA-binding protein
MASNGMASSPSAFFPPNFLLHMQQAPPQHDPQEHHQQHHHHHHEHHLPPPHPQHNPFLPSPQCPSLQDFRGGLSPMLGKRPAMYGGGGDGGCGGDEVTGGGANEEETSDDGSQLGGEKKRRLNVEQVRTLEKNFEVANKLEPERKMQLARALGLQPRQVAIWFQNRRARWKTKQLEKDYDVLKRQFDAVKAENDALLSHNKKLQSEILGLKGCREAASELINLNKETEASCSNRSENSSEINLDISRTPPSDGPMDAPPSHQQGGGGGGMIPFYPSVARPAGVDIDHLLHASVPKMEHHHGGPDTPSFGNLLCGVDEPPPFWPWADHQQFN

SEQ ID NO: 63397 - protein, 326 aa, Triticum aestivum
  peptide (1)..(326): Ceres Seq. ID no. 13655715
  misc_feature (113)..(167): Pfam Name: Homeobox domain Pfam Description: Homeobox domain
  misc_feature (302)..(326): Homolog of NCBI NO: 25386233 NR Description: hypothetical protein T2P11.15 - Arabidopsis
  misc_feature (24)..(255): Homolog of NCBI NO: 25386233 NR Description: hypothetical protein T2P11.15 - Arabidopsis
  misc_feature (113)..(326): Homolog of NCBI NO: 6175248 NR Description: jasmonic acid 1 [Lycopersicon esculentum]
  misc_feature (8)..(326): Homolog of NCBI NO: 7446243 NR Description: homeotic protein - carrot
  misc_feature (8)..(326): Homolog of NCBI NO: 1435022 NR Description: DNA-binding protein [Daucus carota]
  misc_feature (46)..(326): Homolog of NCBI NO: 21555784 NR Description: homeobox gene 13 protein [Arabidopsis thaliana]
  misc_feature (46)..(326): Homolog of NCBI NO: 15222452 NR Description: homeobox-leucine zipper protein ATHB-13 (HD-Zip
  misc_feature (39)..(326): Homolog of NCBI NO: 7446247 NR Description: homeotic protein - common sunflower
  misc_feature (1)..(284): Homolog of NCBI NO: 37534178 NR Description: putative homeotic protein
  misc_feature (1)..(297): Homolog of NCBI NO: 19071644 NR Description: putative DNA-binding protein
MASSPSAFFPPNFLLHMQQAPPQHDPQEHHQQHHHHHHEHHLPPPHPQHNPFLPSPQCPSLQDFRGGLSPMLGKRPAMYGGGGDGGCGGDEVTGGGANEEETSDDGSQLGGEKKRRLNVEQVRTLEKNFEVANKLEPERKMQLARALGLQPRQVAIWFQNRRARWKTKQLEKDYDVLKRQFDAVKAENDALLSHNKKLQSEILGLKGCREAASELINLNKETEASCSNRSENSSEINLDISRTPPSDGPMDAPPSHQQGGGGGGMIPFYPSVARPAGVDIDHLLHASVPKMEHHHGGPDTPSFGNLLCGVDEPPPFWPWADHQQFN

SEQ ID NO: 63398 - DNA, 826 bp, Triticum aestivum
  misc_feature (1)..(826): Ceres Seq. ID no. 15173959
tccgctccggccccagtccagtactgtgcgcgcatctctcctcctttttctcccccctgagaggctttctttgcttcacgcggggctccggatattcgttgtcctcgcggctcagccaccgcggaatccatccagcgcagctcagggggaagaggcggtcgaagctggaggtggaagaggggctcgccatgggctccgagggatccgcgccggtcgtagttcccagaaactttagacttttggaagaacttgagagaggtgagaagggcattggtgatggaactgtgagctatgggatggatgatgctgatgacatatatatgcgctcctggacaggaactattatcggtccacccaatactgttcacgagggacgaatctatcaattgaagttgttctgtgatacagattatccagacaaaccaccgactgtccggttccaggctagggtcaatatgacatgtgtgaatcaagaaactggaatggttgatccaagacgatttcctatgcttggaaactggaaaagggaacatacaatggaggatatcctcatcagccttaaaaaggagatgtcaacccctcagaaccgcaggctccaccagcctcatgaaggcaacgatgatcagagagtggagcagaaagggctagcagctagatgtgtcgttatgtaagatacgcgcattgcaatgtacagtgttacactgagtagcatcagaacgcagaagctgaggaaacccaggaggaaatcatgtaatttgacagtcgctagtcgctactttggatcgaaactgctctattgccgaaataaaatgccaatgacttcgtc

SEQ ID NO: 63399 - protein, 222 aa, Triticum aestivum
  peptide (1)..(222): Ceres Seq. ID no. 15173960
  misc_feature (61)..(204): Homolog of NCBI NO: 32488709 NR Description: OSJNBa0088H09.10 [Oryza sativa (japonica
  misc_feature (61)..(204): Homolog of NCBI NO: 30686662 NR Description: ubiquitin-conjugating enzyme family [Arabidopsis
  misc_feature (61)..(204): Homolog of NCBI NO: 18404032 NR Description: ubiquitin-conjugating enzyme family [Arabidopsis
  misc_feature (63)..(222): Homolog of NCBI NO: 25326240 NR Description: protein F26F24.10 [imported] - Arabidopsis
  misc_feature (61)..(204): Homolog of NCBI NO: 30693656 NR Description: ubiquitin-conjugating enzyme family [Arabidopsis
  misc_feature (61)..(204): Homolog of NCBI NO: 18409633 NR Description: ubiquitin-conjugating enzyme family [Arabidopsis
  misc_feature (63)..(222): Homolog of NCBI NO: 21593918 NR Description: E2, ubiquitin-conjugating enzyme, putative
  misc_feature (63)..(222): Homolog of NCBI NO: 18409647 NR Description: ubiquitin-conjugating enzyme family [Arabidopsis
  misc_feature (63)..(222): Homolog of NCBI NO: 18395221 NR Description: ubiquitin-conjugating enzyme family [Arabidopsis
  misc_feature (63)..(222): Homolog of NCBI NO: 13324790 NR Description: putative DNA-binding protein [Oryza sativa]
RSGPSPVLCAHLSSFFSPLRGFLCFTRGSGYSLSSRLSHRGIHPAQLRGKRRSKLEVEEGLAMGSEGSAPVVVPRNFRLLEELERGEKGIGDGTVSYGMDDADDIYMRSWTGTIIGPPNTVHEGRIYQLKLFCDTDYPDKPPTVRFQARVNMTCVNQETGMVDPRRFPMLGNWKREHTMEDILISLKKEMSTPQNRRLHQPHEGNDDQRVEQKGLAARCVVM

SEQ ID NO: 63400 - protein, 160 aa, Triticum aestivum
  peptide (1)..(160): Ceres Seq. ID no. 15173961
  misc_feature (1)..(142): Homolog of NCBI NO: 32488709 NR Description: OSJNBa0088H09.10 [Oryza sativa (japonica
  misc_feature (1)..(142): Homolog of NCBI NO: 30686662 NR Description: ubiquitin-conjugating enzyme family [Arabidopsis
  misc_feature (1)..(142): Homolog of NCBI NO: 18404032 NR Description: ubiquitin-conjugating enzyme family [Arabidopsis
  misc_feature (1)..(160): Homolog of NCBI NO: 25326240 NR Description: protein F26F24.10 [imported] - Arabidopsis
  misc_feature (1)..(142): Homolog of NCBI NO: 30693656 NR Description: ubiquitin-conjugating enzyme family [Arabidopsis
  misc_feature (1)..(142): Homolog of NCBI NO: 18409633 NR Description: ubiquitin-conjugating enzyme family [Arabidopsis
  misc_feature (1)..(160): Homolog of NCBI NO: 21593918 NR Description: E2, ubiquitin-conjugating enzyme, putative
  misc_feature (1)..(160): Homolog of NCBI NO: 18409647 NR Description: ubiquitin-conjugating enzyme family [Arabidopsis
  misc_feature (1)..(160): Homolog of NCBI NO: 18395221 NR Description: ubiquitin-conjugating enzyme family [Arabidopsis
  misc_feature (1)..(160): Homolog of NCBI NO: 13324790 NR Description: putative DNA-binding protein [Oryza sativa]
MGSEGSAPVVVPRNFRLLEELERGEKGIGDGTVSYGMDDADDIYMRSWTGTIIGPPNTVHEGRIYQLKLFCDTDYPDKPPTVRFQARVNMTCVNQETGMVDPRRFPMLGNWKREHTMEDILISLKKEMSTPQNRRLHQPHEGNDDQRVEQKGLAARCVVM

SEQ ID NO: 63401 - protein, 124 aa, Triticum aestivum
  peptide (1)..(124): Ceres Seq. ID no. 15173962
  misc_feature (1)..(106): Homolog of NCBI NO: 32488709 NR Description: OSJNBa0088H09.10 [Oryza sativa (japonica
  misc_feature (1)..(106): Homolog of NCBI NO: 30686662 NR Description: ubiquitin-conjugating enzyme family [Arabidopsis
  misc_feature (1)..(106): Homolog of NCBI NO: 18404032 NR Description: ubiquitin-conjugating enzyme family [Arabidopsis
  misc_feature (1)..(124): Homolog of NCBI NO: 25326240 NR Description: protein F26F24.10 [imported] - Arabidopsis
  misc_feature (1)..(106): Homolog of NCBI NO: 30693656 NR Description: ubiquitin-conjugating enzyme family [Arabidopsis
  misc_feature (1)..(106): Homolog of NCBI NO: 18409633 NR Description: ubiquitin-conjugating enzyme family [Arabidopsis
  misc_feature (1)..(124): Homolog of NCBI NO: 21593918 NR Description: E2, ubiquitin-conjugating enzyme, putative
  misc_feature (1)..(124): Homolog of NCBI NO: 18409647 NR Description: ubiquitin-conjugating enzyme family [Arabidopsis
  misc_feature (1)..(124): Homolog of NCBI NO: 18395221 NR Description: ubiquitin-conjugating enzyme family [Arabidopsis
  misc_feature (1)..(124): Homolog of NCBI NO: 13324790 NR Description: putative DNA-binding protein [Oryza sativa]
MDDADDIYMRSWTGTIIGPPNTVHEGRIYQLKLFCDTDYPDKPPTVRFQARVNMTCVNQETGMVDPRRFPMLGNWKREHTMEDILISLKKEMSTPQNRRLHQPHEGNDDQRVEQKGLAARCVVM

SEQ ID NO: 63402 - DNA, 1249 bp, Triticum aestivum
  misc_feature (1)..(1249): Ceres Seq. ID no. 13598507
aatttcgtcccatagaaaaaccacagccacgaatcaggggaaatccggcagcgccgcgtgtgcgaagacgagtccaaacacggaacaaagccggcgattagcggcacactgagctggcatcttgtgcttctccgtccgtccgcgtccacaccggagctaggaggagaggagggggaagaagaaggcgtcgaggaggcgatggcgacggagtcgccgttccgggcggacgtgctgaagggcaaggcggcgctggtcaccggcggcggctccggcatctgcttcgagatcgccgcccagctcgcccgccacggcgcccacgtcgccatcatgggccgccgccgcgaggtcctcgacaaggccgtcgccgccctccgctccgagggccttcgggctgttggatttcagggagatgtacgtaaccaggaggatgcagcgagagtgcttgcgtcgaccgttgagcatttcggcaagcttgacattcttgtcaacggtgcagcgggcaacttccttgcatccccggaggatctcacacccaagggattccggacagttcttgagattgacactgtgggtacatacacaatgtgctacgaagccctgaagtatctgaaaaaaggtgggccagggaggggtccctccactggtggcctcatcattaacataagcgcgacactgcattacactgcttcttggtaccaaattcatgtctccgccgctaaggcaggtgttgatagtatcacaagaacgctggctctggaatggggaacagattatgaaattagggtcaatggaattgcaccaggaccaatcggaggcactccaggtctgaggaagcttgcacctgatgaaatgggcaaggggaaaagggaaatgatgcctttatttaagttgggggagacacaggacatagcaatggccgcgctctatcttgcttccgatgctggcaaatatgtaaatgggactacgctggtggttgatggagggctttggttgagtcaccctcgccacatccccaaggaggaagtgaaggagctctcaaaggtgatcgagaagaaggttagggcctctggtgtaggtgtaccctccagcaaattgtgatgacatccttggtttatgtcactgtctcacacatgtcatgtaccaccaccctcagtatttgctgtcagcggctcagcaccaactttattgtgtacgtggatcttgtaacctgctgagaacaattggtttcaaatgagcaacttcagtattt

SEQ ID NO: 63403 - protein, 299 aa, Triticum aestivum
  peptide (1)..(299): Ceres Seq. ID no. 13598508
  misc_feature (12)..(265): Homolog of NCBI NO: 15614707 NR Description: 2,4-dienoyl-CoA reductase (NADPH) [Bacillus
  misc_feature (1)..(271): Homolog of NCBI NO: 10190704 NR Description: 2,4-dienoyl CoA reductase 2, peroxisomal
  misc_feature (7)..(271): Homolog of NCBI NO: 25282441 NR Description: 2-4-dienoyl-Coenzyme A reductase 2, peroxisomal
  misc_feature (14)..(264): Homolog of NCBI NO: 23026255 NR Description: hypothetical protein [Microbulbifer degradans
  misc_feature (7)..(271): Homolog of NCBI NO: 6753622 NR Description: 2-4-dienoyl-Coenzyme A reductase 2, peroxisomal
  misc_feature (11)..(271): Homolog of NCBI NO: 39795780 NR Description: Unknown (protein for IMAGE:5307739) [Silurana
  misc_feature (7)..(262): Homolog of NCBI NO: 15805153 NR Description: oxidoreductase, short-chain
  misc_feature (129)..(274): Homolog of NCBI NO: 15226036 NR Description: hypothetical protein [Arabidopsis thaliana]
  misc_feature (4)..(299): Homolog of NCBI NO: 30682333 NR Description: expressed protein [Arabidopsis thaliana]
  misc_feature (1)..(299): Homolog of NCBI NO: 38347363 NR Description: OSJNBa0070C17.24 [Oryza sativa (japonica
MATESPFRADVLKGKAALVTGGGSGICFEIAAQLARHGAHVAIMGRRREVLDKAVAALRSEGLRAVGFQGDVRNQEDAARVLASTVEHFGKLDILVNGAAGNFLASPEDLTPKGFRTVLEIDTVGTYTMCYEALKYLKKGGPGRGPSTGGLIINISATLHYTASWYQIHVSAAKAGVDSITRTLALEWGTDYEIRVNGIAPGPIGGTPGLRKLAPDEMGKGKREMMPLFKLGETQDIAMAALYLASDAGKYVNGTTLVVDGGLWLSHPRHIPKEEVKELSKVIEKKVRASGVGVPSSKL

SEQ ID NO: 63404 - protein, 256 aa, Triticum aestivum
  peptide (1)..(256): Ceres Seq. ID no. 13598509
  misc_feature (1)..(222): Homolog of NCBI NO: 15614707 NR Description: 2,4-dienoyl-CoA reductase (NADPH) [Bacillus
  misc_feature (1)..(228): Homolog of NCBI NO: 10190704 NR Description: 2,4-dienoyl CoA reductase 2, peroxisomal
  misc_feature (1)..(228): Homolog of NCBI NO: 25282441 NR Description: 2-4-dienoyl-Coenzyme A reductase 2, peroxisomal
  misc_feature (1)..(221): Homolog of NCBI NO: 23026255 NR Description: hypothetical protein [Microbulbifer degradans
  misc_feature (1)..(228): Homolog of NCBI NO: 6753622 NR Description: 2-4-dienoyl-Coenzyme A reductase 2, peroxisomal
  misc_feature (1)..(228): Homolog of NCBI NO: 39795780 NR Description: Unknown (protein for IMAGE:5307739) [Silurana
  misc_feature (1)..(219): Homolog of NCBI NO: 15805153 NR Description: oxidoreductase, short-chain
  misc_feature (86)..(231): Homolog of NCBI NO: 15226036 NR Description: hypothetical protein [Arabidopsis thaliana]
  misc_feature (1)..(256): Homolog of NCBI NO: 30682333 NR Description: expressed protein [Arabidopsis thaliana]
  misc_feature (1)..(256): Homolog of NCBI NO: 38347363 NR Description: OSJNBa0070C17.24 [Oryza sativa (japonica
MGRRREVLDKAVAALRSEGLRAVGFQGDVRNQEDAARVLASTVEHFGKLDILVNGAAGNFLASPEDLTPKGFRTVLEIDTVGTYTMCYEALKYLKKGGPGRGPSTGGLIINISATLHYTASWYQIHVSAAKAGVDSITRTLALEWGTDYEIRVNGIAPGPIGGTPGLRKLAPDEMGKGKREMMPLFKLGETQDIAMAALYLASDAGKYVNGTTLVVDGGLWLSHPRHIPKEEVKELSKVIEKKVRASGVGVPSSKL

SEQ ID NO: 63405 - protein, 171 aa, Triticum aestivum
  peptide (1)..(171): Ceres Seq. ID no. 13598510
  misc_feature (1)..(137): Homolog of NCBI NO: 15614707 NR Description: 2,4-dienoyl-CoA reductase (NADPH) [Bacillus
  misc_feature (1)..(143): Homolog of NCBI NO: 10190704 NR Description: 2,4-dienoyl CoA reductase 2, peroxisomal
  misc_feature (1)..(143): Homolog of NCBI NO: 25282441 NR Description: 2-4-dienoyl-Coenzyme A reductase 2, peroxisomal
  misc_feature (1)..(136): Homolog of NCBI NO: 23026255 NR Description: hypothetical protein [Microbulbifer degradans
  misc_feature (1)..(143): Homolog of NCBI NO: 6753622 NR Description: 2-4-dienoyl-Coenzyme A reductase 2, peroxisomal
  misc_feature (1)..(143): Homolog of NCBI NO: 39795780 NR Description: Unknown (protein for IMAGE:5307739) [Silurana
  misc_feature (1)..(134): Homolog of NCBI NO: 15805153 NR Description: oxidoreductase, short-chain
  misc_feature (1)..(146): Homolog of NCBI NO: 15226036 NR Description: hypothetical protein [Arabidopsis thaliana]
  misc_feature (1)..(171): Homolog of NCBI NO: 30682333 NR Description: expressed protein [Arabidopsis thaliana]
  misc_feature (1)..(171): Homolog of NCBI NO: 38347363 NR Description: OSJNBa0070C17.24 [Oryza sativa (japonica
MCYEALKYLKKGGPGRGPSTGGLIINISATLHYTASWYQIHVSAAKAGVDSITRTLALEWGTDYEIRVNGIAPGPIGGTPGLRKLAPDEMGKGKREMMPLFKLGETQDIAMAALYLASDAGKYVNGTTLVVDGGLWLSHPRHIPKEEVKELSKVIEKKVRASGVGVPSSKL

SEQ ID NO: 63406 - DNA, 1226 bp, Triticum aestivum
  misc_feature (1)..(1226): Ceres Seq. ID no. 12617197
gtctgctgtccacttcagcgcagcgtggcgagacgcggagcaaccaaactccgcacagcagaggggactagccggagcggggagaaaaaacagcatggcggcggcggcggcggcgaggaagagcgtgtgcgtgaccggcgcagggggcttcgtcgcctcgtggctcgtcaagctcctcctctctaagggccactacgcggtccgcggcaccgtgcgcgatcccggtaatgctaagaatgctcaccttaaggcgctagaaggtgctggggaaaggttggagctgctcagcgccgacctgctgaactacgacagcattgcgtcagcggttgctggctgtgagggcgtctttcatgttgctagccctgtcccttctggcagatcaaccaatcctgaggaagaagttatagcccctgctgtaacaggcacactgaatgtcttgaaggcttgctacgaggcgaaagttaagcgagttgtcatggtgtcttcagttgctgctgtgtccaataatcctaactggcctaaggataaattatttgatgaagatagctggtcagacgaggatctctgcagaaagggtgaggattggtatttcctttccaaaacactcgcagagcgtgaggcttttgcttatgcagcaaaaactgggctggatattgtaactatttgcccgtcgttggtaattggccccttgatgcagtctacagtaaatacaagcagtaacattctccttaattacctcaaaggagaacgtgatactgtagaaaataaactcaggaatgtagtggatgtccgtgatgttgccgatgctcttctattggcatatgaaaatccagaggcgtctggacggtacatctgcagttcaaaaccagtaaaagtctctgatatgataagcgtactgaagaccttatatccaatgtacacttatcccaaaaactttacggaagtggaagaaaataccatttatagttcagagaaacttcagaagctagggtggaccttcaggcctttagagaagaccctgggggacagcgtggaatcctacaaagcatctggcgtcctgaactgagcatccaaccagggaaagtttggctgttaatgcttgcaaactccttgtggttcatgtaagcagtgaaacaaaataagttggtgacacaatcgtcacgagagtctgtgtgaacatgaacaaagcatgaatcgtatgcgcgcctttcttttggtgtgtcttg

SEQ ID NO: 63407 - protein, 354 aa, Triticum aestivum
  peptide (1)..(354): Ceres Seq. ID no. 12617198
  misc_feature (39)..(299): Pfam Name: 3-beta hydroxysteroid dehydrogenase/isomerase family Pfam Description: 3-beta hydroxysteroid dehydrogenase/isomerase
  misc_feature (40)..(353): Homolog of NCBI NO: 9964087 NR Description: cinnamoyl CoA reductase [Lolium perenne]
  misc_feature (40)..(353): Homolog of NCBI NO: 3341511 NR Description: cinnamoyl-CoA reductase [Saccharum officinarum]
  misc_feature (40)..(353): Homolog of NCBI NO: 9998901 NR Description: cinnamoyl-CoA reductase [Populus balsamifera
  misc_feature (24)..(353): Homolog of NCBI NO: 3242328 NR Description: cinnamoyl-CoA reductase [Zea mays]
  misc_feature (40)..(351): Homolog of NCBI NO: 17978649 NR Description: cinnamoyl-CoA reductase [Pinus taeda]
  misc_feature (24)..(353): Homolog of NCBI NO: 7431410 NR Description: cinnamoyl CoA reductase - maize
  misc_feature (37)..(353): Homolog of NCBI NO: 6554472 NR Description: putative cinnamoyl-CoA reductase; 14056-15506
  misc_feature (37)..(353): Homolog of NCBI NO: 15223068 NR Description: putative cinnamoyl-CoA reductase; protein id:
  misc_feature (42)..(354): Homolog of NCBI NO: 15226134 NR Description: putative cinnamoyl-CoA reductase
  misc_feature (35)..(354): Homolog of NCBI NO: 15226135 NR Description: putative cinnamoyl-CoA reductase
SAVHFSAAWRDAEQPNSAQQRGLAGAGRKNSMAAAAAARKSVCVTGAGGFVASWLVKLLLSKGHYAVRGTVRDPGNAKNAHLKALEGAGERLELLSADLLNYDSIASAVAGCEGVFHVASPVPSGRSTNPEEEVIAPAVTGTLNVLKACYEAKVKRVVMVSSVAAVSNNPNWPKDKLFDEDSWSDEDLCRKGEDWYFLSKTLAEREAFAYAAKTGLDIVTICPSLVIGPLMQSTVNTSSNILLNYLKGERDTVENKLRNVVDVRDVADALLLAYENPEASGRYICSSKPVKVSDMISVLKTLYPMYTYPKNFTEVEENTIYSSEKLQKLGWTFRPLEKTLGDSVESYKASGVLN
